United States Patent Application Publication US 2022/0290142 A1 - sequence listing, part 3

SEQ ID NO: 1173 - DNA, 175577 bp, Homo sapiens
cttcttctcctccttctcggccgggaggaggcagggctggatccctcagccgccgccgctcctcctcctggcaggccggccgcggagtcagctgacgccggcgctccagcctcgcctccccgcgccgcgctctgcgctccccgaaagtggctgcaagccggccgcccactgtcagggttggggggacagagaaagtgatgtgcgccttctaaagcctcgcccagcgccgccgaagcagcttcacctctccaactttctcccaccgactgcttgtcttgaccctgccctccaccctccccagagccacttcgggtgcgcgctcttgggtaaagggggggtcaccggctgtctgggatggcttccaattttaatgacatagtgaagcaagggtacgtgaggatccggagcagacgcctcggggtgagtatcgatcctctccgtgttgctgttcgccggttcgattgtctctctcttgagccagcatccctggagggtggacggagagtccccggccgcgcgccggagaattgcgcggtggctttctcagccgaaacccgcgtctccggggctgtcactgtaaggccagcgtctaggtatgtaatggatctatctttatctcttggatgacttggctttctgatggtggccgcgtgttgggcttcagtagcccctggagcccatctactcgaaataaatatttctcggtagccatggaagttggagctgagaagcccgggcgggggtgcctgccggatgcccccggttcccctcttttcccactcgccgccaacttaacttttccgggggatggatcggctggttgagaaagaggacacgcatactcggtgtgaacgaggtcacgaaccctctgaccccagggagagatttctgccaagcgtaaggtgtctttggatccccccacctctgtcccaggtgtcgtgtcaaaggcggtgcgggctggcctctggtcggggccaacttgggtagatacttgaatctggattttccgtggttcgaagccggggtggtggatttctgttgctggaatacaccctggaggtccacggaagggttatttacgtggaacctgatacctggcatagcgcaagtgctccctacatatgtcctgaaaggaagaatgaatgaatcttagggcacttgggacagatgttgacacaggctagctccttccttaaaactccctctctttcgcccctttctctcttggctcttcgctggaggaggcttcaaaagagaacctacccttcctctccttgggactgaatgatggtggaagaattcttgagggagagggaagatactggaacgatttttttatttcctaaaaatttcaaactaggtccctcatttctctttgcctcctatcaagtgttgtcgctgttttagttgatcctgtgcgtttggacataaggggtgaaaagtgggggtggagaggtggcgggggcggggggagaaaatatcctttggtgtaatgcctgaaataagtataatgtcagtaatcgtgtggaatgccgccattgataatgagtggtaaattgaatagctttctttagaaatatgtgtcatttggcatctttctcttacttggtctttggactgttttaatgtgccagatacttttactgaaaactgaaaagaaatttcacagtagtaaactcagctagggagggaagccctgtggggaggaacatccgcaattattataaaactcttgcctaattcgttttggtctttttcttttctttttctcccctgctggtgaccatgttttagcgattatgtcctgtgttattgtgaatatatacatatgtaattagggagaaatgtaacagaattcaccatttccatcagctctgccaaagtttccttggttttcttttctgctatgcaaatattctcatcttcaagagcacccattgttgggggtactttactgagtgactcccatgtaaggggcaaacaataatgggaactttctatttttggtatgcttataggctggccaagtgttacaattttaaggggagttaagttaaaaaaaaaaaaaacccagcattctaatttagctttactccatcatgtcaatggaaggaattggtatgagacatccattctgtgttagggagcattccaatgggaagaggacatgcattattaatgcacaaaatatgaattattcataaggatcagagtttatgccaaattgtgacacatggtaatttatttgaaaaactggttaccatcactttcttgtttgtggtaactgagattattttttctagattattacaattgacacaacatagccctatgtgtgtgccaacatttatggacagatatttgaagcagaaggaacagaaatatttagtttgtatttgttttatgttttacagcattttggatgctaatgagcagtatactttctcaagatttattctttttgtctgtgttcacgttcagacttcagaatatctattgaattatggttattgctcatggagagaaaaggtcaaaaatatgatcaagtaaatctggtcttatttgttagcattggttttctcaccagttaatttttaaaatattcttatggtatgatttacaaaagaggctgattacatagttgccagaacacagtgcaaaccaaagttttaatggaggctgcaaatattggtgaaggatgctgtacggaattggcatggggaccctatgtccacagtaaggaatgttagcggtattaatctaggctacatatagtctagaacagcatgcgacatgtatcttctaggaatatgtgccagtctcaaagagaggtagggcatttattttgtctagcacagagtagacacttggtaagttcatgttgaaatatgtgctgaactatatagtgcatggatggtcttgccatttataacctttaggaactaatacaacagcatttattaatggaatccagaccatgtttgggacggtttataattaaatacaaaaacatttcatggtaagcagctgttcctggtgccaaggaataaatgcttcttcagatttggagaaagaggagaagggaacgcattctgcttctattgcttgttgacctttgacctttcttggcctcagtttcctagtctgtacaatgaacactatttaatgttcttgggagcattaaagaagatatttgtgaaaatgcaatgaaagtctagaacattgattctgcttgtatcattttctttaatcaaagatgagttaggattggtagacggatataggaattatctatttccttctctttctatgtagaagtgtacaaaggcataaatgtttatgcagctccagattttttcaatggatgaaacttttacaaattatatacatatatgtgtatgtgtgtgtatttttatacataggaataaatatatacatacaacctatgtacatattgtataatatataatatacgtatatttatatatgtgattttttaacaggacaggaaacattctaaaaacattcccattcaaatgggtcacagataagtggtcaccttcatttgaaatcctaaagagtttaaatgattaagcaatcaaatatgtatagatttattctcttctttagacatcaaaaagcttaatgaaatataattcatttaactcaaaagtttcagtatcttcacatctgtattccccagcttaatccccattgtttcctggaggtctccagctgtgccctgggtactgaatttgttcaggaatgtcgacgttactatttgaggggctgggggaaggaggggagcagctgtccataattatttgagtaatcgattaaatgcactaaaaatttctttttaggggagaggcaaatcaggcaatttgtacaacattaacctgctgaatgtgtgacttagatagcatcatataacaattctcacttcgtttctttccttgcaatggagatgattttccaatcaatcattgtcatggcttgcccacagtgcaagtttcagaacggaaactcgggtttatttatctacgcacaatccctcagttacttgcctttaagtgacatttctgtgctcttgtctaccaaggacttagcagcttggacctcttttctgacctccactcatgtaaattctcctgtctatcccacatctccacttggatgactcacagacctgctgctcctagagtcctctccatcttagccactagaggtcccagcattttggttgcgaaggtaaaaatcacaagcgaaccttggtgtcatttcactcttctcccctcatctcccacccctacaggcaatccatcaggagatcttgtgggctgtatctttgaaatatatctagaatccggctgtcacctcacgctatccactgctacgaccctggtccgaaccctcctcatctcctccctgtaacattgcaacagtcttctcatttgacttcctgcctacactcttgctcccgctagtgccttctcaatacagtaaagtgttcctttggaaatgtaagaaaggtcatgtcacctggctgctgaagctgtcagaggcgtgtgaaccagagcaactccatcttgaataggagctgggtaaaacaagactgaaacctactgggctacattcccagacagttaaggcattctaagtcacaggatgagataggaggtcggcacaagatacaggtcataaagaccttgctgataaaacagtttacagtaaagaagccagccaaaacccaccaaaaccaagatggccatgagagtgacctctggttttcctcactgctacgtggcgctacccccaccagtgctatgacagtttacagatgccatggcaacgtcaggaagttacccttggtctgaaaaggggaggcatgaataatccatcccttgtttagcatatcatcaagaaataaccataaaaatgggcaaccagcagccctcggggctgctccgtctatggagtagccattctttatgcctttactttcctaataaacttgctttcactttacagacttgccctgaattctttgctgtgagagatccaagaaccctctcttggggtctggatgagaacccctgtctggtaacaaaaccattggtgactttccatatactgcagagaagtcttacaatgggccatgaggccctatgctgccccagaaccctctcgttcactgttttctctgcttggaatatgctgtttccccagttacctcctcctggcttgctctctcacctccttcagccttttctcagctcctaccctctcaatgaggcctttaaggcctccatctatctatctatctatctatcaatcatctatcatctatctatctatcatctatctatcatctatcatctatctatctatcatctatcatctatctatcatctatcatctatctatctatcatctatctatcatctatctatcatctgtctatcatctatctatcatctatctatctatcatctaccatctatctatctatcatctatctatctatcatgtatctatcatctatctatctatctatctatctatctatctatctatctatctatctatatttttttggcggagtcttgctcttttttccaggctggagtgtagtggcgtgatctcagctcactgcagcctctgcctcctgggttcaagcaattctcctgtctcagcctcctaagtagctgggattacaggcatgcaccaccatacccagctaatttttatatttttaatagagacagggtttcaccatgttggccaggctggtgtcgaactcctgaccttgagatccacaagcctcggcctcctaaaagtgctgggattacaggcgtgagccaccgtgcccggcctcagaccactctattttatttcttctccctctcctttccttctttccctgcccctttttctccctagacttattaccctctccttcatttatctttgtattgcctatgtactgccaaggacatgtgaagctacatgagggctgggacttgtttctctcttctttaatcatagctgtcccccagtgcctagtgcagggcccagcacagagtgggcatttgatgaagatttgtggaataaattaatgaccccatcactgtgttgtggcttaagagcataggctctgacatgtgactgcgttaaaatcccaactcactggctggttatgtgacttctggtgagttatttaatatttataagcctccatcttctgtaaaaatatggagactcttactactcacctaatagatgatgatcataaagagcttaacacagtgcttgacacagtaaaaacccaattaatgtttattagggctctcactcctacttccagtgtggttagagacaatgacacttaactggttattatttcactgtttctactgcaattgttcatatcctcaaagaacttgttttttagttaggaaaacaaacttagtacaagtaccaaatgttgcttggcattgatggttgatacagaaggaatttataagatttcgcctttataagattttttatgattctacacaaatggtagagatataaaataaggagaaatgcctcttcatgtaactccaattcgagtgaattcactggactaggaggtatttttgttaacttggggactgttttcttttgtggtagagaagaaattttaaaaattggtcagctcacggccaggttttaaaaataaacattttctaattctttcattttatagtttcacctgacctggtatgccacaaacgctttcatgtttcatttgaggattttagatttagatgttcaggaatccatgcattttttatggtaccatgacaaagtcataatcgtagtatgaaaattatacagatagaataaactcatatactccttttttttccttttgagatggagtctcgctctgctgcctaggctggagtgtcctggtgtgatctcggctcacttgcagcctccatctcctgggttcaatcaattctcctgcctcagcctcttgagtagctgggactacaggcacatgtcaccacagttggctaattttggtatttttagtagagacagggtttcaccatgttggccaggctggccttgtatgcctgacttctggtgatccacccgtttcagcctcccaaagtgctgggattacaggcgtgagccaccgtgcccggcctcatcatatgctattgttatttaagtatatgtatgcacatgcacatatatgcacatatgaactcatgcaactattcagtaagatatgtgaagtttagttactctttaagaacaagaggctttgggataactttaccagtagggaaatttatggccagatagactgcatatatatacatgcatcagctgggacgactcagttattttggcttcatttgaatcagcttcattgacatggtttccatgtcagaagggctttccagctggtatttcagtcgtcttcatctgattgtccatgtggatgagacgattaattgtgcataaagtcagcctttacatcatcatccccaaaactgatttaagcagagtggccaatttagtgactttgtatatagacataaaccaaattagtgatatgattgtccccacatctgccaatgtatttttgaaatcatatttattagaagactagaaatatttatttttaaagcagctttgtaatttttgtggggaatcgtttggtattttaagaacttagttttcattggaatatattttcttccatttgttttatcattcctcaaatatttcttgagtacctattagtgttaaccaccttaaataaggcagatacaatcaccatcctcaaggagttgacaatttaatttttgatttgtattattaacaagagattaatgtattcactatagttaaagaggaattaatctgagtaacaggtcaaatattgaagtgaaaagatgcctgaggatatttttctattctatttttgtgaaatgaggaagggcaaatttgatttttctcttactctaggaatttgatcctagtagggtggaaattaaacctttggagattctaagccttgaagagattatggtgcgacccccccgttcctgtgaaattcaaaataaaattgtgagtttagaaatgccacatgatatatgtgaatgtttaaattaaaatagcttctttctagaatgcagatggctacattttggataagtatttggaagctgatttttgcagagcagttgtgggggctgcctttatttcactagtgttctcaccctctgtttatgccctggatcccagagaacaaaattgttaactggttgtcttgtgttcttaagccgagttgttaactaggctccagtgagaggatgcaggtgacttttctgagacaatgctttgcagcttgtatgagattcttagagaagtctggtcctccctgccccagcctctcccactttccacctgctatgccttcttaaagattaagatcaggttgggtgtggtggctcacgtctgtaatcccagcactttgggaggccgaggcgggtggatcacccgaggtcaggagttctagaccagcctggccaacatggtgaaaccctgtctctactaaaaatacaaaaattagctgggcatggtggcaggtgcctgtaatcccagctactcagggggccgaggcaggagaatcccttgaacccaggaggtggaggttgcattgagccgagattgcgccactgcactccagcctggggaaaaagagcaagacttcatctcaaaaaaaaaaaagttaagatcaatatttcattattttaattgaagttttatttttagataattgttatgttcatatgtagttgtaagaaataatatggagagatattccatgccctttaaccactttccccccaatggtaacatctttcaaatttgtaggacaatataacaaccaatatattgacaatgatacaattaagatatagaacatttcatcccctggaggatccttcacagtcttcttatatagctgcccctcctgcccctgtcctccatatccctaatcccctgacaaccactaatctgttttccttttgtcattttgtcatttcaagaatattatgtaaatggagtccaggcttggtggcttgttcctgtcatcccaggactttgggaggccaaggcagaagggccacttgagcccagaagtttgagactagtctcaggcaacatagtgagactgtctctacaaaaaataaaaatagaaaattagccaggtgtggtggtacacgcctgtagtgctggttatttgagaggttgaagtgggatgatcacttgaccctgggaggttgaggctgcagtgaactctgatcatactactatacttcagcctgaacgacagagcaagatgagactctgtctcagaattttttaaaaagaatattatgtaggctgggcatgatggctcacgcctgtaatcccagcactttgggaggccgaggcgggcagatcacaaggtcgggagttggtgaccagcctgatcaacatggtgaaacactgtctctactaaaaatacaaaaattagtcgggcatggtggagagctactcaggaggctgaggcaggagaatcacttgaacccggatggcggaggttgcagtgagcggcggaggttgcagtgagcggcggaggttgcagtgagctgagatcgtgccattgcactccagcctgggtgacaagagtaagactccgtctcaaaaaaaaaaaaaaaaagaatgtaatgtaaaagaaccatacagtatgtaatgtttggggattggcttttttaaaactcaatataatcccctgagattcgttcaggttgttgtgtgtataagtttgttcttttttcttgctgagtagtgtaccatggtgtgtatgtacaataggtaccgtagtttgtttagacactcacctgtcgaaggacatgggttgtttctggtttttggctatcatgaatgaagctgatatactcatataagcatttgtgtagaggttttcacgtgaacatacgttttcgtgcctctaggcaaatgtccaggagtgcaattgctgggttgtagagtagttgtgtctagtttttaaagaaactgctgaaccgttttctcacagttgtaccattttacattcacattagcaatgtgtgagtgaatcggtttttctgcatctttgccagcatttggtgtcatcactgtgttttatcttagccattcttctagatgtgtcgtggtatcttattgtggttttaatttgcatttttgtaaagggtagcaatgttgagcatcttttcatgttcctgtttgccgtccatgtcagtaaaatgcctggattgcttattttttaacggttgagttttgaaagttcttcatatattctagatatcaatcccttttagataagtggtttgcaagtatcttctttcagtcttgtcttgtcagcctaatatcctgaagatgtttcaattttttttgtaagttttatagttttatcttttatatttaagtccatcacccattttgagtaatttttgtataaggtgtgcatttcaggtcaaggttatgcctatggatgtacagttactccagcacttttttgaaaaggttgtcttttcttcattgagcattttcatgtcttcgcctgggtcctctattctgttccattgttctatatgccttatatatgtacagtgatatgtctatatatgtctatatatgtctgtatttgtatatatagacatatatgtctatatatgtctgtatttgtaactatacaataagtcttgaaatagggcacactgatccctctcagtttattctttttcaaaattgttttagctattctagttcctttaccttttaatataaattttaaaataatgtctataactactagaaatctttctgggatactttctcattttacacacacacacatgcacacacacacacacacgatttaattggtgcattagtttatttttgtggtggaaatagcagaagtttgagactcacactttagtttgggtctcagcttggccgcttattggctctgtagccttagggaaaattgcttactctttctgatctttaccttacttatatatgaaaaatgaggataatatacgaaagatgaatataccaggctcttaatcctgtgcctgactcatagtagaaactcagtgagtcatactattgatttttattttttattggtaagaggttgaaatgatatttttagtttattgtctgtgagaaccatggccttggtggaaattaattcactcatattccagcggaagagtcatgtttttgataataaaaaaaaaggttgcattctatcttcctcttgctgttgtcttctatgatatatttttgtaatattgggtttatttaggagcctccagtgaaatcctatcttagaacataaagacttgaatatattagccaaaatggcagaactttgattataagactggccacagtatttttgcctattaactctaacagctttgtccaaatgtgagatttatatatctggagagataattttagggtagtaaacagcattcaatcataaaatgagaaaaagtattatttattgtccaacataactcaaagagttggtgactactaggtcttttcctagagaggaccatcctgacttaggtgcagagtgttcagctcacagcgtcatgtttcattgcactgattaactttatattatgttaaatttgacattttctctcaagtgatactggtttccaatttcagataagaatgtgtgcttcctctttaaataaagcttatttatttaaaaaagcaaagtaacttaattaatgttaacttacagtgcaggtattatatgaccatgcagtgacaaaaattttggaggtaggtggtggtacacagacgcagtgcaaatccaaagggtgcaggactgaagtgtgggaaactgcagaccagtgtacttattttttaaaataggttttctaaaatttctttacttatagccgccaaatgtcatcattttatataaataacttaaaaattaggtgcttagggaaaaaactcccatgtacccaataccatcctcttacaagactttcctctgatatcaccatgtatatgtcacttctcaccccccaaaaactgtacaaccttattttggttttgcccaagcccttattttttcttcccttcattcggatgtacaatggatactgctgtgattaacagaaagagaaactagcaagtctcgtcaatggactaactcttttatttaatacaagtttccatgtttagaagagcaattcaactcttagaattcattttattatcttaacaccatacattcattcaataaaagaaatttattttccaaacttttaagaaatcatacttctttgaatcccctagcaaaattgactctttatactaatttctcagtttccaggtttctgtctaccaaagtgcagatatgttggctaatctgtgtaagagccactttttgagtctgggttccattccaccaacagtggcctcaaatctggaagttatcacgaacgtagtctagtcttcagcatccattaattcagtgtggtgtaaagtgagattggatagcaacccttcccagagagtttgtcctcttggagaagtcttcactggtttgaatccatcttctccattaactggttgctcttaacgtctgattttctcctggctggctgtctcttggcatccatattccttcctcagaatgacttgccttgactacaacatttaagttgactcctcacatccttctagaacatcacgtaatttaaatccatgtatagaacttaacaatttttctttattttgtgccatttatttctcttctctttctgtttctctgtttctatatacatttttttcttgtttgtttttcttctgtaagagagggaatgaacaagatagccaagtccctggcctcatagaacttactctaagagacataagttttatcttacatatattatttgcttatgtatttttccttccctccttccttctttccttccttccctccctcccttccatatattatttgcttatgtgcttttcctccctccctccctctttccctacccctcccctccctcccctcgtccctccctcccttcctaccttccttccttccttccttttattattaaatatgtgcatgaagtaggtgttattttatgcccattttacaaattatttacatctgacagtaagttctctgaggccagggactttggctatcttgttcactgctgtatccccaggtcgtagtccttagtaaattctcaatatttgttgattgaatggatgaatggttttacttcctgtcagaagaatggaatggtgtattcagatgtaagaagacaaatagaaaactgtgcctatatcccatctcattttgcagtagattctcttctgaacagtagaacattttagaatttctcatagttgtttatatataatctgcaaattcatcatcaggaaatacagcagttaatatcaaaggtttggatttactccattaaaattaaattttatttgaattcttttggagtaggtaatatgtacccttggtacaaaattcgaggatacaaagtttatacaccaaagagtagagtttcctttcatctccatttcctagaatcatctcgttccctttttcagaagcaaccactgtgaatagtctcttccagaatagtctatatataagtagttttgtgtgtgtgtgggcttgtgtgcatgtgtgtgtctgtatgtgcgtttgcatgcaatttatacttatatagtcttctgagccatggatttcttatttagtgatatatcatagttttgaataattcgataggattcccctgtatggatatatcttatatattttatttgattatttatttattcttctttccttccttccttttttttgttaaatatgtgcataaagtaggtgttattttatgcccattttacaaattatgaaactgagatactaagaggttcagtttttggccagctcacacagccttatgtgtaagaacctgggttcgaatccaacgtctatctctttcatggaacattggggtaaatccattttttttcctctgttacaaacagtgctatagaccacccctcatcatacccattggagagcctgaaggtgaataaattcttagaagtgggacttattgttccaagggtattcacatgtagaatttcatgaaagttgctttggaggatgttctccagcagtggacaagaaagcccatttcctctcattttgtcacattaggcctgagagccttttcaacgttttgctagtctacgaggtgagaaatggactcatttgtgtatagatttccctaacttgtggctgagtttcaaggcattttataattagaatcttttcagttgtgcaggcttttttcttttaagagtaatatttactcaactcaaaaagtagttatttagtgagcatttacaaacatataaatcataatttactgtcttaaaacacaccttcctgggaaatggctcaatggaaatcttttacctaaaagataggataaattatatgttaactgttactgtattttttctctaaaaattaaattatgaatttgcacttttgataaatattatgttgaatgaaatgatacatatatacatatacatacgtatatacatacatatattttaaatttaatcagataaatacatattcattaatacagctcagtctatattcttggtcaatcttataaaatgcttcaagtgtgtctagccatgtggcaggagtgggagggtaggggatgatgtgaatctttgtactgagtgctagatataatttctgaatgttgcatttatgttgttcctgggtatctggtatcttgagcctcttttttcctttctctcttatttttattttttgagacggagtcttgctgtgtcaccaggctggagtgcagtggcacgatattggctcatggcaacctccgcctcccgtgttcaagcaattctcctgcctcagcctcccgagtaagtagctgggactacaggcgcatgccaccacgcccagctaatttttgtatttttagtagagatggggtttcaccatgttggccaagatggtctcgatctcttgaccttgtgatccgcccaccacggcctcccaaagtgctgggattacaggcgtgagccaccgcgcccagcctcttttcctttctctctaagctctggctatagcatctacttttcactcttcaaatggtgaactcttttccgtccatgtctttgccatctcacgcttccctttgtcagtaacgttcttccatggcaggctctgacttcattgtcaggtcaaaagtcccctgcccagggaactgtttgaccatccaatcttaggtggtctccttcaggtattctctgtctcactcctttttaattgcatgcagaatcatgcctcacaactgtaatgatttcttaaattattcatttctttgttgcttgtttcttctagtaaccacaagcactgagcgggtctttttctgttttgttcatggctgaattcttagtggctagaatagtatctgagcacacagtaggtgctcaataaatatttaagtgaataattgaaaacctgaaataacatcttgcatgttaaattatgaaagaggcaagtcaccctagcatagaatacatactcatattcatatatgtcaagaaattccaaaaggtttgtggaattctattgtgtgattcttgattcttgtagcctttttgcagtatcgcagctgcagtccccaggacaggccaaactggtagaagagaaacctggccagggtgagaagggcccaattttcacccctgtcctactgccggccatctgctatgagcagaccatgtcactgaactgcttacacctcggcttccgctgcggaagatggagacggaaatgcctgccctccttcccccaccagctgttcacctctgcacaggaagggtgactgtggttgtgaagagcatctcaagtacccgaaacattctattcagtcccaagtgggtctccgcagcatcccaccattggcttcctgagtggaaaatagctgagaaaacttgggatttttctccaaaattaccatgacttgtatcagatcccaaacaactgaatgtattctttactttggattccaagagtgatctcatattagaaaaagcagagtttaatttctggcaaagaatggcaaaaaatgaaagaaagagagaaaaagagagagaaagtgaaagaaagagaaaaagaaagaaagacaaagggagggaaagaaagaaaatggacccactctatctacaacaaaggatatcatatgtatatatgacatatatatcatatatataaattcatatgtcatatatataaattcttttaatttaaccagtattttatattacatatacatggtagagaaagaaaacaatgcaaaaaaggatagaatgaagagaaaaattttctccaaccccagactggtctcacttcctggggttagtcattcttagcagattcttgtatattagtacagagacgtttattagaggcaagcataaaagtgcgtgtacttgtgtgtatatatataatttgttttacacacatgggttcatattatacaatcctattatatactttgtcccttttaacgtatgttgaaacacttttcaaaaatttttatgaatggtcaatattcatttttttctatgtcacaatttctttaatgtagtccactaacaatggacatttttaggtagtttccaggttttgctatataaacaatgaggtagtgacatccttgggtatacactcacgcatacatgatactgtatttctaagataagtcctaaaaaaaagagttactcttacacagttgtgtacatttacacttttgaggaataaaacaaattttcttcaaagaggttgtaccaggtacactctggtaaagagtgcttgtaagagtgtggctttgtgtgtgtgtgtgtgtgtgtgtgtgtgtgtgtgtgttttaggatcagaggtaacagagagaacaactttttaaaggatgttcttggccaggtgcggtggctcacgcctgtaatcccaacactttgggaggccaaggggggtggatcacttgaggtcaggagttcaagatcagcctggctaacatagtgaaaccctgtctctactaaaaataaaaaaagttagccaggagtggtggcgggcgcctgtaatcccagttactcgaaaggctgaggcaggagaattgcttggccccaggaggcggaggttgcagtgagctgagactgagccactgcactccagcctgggcaacagagtgagactctgtccccctccaaaaaaaaaaaaaaaaaaaaaagggatgtgtttgtccctctgctccttggctcaatcccccactccccaaatctgttccctttatggcaaattgattacctaaaaattgaatctaattctatcctacctttcttacaactttcctgtgccttccccttgcacatgaatatctctgaaatgtactcaggacactgtgtgacccagagcctgctgcgttcactcgctgtgtcacaccatactacccaaaatcagtgcatgagcccaacacaccacctttagttcctccagtaggcacgcgctttcctttgtcaccatccttatatgtgctcttcctattgactagcaagttcttccccttactcttagtttctctaattactgctcatcttgaaaatccaggaaatctttttctgacatatcccagtctaaatggtaggggtagccacatgctacatgtggacatgtaaatttaattaaaattaaatataaacttaaaaacccaatccttagtcacactagccacattttaagtgataaatagccacgtacatagtcatcagtggctaccatattggacaacacagatatttttctaggctgaatgcggtggctcagtcctgtaatcccagcactttgggaggctgaggtgggaggattgcttgaggccaggagattgagacaaacctgggcaacataacgagaccctcgtctctacaaaaattaaaaaaactttgttgggtgtggtggctggcacctgtactcctaactactcaggaggctgaggtgggaggatcatttaggcccaggagttggaggctgcagtgagccatgatcatgccactgcactccagcctgggtgacagactgagaccaagtctcaaaataaaaattaaaaattaaatatttctataattgtagagaattctattggacagtgcttccctatattacttcttcataatactcatggctatttaaaaatacttgttttgagagtgttgttttgatgattttagcctcactagcctgtgagcttcacaagggcacagcttgtctcacttcttgctttttcccttatattaaatgttcaataactatctgttgaatgaatgatgagtgaatgaattaaagaattcctctcagctcttcgctttattgttgtactcttaatgttcagtggaccttctgggaaggagctggatgttctacacttttaccgatttccttcaaaactgcagttggataccttagcaagactcattcatctggggatatttagcctttcctattgggtttgacatttcagaatccattgcttaactgtgggaagattgactatgattgagctagacctgtgtggtgagcatggttttaatagtttgcttcccagatctccatccctgtcttaatgactgaagcattccttctaccagctgcttggagtgtgactcagtgacagcttgcagctgagctggtacttagttgggtgtggtggctggcacctttaggcaaggtagcttggcccatggttctcccttgattttacccaatgttctcaaaactaaaatagctcgttagtttaattttcataaaatggaaatttgatagatcatattttatttattatgttgttaaaatgccccactctcctcagtagattcatacactgaaaaaactctttgaagcccttgctgagagtacatcacagctgacctgtgcccgcccttgactccctccaaggtgctgatcctgagagccctccgcagtgaacaccctgcatgcagatctccttcttggaacctgttcctggaaaacccagtctccagcaacctgatatgtaactgcaaatctgcaactctagaccaaccttctaaagagggatttaagacctttttcaagaatctggcttgattttttggcccatggttctccctttattttactcaatgttctcaaaactaaaatggctctttaatttgattttcgtaaaatggaaatttggtagatcatattttatttactatgttgttaaaatgccccaatctcctcagtagattcatacactgaaaaaaaaataaaaaagaaaataccttaactggttcattacattgaatttgcactgggtaaagggttagtaccaactgtgtttttctctgggaggaagaagctccaaacagtaggcaagatttctgtgccttaaagaaatgttactttagcttttcttgcttcaatggcctaatagcagctcttcctgagtacctgtttatatcaccataaaaagggaatgctggttatagctcgttgtagccagagggaagagagatgcttttgtctgtgggattgattccactttaatcctgaacagggtatttggccatcaagtagcctactgactgaggggagaaaattttattttaattttttctcataactgtcaatttcattgggcagctatacatttctggggaatatttgtataatagatggaattatagaagttacgctcacaagcagatattttgagattgattaaagatttagaaagaagtggctgggcgcagtggctcacgcctgtaatcccagcactttgggaggccaaggtgggctgatcacctgaggtcaggagttcaagaccagcctggccaacgtagtgaaaccccatctctacaataattagccgggtatgatggtgggtgcctgtaattccagctacttgggaggctgaggtggaagaatggcttgaacccgggagtcggaggttgcagtgagccgagatcatgccattgcatttcagcctgggcaacagagtgagacgccatctcaaagaaaaaaaaaattagaaagaagtacatttcccaggcttctggggtacctctaagtgagactgacaattttacacataggactgcaaaagttctttatcatacagaagtaaatttctgaagttaaattcattttagagagacaggcacaggatcaagcgtgtgtgaaggagattggacgttttattggcattaaattttgaagcttagttttcagacacagatgaagttgaatattataaagatgaagaaaagaccttttgttagactaattgctctaatattaactcaagaatgggtcaactttctgcaagttaaggtcatgcattctagggaattcgatcttgattttaaataggtgtcatgaatacaaagttagaaataccagtttctccttttatcttacaaaggtgtaggctgagaaaggcactggcatattagctggagaaagactaacaggaagaatataagggttattaaaaatgtttcctactattctctgatctagagaggcatgcaagtgaagatcatattaaatttaagggagagcatattggatgaataacatcagttcaagttttgaaatccttgagaagaaaaaaagagctgagcacggtggctcatgcctgtaatcccagcactttgggaggccaaggcgggtggatcaggaggtcaggagatcgagaccatcctggccaacacggtgaaaccccgtctctactaaaaatacaaaaattagctgggcgtggtggcaggcgcctgtagtcccagctacttgggaggctgaggcaggagaatggcatgaacacgggaggtggagcttgcagtgagccgagatcgcaccactgcactccaggctgggcgacagagcaagactccgtctcaaaaaaaaaaaaaaaaaaaaagaaaaaaatgaaccagcataaatcgacatttagagtacagagagattcgatattaacttctccaattctgtactttacagatggggaaactgagggcaagtgagatttcatgatttctctaagattctggcctcttagtaaccacatttttaagctgtaaaacatataacctggtggctcagagcataaacctctgtgggaggcggtggacagacagatctttctataccatggctacattgtgattctggacacgttacttaacctctcctaatttctgtttcctcagttaaacaatatcaataattatggctcctgaatcacagggatgtcttgaacattaaataaaatagttgctgtagagccttttcataacccattagctactttgaaaagcagattctgaagttgcggaccatggctggttgttcacctggattcctgagccctggaacataatgggtccttaatgaatcaatgaatgaatattacaaacccgaatgtagagacactgcttcatgcattatgcaggctaaaattgtcatccatttaaaatgccaatttaaacagtcttacatttgaacaacatgcagctactttacttttggaatatctagttctgaactcttgtaattgaagtgtaaacttgtgtaacataagcataggtaacatcttctaaatggaggagtggaaggttaaaaggtggcataatctattataagattaaaaacatcatccactaatgagtttgaggttttcatgttttgctctattctatgttactccatttgctatatcttgtagaaaattgtcctgacatattgtggagtaggaggaaaaaagtgagtgtcagaaaaaaaggaattctggcacaaatgtgtccacatatatatttctgcatgcttgtaggaaaatgaagaaaggaaagacttctaatagtaactatgataaaggaactgtgttttccttgaagtgggtggaagtgagttgagtggtcatttgcttttgtatttttgtgcttttgtatttatttatctgcttatctagtaatctatattatttattcatttatacagtgtacattcttaccttttgtaatacaatgaaaacaatattatgaccctaattgaccagagacaaggaacagtggttggaaggtgatttcttttagtgaatctatttaagttaaaatattttgaaaatcccttctctatgtcgtaagggtacatactcagatattgtattgtgttgtcttaaaagacatcatccagtaacatcactaaatttttctcttatgtatcttttgggaccttggagagcaacagatcatgttcatccatatgtaaattaatccatttgtcactttcactgtatattttgtgttgcaggagaattagtgaggcggtgttactttctgcaccttagcataattattgtgtcattgtcagagacagtgtaaatcttgacatttacaatggaatatattttcctttagtgaccattactaatgttgttttaattaaaagcactgatagctcagggttttcagcaacatctctcccattgtcataaattagaggattaaattgtcttatttcatatcctactatgtttaccaagggaacaatagcaattctagtttgtcaaaggagagaaagatgggatttggattaatctgctcatatatttaagaattgcagcttgggtcagtgagagactgtggtcagattgagcaattgggaagaggaagttgggtcatgttttcagagtaaatcaagctgatttggaaataaaatgtaccttgataatttgtttacttttaatttttgtcacactgcaagtgttggtgtttgctgttacgtagcaaaattacattcaatatttaagggccacgatcctggtgaactgtataaagagtatgttttgtttaggacaataatagaaagtggggaaggagaaaatcatgttctattgagcttattttattcacaagctagtatttttgcagattttcactctttagccaaaaaagactttttttctcccctgtggaagaataaagccatctaactgtcatttaagggcagtcacttgtaatgcaaatatagaaatatggaaatattgacagatatgagctatatgcatcagcattctgagtttgaaattaataataatgggacactgactaatagctggttctgtacagcactatatgcttgtacagggtaaacagttactaccggtgaccccaatttcatggatgaagaagttggggatcagagcactgtcaaagcttgtcctaggccacatggtcaagagagatgaacctagaatttgaacttgggaatgtttaattaattcttaatttaactcttgggataaggtttaaacattgctgttactcccttgggagagagaggaggattcttacatgccatgctagattttctgtattcatcctttttaattctcttttcactaatcctttaaggcatgtgttattaacttcatttaagttttcaggaaactcaggctccaagaatttggaagttgtccagagttacagacagggtaaaggattggatagagtttgaatttgtatttgtggtaccggtgtccatgctagttctgttacctatacctaccctgatacagacagacctagaagtctcatcagaatgctggatggatgaggaagtgtgggtgaatcaggcatcacccacaaagactgcgtctgtgaatgttctgctaatatggcagttattgtactgctatgcagccaataatagtggaattattactgagtgggaggctctgtgtttcacttatgttgtctctatggccaatttaaaaacatctctgtgtacattagtaaggttaagacacagattaatcaatcacatttacacaaacaagatgctcacatccaccgtttatggttaatcacattacttgaccaagtagcaatacagcataatggttaaatctgggattcaatggaatctcagtctattctgacgtgttgtcactgaactcattttacaggtaaagaagtttgggcttggagggatgcacaattcactgaagattgctcacctcggaacaggaggagcgaggggctcagatccatgccttctctgcttaatctctgctatattgatgcatagtcctgtagccaatccttgtaattttaatattagtaacagggctaggtgaataccccaggttaccacttgaagattgtctcttttagatatgttctcaaactgctttatttacctgatcctctgcaaatgaggagaaacttcaagaagttgctaaatgaaaaagttaaaaagtggattttaaggaaactaaagtgaatgccatacaactgacttgaaaaaacaaaggaagaagatgcagcaggggtttgagcactctttgtgggtttatttctttaggaaaaaagactaaagctaaattccatagttagaatctttagaagaatcttaataaccaagatcatcaccaatataataaactaaatttgaacactggacacgaaaaaaatagggaaggccacatagatgtcaataaacatttttcttctttttattgtcattgttttgctgaattttataatattttccttttaataacctaatatgaacctactgccccaatacaaaattatcattttggtatatttcttcctatttttttctcctaaacattgaaagtttcacatggttacaaggatcacatatttacaatgtcatacccagtgtatttttttttttttttttttttgagatggagtttcactcttgttgcccgggctggagtatagtggcacgatctcggctcaccacaacctctacctcccggattcaagcgattctcctgcctcagcctcctgagtagctgggattacgggcatgtgccaccatgcccggctaattttgtatttttagtagtaatggggtttctccatgttggtcaggctggtctcgaactcccaacctcaggtgattcgcctgtctcagcctcccaaagtgctgggattacaggcgtgagccaaccgcacccggccgtgtatatttttaaatgtattttgttatgttgtaaatacttccccaaatcatcattttaactttaaaactgtgagtttgaagtctatgatgactaggtacgtagtttacttgatagtaaaaacatttaagttgtttttaactaaaagtgacactcaggcttgtaactttgaccatgttttagattgtttccttggaatggatgtgataatgaagttagagagtttgaatatttttatggctcttaatacatattacaaattaacttccctatgggctacgatttacattacagccagtttttaaggctagaaatctggcagtggggctgggcgcggtggctcacgcctgtaatcccagcactttgggaggccaaggcgggtggatcaggaggtcaggagatcgagactatcctggctaacacgatgaaaccccatctctactaaaaatacaaaaaattagctgggcgtggtggtgggcgcctgtagacccagctactcaggaggttgaggcaggagaatggcatgaacccgggaggcggagcttgcagtgagccgagattgcggcactgcactctagcctgggtgacagagcgagactcactctcaaaaaaaaaaaaaaaaaaaaaaaaaagaagaaaaggaaaaagaaaaaataaatctggcagtgggccacagaggtagctgatgttctatttgttttgcagtcatccatgcactggttataggatgtggctcagaatcccaaactaagtaataaaacaaagtcatatgtagagtccaatgtgtatatttcgacccttagcatgaagatacatacagtgttttgtgacttccataatttagagtctctgtaaattctttaactcatttaggtatttcattgtaaccaaagaaaacttaaatatgacttagcaatggtgagctgtgctgtgttcagcacattaataaatgccaccaaatgatttcaatgaacatttttagttcatttgttctgaaactagaaagaagacacttaatattggtttctgacttttgagcaaattttatttcctcggttaatactctgaatgtaatttacttgctatgcttgctaacaatggaaagcattgaatttggttttgtggcttatgctctttatcaattatatgccattgataaagttgtctacctccactgcaatactgggaaggttaataaagagagagcgtgctcatttgagtcagttctgtactgacagaacgtgcatctctggctatttgtggtatgtatatggcctatcagaaactacaataataattgagaccaatttaataaccattataccagtgacctagtcattcttgtagtttggtatatttaatgcatttacattcatttgtggatccatgtagaccacacattcattcatctattcaacgacttttcattgagtatcttctatgtataaggtaattctttgtaccaggagataactggtgaatcagagtaaaccagaaaatagatgaatggttagtatcgttgctctgctatgcactcatttaatgagtcattttaggattactatagcaacactattaaaaattttacagtcattcacatggctcgaaattcaagaattaaaagttcaaaagggtatacaggaaagattctctcacccgtctacccagagccaccaattctcctcaagagggcaatcaattttatagtttcttctctttcagccatatttcaagcatatatcagcatatacatatataggtatatttgtatatatgtcatgtgtgtgtacaccgcattttttccccacaaaaatagtatatatgcgctatccattattctctaactaccttgtgtcacttaataaatttcaaaaagctcttttaattattacttaaagattggccacatttcttttttattcctgtcagcatggtatttcattgtgttagatattctattaattttgaattcttgttgattatattttatcattattataaatagtactacaatgcatatctttacataagttgctttcacttagatttttttccttaataactagaattgcaaattaaagtggagcaagtttctatggctattgaaaaatattcttcaagttataatctggaaatattgatctacagtatgcacagaatactatgttttgtgtaagaagtgggggtaagactgtatatttgtatttgtatatatgtgcttgtgtttgcacaaggaaataatgcatttagttgtaagtcagtgactgggtctggtgcaggggtaggaaatagaggtggaaagcaggctaattaatatatacctctgaaataattttgaattttgatccatgtgaatgtattactttttcaaaaaattaatattaactataaaattaaaaatcaaagtatatttctttattattctgccattttcaatatatgagtacacatggatttttttaaaaaataattttatagactggggtattggaaaagtagtataatcaggtggaatgcaggaagtcacaaagtggacctggccttggaacgtgttcattggttggatctaattcatagttttgttgcttttattcttgattttttttaaaaaaatggaaaagtaatgaagtgtttcccaaatgtcatttattcatcctcttcacagtctttgtcatatgtgtgaatagttttcactgttattcacttactacttcactaaaataatttatttttcttttttttggatttttatagcagtgccattaacaaaaagccaatattattttccatgagtagaagctgcataaattggagctccttcagagaagaagaaccacaggaagatatttaattagaggtttggtttggggattttggggattatttcttttgcacttgtaggaacctggtttgcagggtctaggtgctcctagtgctgaaacctgacatcagaagtgaagatggacataaaatgaggtgattgaagacaaactgcagcctatgaagatgggctagaagcatctgattttcaaagcccccaatccaccaacttcaaagatggggtcatcttgtaaggagaagagctaagcaggtgcttggccgaggtttctgaggagctgaaggaggatctggaagcagttaaagtagttgcagcccagctgttgtccatgccaccctggtgaaccagcacatcagagacagtgcgcatgagtgagagtagtgtgcactgccctgagcttccagcggggaagctcaccttcaccttcccacatcctacaatatggctaactttgtccaccttccagatctggctaccctcaatatggctaccctaaccttcccacatcctacaataaggctacctttgtccaccttctagatctcgcggtccaccctaattctgacctgtgcaaggaaagcaattctttgaaaaatagttctagtttaactgagctgatataatacaaatccactgcaaaagataactaaaaataaatacaatgaaaatgaagcaatattagacacattgttcaatgaaggcactgagcctgaggctttctcttgttgaaaagcaagatctggaagttttagggggggtttaaaattattgttacccactgaatggaacttctccttgactcactcagaaggactgacatgaaaaatgagtatctttctcaacgtgaggttctgtgccatttgttgcctctcccaatacagtttcttcttctctctcagttgaaggaggatacaggggtgattggagatggtgtcatgctatccttggccttatctgcatttctgcttcttaaacgaatgaaatgatgaactagatgatcatatggtagacagaagggaaaagagtgattttatttatctgtagacagagctctttgaagacctgtcatgggcacacatcaaagacaaatgttgtgtgcatcaaaggcttgttggcttttgaggtggtaggtgagaaaaaagcatagtttggctcatatctgtgaaaggtgttttggccatctcagtacccattggagaattttgtgtagctaaagagacctcatgactttgagtttctggcagacctactaactgtggatggaagcaccaggggctggcttctcactgagatgcttctattcatatctgtcccggtggcattccccaagtggtgtctcctggatcccctccatccttgaatctgtgcctcatcccacaccccactgctcaggtttgaattggttctgcagtttaccagtggtttgaccttggggaagtcacttcaagtccctgcaatgtagggatattataggctccaaatcactgggtagttgtgaggattaaatcaggggttggtaaattatgatccaaaggccaaaatgcccctctctcctgcttgtttttgcaaataaactttcacgggaacacagccatacccattagtttacatgtaatctgtggctgtttgcacacctcgcagcagcaagttgagcagttgtggcagagaccctgtggctcacaaagcctaaggtatttactgaaaaagttagctgacccctggattaaacaagtgaatacctataaattcaattcccaaatgtttatgggctgctatattgaggtattgagcctataagagtgaagaaacacagacaaaagtccctgccctcatggagcttacagttcaaggagggaaacagataataaagcaaaaagaaaacccccaaaatgtaaaatatatgtaaagtgatttagtggtatggagggggaaatgcaggaaataaagagaaagagagagaaagagagagtatagggggtgggagatgcaattttaattagggtcattagggaaccttcactgaaagagtaacatgacatcagagccatgtggacacatgaagaagagggttccaggcagaaggaacagccagcataaaaggacaagagccttgaggtgagagtgtgtgtctgagtgttcagagaccaacagggaggccagtgtactcaaagcccgctgggtggtggagaggagagacctgaagatgctttcagtgagctgggacttccttggccacagacaggatgttgcattttgttcttcatgggaaggaaggcactactggcttgtgagctggggatagtgtgctttggattgcattttaaaaacatcactctggctgcagatggcggccatgagtggcagcttgaactggggttagagctgtagaggtggtgagaagcagcccagctctgcctatattataaaaacagagagttgagaattccctgacagatttggagtgcatcaggaaagaaagagagaagtcaggaagactttgatactttgacttggtcaactgcaggaatgggattaccattaactgcaatgtggaagaaacagagatagggcaagttttggggtcaaggttaagagtcagaatcaaagatgttaattttgagctgccccttagacatcggggtgggattgtttagaacaatgtctgccatgtagtaaattttcaatacatgttggctgtaccatgattggcattattactgaaggcttactcaatacatgccattttatttctttaaattttattttaatgtattttattgagacagggtctttctctgtcacccaggctggagttcagtggcactatcatggctcaccgcagcctccacctcctgggttctagcgatctcccacgtcagcctcccaggtagctgggactacaggtaggtgccaccacgcctggctaatttttacaaacttcttgtagaggcggagtctctccggttgcccaggctggtcttgaactcctgggctcaagtgatcctccctccttggcctctcaaagtgctgggattagaggtatcagccactgctcctggcttgataaatatttttgaatacctgctatgtggcagcactgtagaaacaatgactgagttctggtttctgtcttcatggggagatagagaaacacctggcgatcatacgcgaggtcactgctctgaagcagtgcagctttcggggaatcacagactctgcctgggtcctaaacatgatttctttgaagttagccatttacagtttatttaatctatctatatccttgtcctcatctataaaataggaacatcaactttatttggataatgcatctaagtgctcagtaaacaccagctgttagtataacataaaggattctataaaatcagtcatttgtttcacaaatattttttgagtacttattaccacgttacaggagtttggaaagtacttgggatacagtatgaacaagaacaccctgcctttaaggagatcaagggggactgagtggggataaataaatgaaaatgataggtcgaggtaataactacatagaaaataaaaatatatatgttctacagcagcactgtccaatggagacataattagaggccacatgtgagccacatgtacaatttaacatttcctagaagccacattaaaaaataaagtgaaataggtgaaattaactttaatgctatattttatttaatcaaatatatccaagacattatcatcttaacccataaaaatataaaaattattaatcaaacattctacattatcttttctactaaggcatcaaaaatccggtattttacgccctgtggcacaattcttttcagcctagccacatttcaagtgcttgaaagctacatgttgctgatggtggttgtcacattgcacagtgcaggtgttgaatgatgaggtgtctgctttagactgaatggtcaggggaagatgagatcttatgacaggaaggacccagccatgagaaatttgaaggaagccctcatgggtacaagatagaactaggcaaagaacctagggcaggaatgggcttcttatgataattaaaagcagatcaacaaagccactggggccacaccctagagaagaaaaaggatagtcatatcacaatggagaattatttggggccagttctggtaggagtttaaagagttcatgatgaggagagtggatgcattctaagtgtattgagaacccgtggaggatttaagaagggaagtgatatgattaagctatcactgactgctatgcagagagtagaatgttaacagcaagcatgtaagcacaaagccatgagaaatacatccagtctagctttagaagctcgaagatggcttggaggaaatgtgtcctaaagaggacttacccatgccaaagttgggtttagacggggttttcagagtcagggggtgttttagacccatagacttcaaacttttctgattatacaatgcatgcaattaaaagtagaactcccagtatttgtataggtgtttatttcctatacatgtgcactgctatcaaaccatgtattgcagtgttattattttactacaatttttcttatttatcccacctccccaccacacataaataaaagtttcattatttttttcttttatcccactgcattttactttggaaatgactgttccaggcagacagaattgcacaggcaaagggctggggatataatgatgcttgtcacacatacgagatggcaggagcttatatctggagggtggaaataaggaagtgggtaaggtgatggtgagggagtgttgagaactgtgcaggggctacctcatgaggagcttgcaggctttgggaatgttttaatttttatatttatttatttatttattttgacacagagtttcgctctttgttgcccaggctggagtgcaatggcgcgatcttggctcactgcaaccagtgcctactgggttcaagtgattctcctgtctcagcctcccaagtagctgggattacaggcatgtgccatcacacctggctgattttgtatttttagtagagacggggtttctccatgttggccaggctggtcttgaactcctgacctcaggtgatctgcaccccttggcctcccagagtgttgggattacaggtgtgagccactgtgcccagctatttatttatttttttagacagagtctcgctgtctcacccaggcttaagtgcagtgacacgatctcggctcactgcaacctccgtctccctggttcatgcgattctcctgtttcagcctcccaagtagctgggattacaggcacacgccaccccacccagctagtttttgtattttggtagagacagggttttgccatgttggccaggccggtcttgaactcccgacctcaagtgatccacttgccttggcctcccaaagtgctgggattacaggtgtgagccaccgcacccggcctaatttttaattttaattttaatttttatgttttgagctggagtcttgtgctgtcacccagcaagggtacagtagtgcagtcatggctcactgtagccttaaactgctgggctccagcgattttcccatctcagcctccccagtagatgggactacagtcgtgcaccactgcacctggttaattttacaatttttttgtagagacaggggtcttgcttttttggcccaggttggtcttgaacaccttgcctcaagcaatcctctcacctccgcctcccaaaatgctgggattatagatctaagccactatgcccagttgggaaagattttaatatattttcatatatgatgggaggccattgctgggttttaagcaagagatggtgtctagtattttggtaagcattttacattcattttctcatcttatttatctttaacatctgcaaagcaggaacaaatgaaagggtttcaagcaagatagtgatgagagcatttattattgagtagaattttctcctttctctcctctccacttctctaattaaattctgtaagttaaaactcatgctggtaaagaccaagctttaatcacagagagaaatttcattctaggacagactgcttgcctgctcacactgacccctgcctccacctgtcccgaaaactaatgctgcctgggagctagtcgactaaaaaccacccagttacactgcgatctggaaatgtccattggaggctttcagacggcagtacatatgcttttaaaaatactggggtggggggatggggggagggagagcattagggaaaatagctcatacatgctgggcttactacctaggtgatgggttgatgggtgtagcaaaccaccatggcacacgcttacctatgtaacaaacctgcacatcctgcacatgtaccgcagaactaaaaataagaattaaaaaaataccgacttacatttttttgtttgcattctttattcatatgggaaatctgctgctataataaacaaagctattcatttttcttactgtaggttctcctttctcccttccttggttaagcaaactcaccctagaaggggctgtttatccacaaatcctcagtaattaagagtcacacttgacacttaattttaaaatatatgtacactaaatagcataacattttaaaaacagctgattttaatctttgtacttgtacagtttttagctttttattagatttaaagagagaagaaaaccattttatgttaaatttttagtcactgttaagagaggtgttttattgccaatctctttaaaccacagccaggcatgtatactcagaaaattactttacataataatgactaactggaaaaactgataatattattgaaacattgagagaaatgttgtggggggttttaaaataaattcaacataggatcccatggcctagttttggaaagaacaactctccttcccgctctactggaatgcagttggcccagcccccgctgccttgcttgagttcccttacattgccctgggttgtgttggcttggaaggctgcctggccttgtgtgcttgctgggctgaaattactctccctgctcggctattgggagcacaccccatctacaaatttgtccacttgatttcactcctgcgcctctggagttgaaagagtagctcattaaaatgggaatgagccagagggctccgcagggctggtttgatcaacactgtccgtggtgctcagcaggacaacacagagtagcatttgcatctgaggacagtcaaacccacatcaccaggcttcaaccacaactgcagtaatagctaccatttattattttctacgggctcaatgctgagctaaacactttcatgtgcttttattaagctttaccttgacttcatgagctaggtagcatcactttggagaatgagggtgctttaagtcacacacttccacttccagggtatcaatgctgcattgaccacttcctagctttgtgactttgggcaagtggactaactcctggatgctcacatttacccatctttaaaatggggatatactacatagagctgttgtatcaagcaggataccatagtgcctgatacatagtaggtgctcaataaaagttattgacattgctttgctaataggtacttaggtttaggaaggtgaagtcacctgcttaacttcctcatgctcataaaacagatattttctctggccttaccaaaagatgaaccaaagaaagtaaagtagaaaaggtggtagatagctgataattttttaaaatgtgtttctagtatgctagtttgttatacatagtttcttggagaatttaaaagccgttggcttaatgttcattcactgtcaactaacactaggtaaacattcatagctgcaatttatattggtgatggtgcaaatggcagaaaattcgatccaaactaagcaaagaggaaggtattggcttatcagattcaaaggcccagggatgcacctgacttgaggaatggctcattgctggagtcagtgacattgatgggacctgattctctcttggcttttctttccttcattctcatacagtctcttcttggggttgcaagatgactgcagcagttttaaaactcatatcctttcagattctttcccaatgagggagagaatgtacttctttttcctaacttttgaagaagcatttttaagcctggccttcattggccaaaattaggtcccatgtccaccattgaatgaatcttgtggcttagatgatggggtaggaggattgggtcaggccattcagtttgctctctgttgaacctgtggctgtgtctaccttatacacaccaacagagcagaggtggcttcaccaaggaaatgtggagtgctgtttacctgtgtgaaagaacagatgccccatgacacaagcagtagaaatccactagactactgaatacataatgagtagactcacctatgaatgtggagacatctgcttcctttcttttcctatttcctgaaagttttctttctgcaaaatatacctattcagagaataaagaaaaaataaagaattatccttctcaagggaaaagagccatccataatgcagtcttttagattttctgctggtcccataaatattgcaatacattgtttatactcagaccatcatgtcatttatgatgattagcaggaactcaaaaggcattgactgacctggacagttacaatttgttaaaaatatgcattgtgatttttttctcatattgggggtcaacttaagaagttgactttgtcatttatacacagtttatttatccatggtaacagcagcctacagtgggcctaattataggcccactaattatttgcctttgggacagtgagggtgataaaacatgggttttgataagaaagtttggcatttttagtagtattcttttatgttaaaatgttgtactttgctttactcttatgaaaacactttttgttaaaaaaagaaatttgctatgaaggataaactccatttcaatggtgtatattagtcttcggcctcagtcactacatagctgctgtaatgtggttctggggaagcccatcaccagagcacgtggcagctgggagtggaagaagggtgcaaagagtaaaggaagcagagaggagcaagagcaaacatttgtgggggcctaagcatgtttcagaaatgttgcgtcaactcttatttcctcataacaaactcatgatgtaggtttgttttgtagacactgctgggcatctcactgatggctttttcccccttatacaccagcagatcctcgggttgtttggggtcatgtgatacccagctaaaataactacatttcccagctcctcagctcatgctcagtcatctgatagggcttctggtgaagccctttaataaggggcagaatatgttggcaacttgtcttttgcctcttcctagagtgtacccagggatgctcctggagattgagcagtcatcttggaactatgggctaataagacatagtaattagttttctgttacattcagctgaatgcaattcctaattagaaaaacattgttcatagtagttaattgagctttttagtgagaattaagcagtcactttttatattcagcctgggacccagcttcaccagtttttccaatttttaaaaacaaaattggaaatcagcttttacgtaaaattttgtcttaaaatattggtttgttttgtttgcttgtttgctttaaatactctgagcaaaaaaaaaaaaaaaaaaaaaaaaaacccaacatccatttgtaggccaccattttgccaccactggtcatttattgctttcatttattcacttaacaaaccatggagatgttgaaagtaattcagaagtgtgtcactaaaggactagagaataagactgtcaaaggaagatttttaaaacgtgagattattaaagttgaagaagagtgggctgtgcattggctaattaatagttttcaaatatatgaagggattttagacagctgatgttgactatcctttgtcttctgcagaatagggtaaaaaagaaaacacaattatttttcaggagaagaattttgaataaatgaataaatacgagaacagttttctaggtgctgagaattattaaattttagcagaggaaggggctgtgggcctttattttgtaaagtttttttgaattaggacagattatcagagagaaatttgtgtggttttggtgaccttggaattacctcccatctggaattttgagattcagattacttattctgaagggattcaatagctgcaccctactttttgtactcattgtgcactgcaggatgcaattcaagggaatagctgggaagtccgaagtggttttggattctgatttcttgacaaagtcgttggtacctcctaagccatcactgctccagttaagggacatgtggctctgaatacagggctccttttggagtctcccctgggatgtcacatcttctggtttgacagatgccaacttgacatttttctcctctttcattattctgaataattctgcaaagccctcatcctcccagcactatatgtactaagcgtgagaatttgccttttccacttgtcaaaatatgttaagagtttgtaggagtccaaggtcatgcttcagttttcagacagaagaggaattccaagaattccagaaatggcaggagatctcttttcttgctaactttggttcaggtgtgctttaaaaattcaacatttaatgggctgttaaatattccttcctcttgctgaggaacttcaagttattttaatatatattgagggttgcctagtaactacagctttactagcttactgagagaagttttactctttttttttttttttttttttggctacagaaaggcaatcaggggagagcaattggagatggcttcatggagaaaaggaggaggaatatggtgtctctttgggacttgaggtcatgtaaaactgatgttagaagaaacatgtaggtccctgtctgaggcaattagaagcaagttcaaggaaatcatcttccacttaatctttgcttatgctgaatagtttgagtgaatgatgtcacagggagttgaattaccaaaatgctcacctgccttcccccatttctccctcccttcctccttccatccttctttccgtccctcccttcttctcttcttccttccttcatttctttctttttctttttttaaagaaaataaataatcttactgttctaaggacctaacttcaggctctgagatatgtattagttataattttttttttaaggtgaaatttcactcttgttgcccaggctggagtgcaatggtgcgatcttgactcactgtaatctccgcctcccaggttcaagcaattctcctgccttagcctcccgagtagctgggattacaggcgcccgccaccacacccagctaaattttcctatttttagtagatacgggggtttcactatgttggccaggctggtcttgaattcctgacctcaggccatccaacccgcctcggcctcccaaagtgctggattacaggcatgagccaccgtgcccggccagttatgactgattttataactgaattatttctcttcttaattctgcttcttataacctagtgggaaacaaccaatgaacaagatgaaaatctaattgaaaccaccatttattttcctgagtcagtccaggtttgtaactaatttgtagattatctcaatgttgaactttgctgagttttgtgaggacatggagattttataagccaaggacgtagatatctctgggaggacattttcttgtctaccacagtacatcttgttgctattcattactaaatccttactttgagatcttaaaacagggaacatcctaccaatgtcagttcagatgcaaatttgtttgagcttgtgttctctcttgattaatacatttcagagagttaatttgtttaccaagaagaaaatcatttttttgtattggttaccaatgaaaagtggcatagtccaactaaagagagtacgcaaagatgggttttgtacctcctggggagatgctagctacccagaaacgtagactaataataaataagattactggccatcagccggttttgccaggtgatggcatgaatgttcaacgtatgcttttatgcaattctgtgatgctgcagtaattggggaaggcattagctgacagcagtccctgattcgatccatctctttctggctctggttacttctgactcataaagtggacagggaaagcaaaaggagaaatgtgtataatagtaaaatgttcacttgcagtgtgtcgtgtacccttaggctaaagatagacaagcatctcagaatctgggtcccatattctcatttccccgtatataattcctcaagtgggcagaagtgtatctggttatataatccagttatagtgggaagagaaactatgtttaaatatgcatagggagaaatcattgtcagctacagatacatatttaattacagtaagaaaaaaatatgaatttgaaaatgatgtgggggttgttttattcaaattggggttctaattcagtctaaaaaaaactgagcagtgttgttgaaatgattgcctcttagcagatagtatgtgtatatgtattctgtagctctgcctgacttaaagaggcttttacaacagatggaaaggcatagtgagagaagaaaataatttaaatttaaccctttgtaaatactctagctttaagggcattttgccttccttgggttgtgggtagagtatgctatcatatctgaactgtgtgttccccttataacatcctgtgctaagtgctcatgctccccaaaattcaggtccctctaaatgatggtgatgggaatccaactctgacagtttgaccccagatgtgtgctttacactgacccaagatatagcctagcaatatacgatgtaaaaattaacattaactcattgactcaactactaaataggtactaaaagtcaagctttttgctagacctgagaatatagaagttgaatttagctcttgccctcaaagaatttacagtctagggggtagacctgctcctaaactagcaattaagtctttaatatctatgcatttattctgcaacactgaatttaaaacaggtttttctcagaagcaattttgtttctacaaactgtctcctgggctcagagtccctcgtgttaccgagttccttgaaagccatgcttattgcttttaaatgcaacatatctcgggttgatgtttttgttctatagtaatcctttcattcccttttttatttgagagtttgaaaataatgttgtgtgcaaaatccctaaggaattagcagagctgatttgattcaaatataacttcccaccctgtgtgcagtgtcatgcccctgagtttcatatacatgagttctaaccccttcttgtctcttgccaagatttatcagcaattggttaacctatttgggttagcttagcttcattttcttcatctgaataatcggcataggtatggattctcacaagaatcagatgctattttacagaagttttataacaagcttaaattttgaaataaaactaaagcatcatgatgtaggcaacatgggataaaattgtagcctaaccactgtgtatgctggagtcacgcaatttgaattatacagtctttgaggtttcatatgttttagtttaaaggctgactttgccatttgtaagctgggtggctttgggtgatttgtttaatatttctctgttagtttccttattagtaaaataaaataataatgttttcttttataggctttataataacgatgaaggtgctggtggagatgataaagtgatgatgatagtgttggtggtgatgatagtgtctctgcagtggctggaatatttatgcaccccccgctccaaatttaaatgtggaaatcctaacccccaaggatttggtattaggagatggggcctttgggaggtgatgaagtcatgaatcacaaataggagtagtgcttttacaaaacagacccccaggtagtcatttatcttttcatcatgtgagaacacagctaaaagattgctgtctatggaccatgaaatgggccctcaccagatgctgaacttgccagtgccttgatcttggacttctcagcctccagagatgagcaataaatttctgttgtttataagccatccagtttatgatgttttgttatagaggcccaaatggactcagccttacagttattaagcccttccttcttgccagtactgtgctgagtactctacatgcatcacctcatagcattctcagttgccccctctggtagctactatcataatccctattttcttttttcttttttattatactttaagttttagggtacatgtgcacaacatgcaagtttgttacatatatatacatgtgccatgttggtgtgctgcacccattaactcgtcatttaacattaggtatatctcctaacgttatccctcccccttccccccaccccacaacaggacccagtgtgtgatgttccccttcctgtgtccatgtgttctcattgttcaattcccacctatgagtgagaacatgtggtgtttggttttttgtccttgtgatagtttgctgagaatgatggtttccagcttcatccatgtccctacaagggacatgaactcatccttttttatggctgcatagtattccatggtgtatatgtgccacattttcttaatccagtctatcattgttggacatttgggttggttccaagtctttgctattgtgaatagtgccgcaataaacatacatgtgcatgtgtctttatagcagcatgctttataatcctttgggtatatacccaataatgggatggctgagtcaaatggtatttctagttctagatccctgaggaatcgccacactgacttccacaatggttgaactagtttacagaaccaccaacaaactaccatcagagtgaagaggcaacctacaaaatgggagaaaatttttgcaatctactcatgtaatgaagggctaatatccagaatctacaatgaactcaaacaaatttacaagaaaaaacaaacaactccatcaacaagtgggcgaaggttatgaacagacacttctgaaaggaaggcatttatgcagccaaaagacacatgaaaaaatgctcatcatcactggccgtcagagagatgcaaatcaaaaccacaatgagataccatctcacaccagttagaatggcgatcattaaaaagtcaggaaacaacaggtgctggagaggatgtgaagaaataggagcacttttacataatccctattttcaatgagaagttgaggcttgtggagttgcttaacatgtccaggatcacctaatgctccaacataagtttgattaactttaatacttttaatatatattgtgtctcagttaatgttttattgtgctctagtagtttaaactgcgttatcttgtatcaagaattcaggtgtaataaagattaaaagggacatgatgtatgtttaatatttagcatctgttccatagtaaatgctaaataactattagatatttaattggtattagatctatttcttttttaacttataaattataatagttattgattctattattgcctttaaaatttaaaaccattctgaaatgatgaaatggtttattctcctctataaggatgcaaaagttactattgcccatatcactgaagatgagggaatgccaagatttttaaaatttctacagaatagcaaaaatagtttcatcatttaggtcaaagtttcaagtttgagtaaggcttatattcatttttttcaaataactagcttgtatttttaaacaaatatcactaaagtctataatatcattatcttatgattcagtaaagaaagagaaataagctgtttaaatatgatgccatacaaattcattcaaaagagaatgatgcattcaataactatgtttgtgaatttggctctatgctatgagatacccaatttgtcttattttatccttgaattcatacttctttaagcttcaaggagatgtgatgcattagaaattgtagattatctgtggcaaatttgactccaggcttttagtaacacctcatttcaaattctcaaaagagaatcctgttgtcttaatgttttggtcttcgacatccaagtgtgttttaacctctatggtgcacatacctgcccaccactgctccttgacctgcagcttcactgaacatttgaactcttgttgcaatgcttatgttattgggcccctccacatccttgccacagttgattgaaccaaaggcaactcagtagaacactcctaatcctgccccctaaaccctccccgtaagtccttgtcatctcagtaaacgacatctccaatcttccacttgcttaggttatcaaccttaagtcactcttgagttctctctttttctcacattttattagcaaattctaagccccttatcaaattccattagctctgtgttcaaaacacatctggatatagtgattgatacccctgttgtttccactctaggtcaagatttcatatataatcacctgggctattgcaatcaccttctaacttgtttccttttctacccctgcccatttttgattgaggtgatttttgagactgtaagatcataccactcctctgctcaaaattctgcaagtcttggccaggtaaggtggctcatacccataatcccagcactttgggaggtgaaggcaggaggattttttgagctcaggagtttaagaccactctgggcaacacagcaagatctcatctctactaaaaataataataaaaaattatctgggtgtggtggtgtgtgcttatagtcctagctacttggaaagactgaagcaggaggacttgcttgagcccaggaggttgagtcagcagtgagctatgatcatgccactgcactccagtctaagcaacaaagcaaaaccctgtctcaaaacaaaccaacaaaaaacaacaaaaaaacctacatgtcttatattttacgtataataaaatacagagtccttcatggcctctgaagtttcccatgattgtgtgtctgcatccttctgtgatgtggtcttctatcacccttccctttactctgtaagctgacttgctttttcttaattatggtagacacacttgccccagggtctttgcacttaccctctcctaagaatgatctttccctgcttgtggctcggcttgctcccttacatcacctggccttctggttgaatggtgcctgcttgagggacctgtgagcaaccttcgaggcagcacctctctccctcatggcacttaccatctgttatctggtatcatgtcacttttcaccagctgtggtatcctttttttaatgacatgacttctgacatcacatttgctgttctctttttccataccaattctccaataataattagtgctcagcaagttaattcaatgctggtactaactcctggagcttgtagagatcccgctggttaaaggctcaatcccacaagactgtccctacttcagacgccaaccacaagggggtcccagcctacccacacctgtttagcagactagaaatttataggttcccattctcaggtttcataattcactagaacaactcacagaactcaagaaaacactttacttatatttactggattattataaaggattcgactcaggaacaggcataaaagaaatgtatatggtatggggtgtgatgtgaggagcttctgtgtcctcttgagggatgccatcctcccaggatctcagtgtgttcaccagtctggaagctccccagatcttgtcatctaggtgcttttatgaagatttcattacttaggcatgattaattgaatcattggacattggtgattagctctatctttagctcctctccagctggggttgggactgaaagttccaactctccaatcacaacgttggttcttctgcccagttgagagtcacctcattatcataaactcaagactggttgaaaggggctagttttgaatcacaagagacactcctaaaattccagtcacttttgtcactcaggacattccaggggtttgggagtctctgtgctggaaccagggacaaagatgaaatacatgtttcttgttatatcacaccagccaaactgcttcatattgttcttgggtgttgtctgtccccacttgcaagaacttagctctacagaaacaagtcacttttgccagttttattactggtctcatttagcaccccaagcagtgcctaatacaccacagaccaggggtgtctgatcttttgtcttccctgggccacattggaagaattgtcttgggccacacctaaaacacaccaacactaacgatagctgatgagctttaaaaaaaagcacataaagatctcataatgttttaagaaagtttacgaatttgtgttgggcggcatttaaagccatcctgggctgcatgtagaccatgggtcgcaggttagacaagcttgccatagacactcaatcagtacttactgaatgaattacttacgtgaattaaattggacattaattaatgcaatacttcatggaggaagaccataggtagaggcagacatgagtgaaaacacgctccatgagggtcggagacagagaaggagagaaaacaaagttgttttctttttctttttctttctttctttttttttttttttgagacagagcctcgctctgttgtccaggctggagtgcagtggtgtgatcttggctcactgcaacctctgtctcccgggttcaagcaactctcctgcctcagcttcgtaagtagctgggattacaggcgtccactacctggcttatttttgtatttttagtagagacagggtttcaccatgtcggccaggctggtcttgaaatcctgacctcaagtgatccacttacctcggcctcccaaagtgctgggattacaggtgtgagccaccgcgcctggcccaaagttgttttctgaagagctttctggttggatttttactttttcatgatactttgttttacttctttttcttggaaaattctctgagctttgcctctgtcctgaaaacaaattctccttttcttaagtaaggttgagtgggttttccatttgttgtaagccaaaataccttggcaaatgtaatccttctaagcctattagagtaaaaaaagtatgtctggtacataataggtgctcaaaaatatttgctgaatgaatgaatgatagctacaaagagaaaggcttgtatttcctattggcttcagggagaaagttctaacacatttgattcctggccattgtagtgccaaagtcagaaatgcattaagctttctgaaaggaaccatcaaacttggcctctttgagggcacttaacttcaaagctccaatagaaatattacaactattaattaaataactttattttttgggctgggcatggtggctcaagcctgtaatcccagcactttgggaggccaaggtgggtagattgcctgaggtcaggagttcgagaccagcctgaccaacatggtgaaccccatctctactaaaaatacaaaaattagctgggcatggtggcccatgcctgttatcccagctactctggaggctgaggcaggagaattgcttcaacctgagaagcagaggttgcagtgagccaagatcatgccactgcactcaagcctgtgtgacagtgagactctgtctcaaaaaattcaatcaaccaaatcaaataaataaataactgcctttttttgttgttgctttgagatggagttttgttcttgtcgcccaggctggtctgcaatggcgcaatctcggctcactgcaacctccatctcctgggttcaagcaattctcctgcctcagcctcccaagtagctgggattacaggtgtgcaccaccacatttgtctaaatgtatttttagtagagttggggtttcaccatgttggtcaggctggtctcaaacttctgacctcaggtaatccacatgccttggcctcccgaagtgctgggattacagacatgagccaccgcgcccagccaaagaaatgtatttaaggtcagcatcagggactgaattttttctgcctgcagaattgaaaactgtggatgctgttctgtgaatctccttcatagcaggcttgaaaagttgttctgggactaaacgtttgttaaatgggggttaacaatggttcactctgttcacctctcaccctactccatgcatctcccagttctagcccaacgtttatgccctcccactgtgagatgatggaaggctgaggggagaaaagtagtgtggtggaggaggggagaaagattgtgctggggaagtctgggattggagaaacagaagggtgttaatgcgaaagaaggatgaagtgaggggcagcttagcttcaggtaaagatccaactcgggatgtttctcactttgcccctttgttctcagaatcagcgtggttcacttgacaacataaacagatatatgctgttaaatggcccattagaatgcaatgaacatgagcaggacttaccctttgaaactgaacagttcctggaaactcctaactctgcttttctgaccacaggctcctctcgaattatctgattttaggaaaatctattagctgtgactaacactgaaacagcctattgtatgcctcaggacctgccttctctcctggaaccatactgtggggtagctatgaagatgttggttgtatttccttcattattcaataggaaaaactgagaccaagaggagttagagaatgtgtttgcccaaagtcacacagtagaaggacagctggctttcaaactcagctttctctgactattaaagccaacttagaacatacagcatttcttgaagttttaatattcttcctctcctaatttgttttttctttcttggtaactaattttcactaagacagtttgcatgctcttgagcttatagctgaaactgatctatgccagtctttctttaattaaaaatcaggccttaaaagggggatggaaaaggttgagtttttgtcactttttgcagcttgtatgttatagtgcttggctgtgatttgttttcagccagaggacagccctttggagaagaacattatttgagggtgttcccaagcgggtgatggtcactgtccagtgggagagcaggcggaagttcttaccctgctcacatgttaaataatccaagtggcattgctctgagcacttgtgttatttatagtgggtctaattatgagtgtccttgccctgaaaggaagttgtcttccccaagggtgggtgacagactaacaaactattgagctctagcaggagaacgtggagtcctgtcctcttagttggttgaaaatcattaaattacccacctgattaactagcgggtacagaggaatattacaatattacagggacaaatgggaatatactaattgggtcaagatgaattcccttttggacttgaacattaaaattcttattttattttcaaatatgcatcctttgaacgtatttatgcagggaatatgcactgtcagagaaaacatccattgaagtaccctaaagagcaagtaacatatggtgcttttgttagtttttattactgcactttatttctgaatagctgataataattgtgagacacttaaggctacaggtaagaaagaatatggaaaaatctagatgcagatctggtcttgagatgttaaagcctgttactcaacctgttggaagtttcttcctctacaatggagacaagaataatattagctgggagagttaaataggctacattgatgcagaagtccagattttaggcttttactaaatattgatcattattctccatttgaaagtaaaccatgttttactgccaatttttacgatgaaaaaatttttgtggttttgcaaaggtaatttaggcaatcctttgatctccgctgaaatgatagagggatttgttagaagttgtattcaggccttctaatgcttcccatttgctgattcaatgtatttggaagatttgcctacagattcggggccaaacattgagacacaaatagactttttgttttaaatttgtgcacttgagtgtgatattttttcatgccagcttccagtgacaggctgcatagtttattttctgtggcaaccactttccctcactaagttttactctttaagtctagctgcctctcccattaaggttcacccttctctgatctctggcccagaagcctgcgtgaaagtaaaccaagatttttctttttttttttttttaactatttcctgcattcctctcttttaggtttgatgaggtcagatttcagaattgccaagctgtttcttccttcctctattcataatgttggataaagacaggctgtttaaagagcactttcagtctgaggggtgtcttttctgtgcattgtgaagggtgaggccccaaagctgggacgacgacggcatggcgccaggatccatggagttttagctagtgaatattcaggaaagaaatgtatttgtgtcctttgatccagagctggctacccagggtgctggctggcaagtgaaaggaaacatggaagctgacaagtctgatgttaaagaacattaggagttgtgattgtcttcttaggacccaaactgaactttcttgctgcagactcttggtttgcttatgaaccaagtgagtacttggcagaaaccaagtatatgggatttttaaaaaccccaaaatttaagaacacaaagaagatgtccaatttctagaagttccctagagccatgtaattaaactgtgtgtttttttcagaaatacctggaacacctccattttccaataataggtatctctttatatacatggctgtgtctgaactcccggagaaaagagtagggctgtctgttttcgaaaagcagtctttttttccctttctgaataccagagaaagaaaagtgcaatttcttattcagaggtggagatgctttaagatcaattgcttaactagaaggaggtaatatctatgaaacaatgaggttatagttattatagtccatgttacatattgaggtacaattttcctggtttattgttgttgtttaattttactgggaagtggttcaaaatagttgaggtttctgtagaggtctgataaggatactgagataattgtagttttagaggaaagaacaattcacgaaagttatttccttaatatttctgtctaaaattaaaagcttgagcaacttgcctgaaaacatggattttgaatgatatatggggtctgtttgacccatataattgcaattctaattccaatggcaaatttcaggatctttcgttcagaattcaccttctgtttgagaatggccattttaaaagttttttttaaattcaatttttttcctctacaattaatagctattttatggtttgactaatggagatacatttcaagcgtacattcatgtgcttaggattttatgaagcttccttacacttgcaattccctggctgttaccaggaaacagccctcagctcgctgctttcacagaaccatatattgttatggcatccacagctaaattcaaatcgaagagcaaacctctcaggtttgtgtgctattaggtgatacatgcttcagttcccactatgagggaggtcaaccccagagagctttttgttatttccccaaaatggaagctgggaaacaaagttgcttccttaagaataaagtaaaacttacttccctgggaaggtggaagtgagtagaaatggatttgagaaagaaagaacattttaaacaagaattcaacaaagtggcaaaggaatacagggaaccagtttgtgtccaccagtaagatttaaggttggtgtatccttgcagtggaaagctgtgtatgcattagaaaaaaatagttagggctatggatattaagtggaaagttgcctttgatttgctttctacaggaagagtaaaggagaacactgtggaacataatacatagttgatgcgatcctcttaatttttaaaaatacacacatatactgggcgtggtggctcatgcccgtaatcccagcattttgggaggctgagatgggtggatcacctgaggtcaggtatttgagaccagcctgaccaacatggtgaaaccctgtctctaccaaaaatacaaaaagttagttgggcgtgatggtaggcgcctgtaatcccagctactcaggaggctgaggcaggagaatcacttgaacctgtggggcgaggttgcagtgagctgagatcgtaccattgcatccagcctgggcaacaagaatgaaactccgtctcaaaacaaaacaaaccaaacaaaaactcatacatgtatagataaataggaagatagaattatatctctatgggaattagctttggctgcagataccctcaaactcagaataatagtagcttattaaggtcgtttagttttctttcatgggaaagaagttaaagttagtatcgtagttccatggtcaacaggaaacctggtatctttcatgtgtctgctccaccattcttgtatacggcttcccacctagaggttacctcatggtccaagatggctgttgaagctccacgcatcatgtatcttcatgaccagaaaaaggagggatggaagaagagtaaactaattttgtcccttctcattttaaaaaagccttcttggaaagctcacacaaaacttcttatatctccttggccaatatttggtcacttggctttacctggaagaatagaaaatacagtccctcagctggcacattgccgagggttttgtactgccaaataaaaagagaatgactgctgggaggcagctttttggaactgctgcaagtggcttcctttggtcactagaagtggagatgaagagcgggaacccttccattttcttctttatatacttttgtactgttgtattttaaaataatgagttaaaaaaaaagcagagggatgcatattttaaagaagaaatgaaaacctaagtggagttgtggtaagtcatcagtccaagattagcgacatgatagaaaagatgattctctatcttgcttggacctactctttgatgttaaagcatctttgcatctttgaatggatcacctcctgcatgactgttctctgggtcctgagcagggagagacaaccaggtgcatacacaatttggatttcatggtctttttatctctactaaaactatttgcagagatacagttctaatgacaaatgctaattattggctgtcacttagccttctaatgattaaatgcaaaggcattagggtgttaaggaagatagacataattataataataagactaaaatatatggaatgctttcttgaagtagtatattccattgaacaataattgctcttcaattgcagttttaatattctaaacctcaacttctcaccttgaaatactactactaataatagttcctttataaatcatggaattgttataagagttaaagaagataatgctgattaggtgacaggctgtcccttaataaatgctcaataaatgcaagatgaggatgattttattgttggcatagcatgtgccaggcattctgtaattattttgaattttacccccaacaacaagtttataagggtgactttaaaaaaaaaaacagcattattgggatataattcatataccataagattcatccttttaaagtgtataattcagtatttttagcatatttacactgttgtgtaaccatcatcacaatgtaaatttagaacgttttcatcattccatagagaattcccgtacccattaacagtagtcacttctcattttcccttccatcaatttctgaaaaccacaaatccactttctgttttcatgcattggcttcttttggaaatgttgtataagtgaaatcctacaatacatggtcttttgtgtctggcttctttcacttagtacattgtttttgaagtttcatctatgttgtagcatgcattagtactgcattcctttttaaggctaaatgatattccattgtgtggatagaccacattttgtttatctattcatccatttatacatttgggtttgttaaattaagtttagcctacaactgtctctttttatatattttaagtttagcctaaaggttttttgtcaactgtagtttactcttgtgtcaattactgaattttggctaatcaaagatgaccaactgtttaaatcatgcacaagtgccatggtgtgaccaatttggctatttctgtatctcacttttgtttctttgtcctttatttggtgtgtgtctataaatccttttttactatgtggctatgctaaagtctctgtaagcctattctggcttgagagtctgccctattactcattatttatttgacatattttgagatggctgttcagggggccagcagacagaagcaacctgcaaagctgttttctatgggcgagatttgcatctgtagagagtctacattgaggcagccaaccctacccttgtcttgatctacggaagattaactgagagtctgacacctttaaagaagaaacatttactatctcttctctctgagggctgctacctgtttgatttcatttacacaagaccacctttgctaaccaagcctcctcttctctacttcccatgacctgtcttgccagtctaacctggtttatcagcctagcctaatttgggccatcctgagccctcattctttctgtaacctcaagatggtttataagcttctgcaccccatcgggtagttggggtattcactctgtggttctctcccatgtgcacgttaataaatttgtatgccttttcccctattaatctgtcttttttgagttgattttttaagacagcctttagagggtgaagggaagcttcctttcacccctgcaataccctgtacacccattatttcccaaatgtaagaatatatatgacccacataagaatataagaataaaggggtaagctaagttcctgtgagcggaattgcaggatcagaagatgtgtatattatgaggaacactcttgtcaagttgcccttccatggagactgtctgaaccacactcctatgtgttatgaagagcttgaggcaatatttctgtctggaccaattataaagaatagttgtgactttcctcagtaattggtttgtttttgtcttatggagaatgttattcacaacttaccaagcttggattatgttgcttgcttagagcctttgtggtccatcatgaatgtctgtgaaactatattctgaacgtttgttagtgtcactccactttcatatattatgtggtattggaaaagcctttcactggagcttaaaattctcactcaggtgaatcttgagtcaatttcaattttagtcatagaaccccagagctccaaaagactaaagcgtcaagaacctagtttatagccagggaagtctttcaattttgagtgagtttgggtaaaattcactatagatagaacacctaaggataaattgatattatagaggaaataaatcaccagcttctctcattttataacaaatcagagtaagaatgccattccagggctttgcaatattcagcaacctcctacaagcttctttttgtctttggatacaaggaagatagaagttgagtctcttgcctccacgtattactattggagacaaagtcttggggaagtcaggttccaattagtttctaggggaaaggctctcactttcttcatatcctttgaaaaagcaatccagtaaaactttacaaagtttccaagaaagcgcaaagaaagatttatgtgaatgccactggctctactgatgttatgtattctttaagttggggattcatttatttcttcattttacttggaaactgttttgttttgtgctcaccatgacccaattactataatttgagcagtgcataaagcaggctctgcccctcatagaatttacagtctaaagagagataattatacaaacaattactttaagtgtagtttgtttatgatggagaaaggtcatgtgttctgagtgtggatgagaggggcctctcatgtaattgatttatgcagcaagcatttgttgaatacctacagtatggtgatccctgtgctagagctggggatacagtaatgaaggctatagacaaataccctccacctctggaagttggagtctagtaagagcatctctcatttattaaacacttatattccaggccttgttctaaggtgatttaaatgtagtaactcatttgaccctctcgacaacccagtgtggtagataggattacaattatctcatgaaggacagagaggttaaacaacctgcccaaggccacactgcatgtacattttggaattaacctgctcgtgggcaggtgggctcctgaggttgtgttcttgactttaattgtatatgcttctccctattctgtgtttatagagaagaaggcattaggagaggtttcctagaacaagtaacatgatacataaaagataagtagccaagtggaagggtgtggaatgggaagattgttccacatagatgcattgcgcccaggtgcaagaaagaaggtggggaaggtggcaatagtttcaggaaagaaaggagcctggtgtgtgggaggctggaggtgggtatatcttcacagcttggcacaagtcttgtaggttgcctgcagactcaagactttatgtgccgggactgctgctgttctcagcctctgttttgtttcttttcatactgagtgatcttcaccgtgtcacttttgctcttgttttctatgtctgcctgctggcagtgactttgctagccaggatcaagtttgggcaagataccaggaggctcagagacctgcgatctgagtggcatttcctcaggccttgtcctgacctcctggcccagagctaattgtgctacctaagtttgaaaatgctttaaaatttcaagtatatcctcctgggacaactggtatgtcttggcttgataaacaagttgatatctatgtctacctgatcctaaggcatttgccactctaatttgtcatcttgttggtttccaacgtgacaagtactttggttgtacattgcctcatccagtagaccaaattctgattaattattccttttaaatctgggataatggctttaattttgagaatcctcttctttgcctaatgccttccttttctcaacttcaacaccattgacatttttgttgcagaaaattctttggtgggggctgttttgtgcgttgtaggatatttgcctgcatccctggtccctacccatgagatgccattagaaacccctctcagttgtgatgaccaaaagcttctccagacattgtcaaatgtccactgggggacaccatcactcctagttgagagctattgctgtaagcataaaggaatagtattcttcacctatagtcctgtgtcattgctatatggattgtgtttatgaactggatgatgtattataagaggccatttcacagcatttcaataatttgaaatttaaacatttttttctaacctattgtagttaaattaatacaaataataaaataataaaacatccaattaacaaaagaatgcataataataaaataatagctaaccttattaagcactaagtattgggtaccttatacacatagctgtaagttctgcactaccattatcatcattaacagatggaaaaactgaagctcaaaagggtaagttatttactcaaagcagaatgacagtattttttttactttaattctatctcaagcttctcatatttagagcttaagctgaacctctcttaatattaaatttgtgatataataaacaatatttttatttctgattttgtttattatttgcttgatgccagaagataaattactgctttttctaggaggacaattatatttttgattaatattgtaattttagagaaagtggattcccaaaatgctgatcatttttttcagctagcagtatttatagacagcaaccatactataacttatttgataattatctaatttttgactatttttctagtggattattaaagtattactttattgtcaggagtaaattcctgaagaatgaattcaaaaagaaaatagccagtatggctggactacccattataaaacatggatggtggtaaagattcgtttttgatcaaaccttgggaatttgagctcagggtgcaaagcagggcttaggagagagatgaaattgatttcaaatcttttttgcttctttttttgagacagggtctcactctattgcccaggcgggagtgcagtggtgcaatcatggctcactgcagccttgatccctctgggctcaggtgatcctcccacttcagcctccagagtagctgagactacaggcgcacgccaccatgcccagataatttttgtgttttattgtagagatggggttttgccctgttgtccaggctggtcttgaattcctgggcccaagtgatctgcctgcctcagcctcccaagtcctgagattactggcatgtgccactgccacatttcaaatgtgactccataatgtattagctgtgttaccttgatcacattgcttaagtgtctgagtcctagttgtttaatttgtataaactggacattaacaggtcttagctcacacagtttgggtgacatttaagtgaaagcatacacgtgaaatacttagttgaatacctgtcaactaagcagtgaagatctgtgaggaggaggatgatgatatattacaaatagtgtgctgacagtgcttaatatctctcatccttaaaacaaacaacaaaaacaccttgcagatgctgtccctttcatatctcttcacaacaagaattgattttgaaagcatgtttctttctttctttctttctttctttctttttttgagatggagtctcactctgtcgcacaggctggagtgcagtggcacgatctcggctcactccaacctccaccttccaggttcaagcaattctgcctcagcctcccgagtagctgggattacaggcatgtgccaccacgcctggctagtttttgtatttttagtagagacagggtttcaccatcttggccaggctggtcttgaactcctgacctcatgatccacccgcctcaggcttgcaaagtgctgggattaaggtgtgagccaccacacccagccgaaaacatgtttctttcctggaagttatctgtgaaaatctgcaactgtctcctctatggccacccaggtttccttcccttaaattcttggcttaaatttttttaccacatgacaattattcttccccttctgcccttttctggcaacatctgttccttgtgggttttttttttaaagagtgctttctcaaccatggaattcatttctcttcccttctttgagactgacattctaattttctatactgagccttctcacaaaatgtcttttactgaatgttgcttcaataatgtggaggttgagagactgaaccttgctgaaatgtttccttgtgaaattattacagtgattcaatttcagaacagacattttttaatgcaaaatccctaatttgggatttttttttttgccacagtagagtgatatatctccagttttgctacagcttgtttttaacaaatatattctatatttgttttatctatatggaaatttattcatcttgaggttctgtggttttagaacaaaactcactgatgtttgaaaacattgatgtgacaaatggccagcagagcccttctccatggtataaaaagtagcacttggtacaatgaactttttaaggaaaaatgtgtggagcaattgtttaaaagaatgtttctcttaaaacaatgtctctcagtatgatttgaatatttgtactctacatattctggactttttaaaaaaaataataaacctcttatataaatatgttaaggcatgtttggaaatgtcaggcctattctgaggcttttgatccaagggcctcatttatgaaattctgggaatttcatgagttctcagtatgacttttgcccactcatttttttgctcatttgtttattcactcagccattcaaaaataaagaaatgagaacataatactcttccaggccttgaggattcaaagtgattcagataaaatatagtgtgtttttatattctaaagaccaaggcaaaaactaaaaatgcagacaaatcagtaagcaaaataatttaaggtattgacttgaggtcaatttgtggaggcctagggggtgctttagatttgggagatgggaatgtgtctctgagatggtgacatcatggtagactgtgagtgcatcagtggccttagtcactgccataatctttgctttgtgactttattgtctccatcaactctgactctgggtttaaccatgtgagataaaatattagcaaacttgacacagcaatggcttataaaagtatttacaggcttccacttttgggaacagtgagtaggtgtgccttttcttactcctctcgctgagactataaagctgggacattgcatgtaaatcaaacctaagaagactctgaaaggtggagagaagaagttagccagactaacttttgcctcatagatcccacacatggaggtaaagaagccaacaacccagaaaccccaataggcacacacaaaaaaaagtcccagcaaaagcctgctctccctggccagaggaccaggaagtgtggcagcctagcaaggcaagaaacttttagataagagctgctctataccattcaaacactaaagaagagactgtggccccaccctctccaatgaaggccaagtgggggacctagtcttccaccctcatgagactgtaatgagttatcccaatacttcaccaagatgatgtctgtgaaggccgagtcaggagctcagactctcatccacacccatcagtaacaagtcctccacaccatggtgtctgcggagaccacatgggaagcctggacttctaattctgctcagtaggaatgaggtgctccttccttccccactagggtggtgtcagaggagacctaatggaatcagcattgcccagtggtaatgaggccactcctactgcagaaccagtggaggccgcatgagcagacagaatccctaccaccccaacccagcaataatgcgggggcctgtcaagtatcattatcaataatgaggggccccgtcaagtatcaagtatgattttctggggattctggatttctaccagcagcaacaagaaggcatactttcctaccccttctcctgttgtagcaacattagaggcatcctgttgaaagagatttatttaagatctagaacctcataacataatgtgctaaatacttaggtttcaataaaaagtacttattataccaaatcaggaagctctcaaacaatgaatgccaacacagaggtgatagaattatctgacaaagatatgaaaagagctgtgataaaaatgccccaaggagcaattacaaacttgcttgaagcatgaggaaaaaaattgaaaatgttctcaagagaaatgagatagaaagaaggcccaaatggaaattttagaactgaaaaatacaataattgaaattggatgggctcaacatcagaatagagagaacacaggcaaaatagaccgatagtaatcatccagttggaataacagagaaaaaatagactggaaaaataatcacaagagtttcagggaccttgtggcattgtaactaaagatctaacattcatgtcaacagggcccagaaggagaggagagagacatgggactgaaaagtgtggaagtcctcatctaccattgctgacagaatcttggaaactgtgactttaagtgaaatgatgtacaagttctttttttttttttttttttttttttgagacagagtctcactctgtcacccaggctggagtgcagtggcacaatctcagcttactgcaacctctgcatcctgggttcaagcaattctcctgcctcagcctcctgaatagctgggattacaggcacacaccaccaaacccagctaatttttgtatttttagtagagacggggtttcaccatgttggtcaggctggtcttgaactcctgacctcatcctcctcccgactcggcctcccaaagtgttgggattacaggagtgagccactgcacttggccacaacaagaagttcttgagtaatgtcgtttcattattatggtgagaaaaaaattggttttattatgcactttttttttttttgctttaagtcacagtttccaagaacctattgatattaagggaggacctaataaactcaatgaaataatggctgaaaagatttggcagaaggaagtttactcatccagtgctaagagaaaagaactgtcaacccagaatcttatacctagcaaaaatgtccttcaggaatgaaggggaaatcaagacactgtcagatgaaagaaaataaagagaatttgtcaccagcagatctaccttaaaaaatagttgattaagatttctaaacagaaaggaaacaatacaagaaggaaccttgggacatcaggaggaaagaaggaactcagtgagcaaaaatatgggtaaacacaatacgttttccttcccctctcaagttttctaaattaggtttgatgtttgaagcaaaattataacattgtcttctatgtttctaactggatatagaaaaaatatttaggacaatgataaataggagaagtaaaattatgtgaagggtggtaaagtttatcccagagaaataatgacttatggtcacacaaaaatctgtgtacgaatgtttttagcagctttattcataacagtcagaagctgaagaacctagatgtccttcagtgaccaaatgggtaaacaaactgtgttacattagtacaatggaatatcatcacctgggtgaatctgtagagaattatgctaaatgaaaaaagccaaatcgaaaaggttacatactgtatgattacacacatataacatcgttgaaatgccaaaattatatcaaaggagaacagggccgggcaccgtggcttacacctgcaatcccagcactttgggaggccaaggcgggcagatcacaaggtcaggagttcaagaccagcctaccagcctggctaatagggtgaaacgctgtctctactaaaaaatacaaaaattagccaggtgtggcagcctgcgcctgtagtcccagctacttgggaggctgaggcagaagaattgcttaaacccgggaggcagaggtgagatcgcacccctgcactccagcctgggcaacagagcgaggctccatctccaaaaaaaaaaaaaaaaaaaaaaaaaaaaaagtggagaacagattagtggttccagggcttaaggcaggcaaggaagtagttgtggtaatgaaagggcaagtgagggatcctcatgatggaaatttttctgaatcctgcctgtatcaatgtctgtatcctgactgtattatactatagttttggggcatgtttcccttagaagaaactgagaaagagtagctacaatctctctgtagtatttgctgcaactgcctgtgactcaactattatctccaaataaaaagattagttgaaaaatgaaaagcattttcaatgtctgtttgctgtcatgggctcccgcttgctccagaagaataagccccagataggctattggagaatcagacgccatgagccacagagctaagtcattccaggcaaccttaagacaacccaggacttgactgctcatgtgtgaatgaacccagccatgattaatgaagccgggtcagatcagccaaactgcccaatcaacagttatattcatgggaagcgataaattgttgtttaagcagctaagctttggaatgattggttatgcaacaataactaactgatagagaaattccacctaagacgtgaaggaggaaaaggagtcaaccacgtgaagtgcagcggaggaaatattctcttatctcttgtcagagaagaatataacactttggaggctggcctattatgagtgaagtaggaagtggtgggatatgaggcctaatgagtaagcaggggtcagttatatagggtaggctaagcaactggaacttagtcttggtgactactcagaacacctctctaagtccctttggaagccccagggagatcattgcttttttttttcaactctacaaaaatacctattgggtgcataccacaaaatgagtgctctgcatagatagtctatcaccattatgaccacagacctggtgttgtgcgagggcctggagtgccttgttatttgtccctacgtaatagaaagtaaagtttctggactttgctttctgtactgctctttcctcattgcttgggacagtgtctgtcttgtaattggtgctcagtagatatctgcagaataaatgagtaaatgaaggaaacaaaatgtgttgcccttgtttgcatgcaaatcaccacctagctggatggtatgaactgctaaccactatggagtgtttgctatataccaagcaatatgctaagtatgttatttatttatttgtttattgagacagggtttctgttgcccaggctggagtgcagtgcatgagcatgactcactgcagcctcaacctcctgggatcaattgatccttccccacctcagcctcccaagtagctgggaccacaggggtgcaccaccacacctggataatttttttatttttctattttcttggagatgagttatcaccatgttacccagtctggtcttgaactcctggcctcctgcaattcttccacagtggcctcccaaaatgctggaattacagatgtgagccaccgtgcctggccctaagtactttacatgcactgacatattcaatctcacacagccctatagggaagataatattattgtgtttatagagtgcaataaaatcttgtatatatagtctcatatacacaatgtatacagaactacttcttcattatgctattaaatataatttttatacaggcttagatatttaataggtgtgacaagctcaatatccccatccccaaacttcacacctccctactgaacttcgtccttttccaggctttctcagctaatgaaaactccattctcccacttgcgtgagctaaacattttggaatcatcctagacttttgtcttaaccttacccttacattcaatcccatcagtaaatcatgttgattataatttcacaatatgtccagattcttagcactttccacttctcctccactttcatcgtggtccaagtcagtatcaccccctgcaatgtttgttgtgaccccctctaactggttccccgacctgcgcctttcctgccctacggtacctgaagttggattatatcacttccattcaatgcttcgtctcacttcccatctcagtcagagaaaaaaccaacatctttactcaattatttatttttattttttactttttttgaggcagagtctagttctgttgcccaggctggagtgcagtggtgcaatctccgttcactgcaacctctgcctcccaggttcaagtgattctcctgcctcagcctcccgagtagctgggattacaggcttgcaccaccatgcccggctaatttttgcatttttagtagagatgggggattcaccacattggccaggctggtctagaactcctgacctcaagtgatccacctgcctgggcctcctaaagtgctaggattacaggtgtgaaccaccgtgcccggccaagccaacaactttagtgaaacccataaggtctgaccgtgctgacccacgctcaccaccactgccagccctgaactcttctcctatcttcaagcttctttattctccctttaacatgctggacatgtgtctgactcaaggccatttatttcttccacctagagcccacctccctcacatatccactctgttgattgccttgtctctttcaagtcgttgctcagatgataccttcttcatgagaacttccctgatcatccctcaccctatttaaaatcacaatacccaccactagcaattcctatcactgtccttggtttatttcccttcgtggtgcatcacaccatgagacatattataagatacacacacacacacacacacacacacacacacacacacacgcatgtaagcatatatatcttattgattgtatgaaagcacaacaaagacagcagattttctcccttttgttcatagccatagcccctgtacctaaataatgcctggcacatggtaggcacctgataaatatttgttgaatgaattaaagaatgatatcagctctcaaatttttgtttaaatagaatgctcacccagtattttagattttctggcatttctttagtgtctttacttttttctataaaactagttagaaatcgaagctagacaaataaatataacaaattatggcttctttctgcagtgcttctgctttggagaagagaaaggcattggagacagagaaggaaaagcatatataactttctgttttagcgcttgcttggttgacactggtcaactttgtactgacaaaggaagggttccctgtgtgtggcaagaatgctctgagctgttcatggcagatattgattccatcagaatgttttcaaaataatatattcatttttattatacgaaaaacacatactacaggacatatatttatgaaagaagaatgtaaaatgaagaaaactgcaaaataggttacaacatagggaggtgccagttcttgagggttctggaatgtcttattaagacgttgatttttattgatttttgccctaaaggcatcaggcagccacagaaacactttaggtaaaggagcaatgtgttcagattactgttgccaaaatcaccccagatgctaggtagaaaatggattgcaatgtagcaagaataaaacagggagccctctgaaactcagaagatggtagcttagagtagagtagcatagagttggtagcttagagtagagtagcatagagtaagtagcttagagtagagtagagtcccttgcagagaaatataaatattcctggtttaactagagggtaaaaatacacagaatttggtgactgatgaattgtgttaaaagataattttcaaaacaggtaaaattatgactcttatacaaatgtagaatgaagatgtgttgaagtttctacttaactcattaattaaatgaaggaacaacgttgaatattataactagttcaaagggtaattcaaagaactcatacatttatatatcccgaatgatgaaatgaatattcaaaaggaggcaaatctagcttcgtggacagtggggggtggggtgggtgggattcagttgaacctctactagacaggacataatttgcatctttatagactagaataattttgcattgttttcacttacctacaacttacagagaagtagaatagctcccacagaatcaaaagcaggtaattctcaaaaggtacttgctacagaaagcccaattttccattgaagtgcagattattccctagaattgctgtgtgtgtgtgtgtgtgtgtgtgtgtgtatgtgtgtgtgtgtgagagagagaaagaaagagagagaggagagagaggaggggaagggagaggattacgtatagctcaaatcttgtatgagcaactgcaacctccgcctaatttacagaatgagtgtatatgtatataaactagaagagaaacagattaaaaagcaggggcaacctcctttatgtacttaataactgacaaatagcattttctatggtatacatattattttacaatatcatttctaatgatggaaacctctagtttacacatttgccatgattaattaaaccagtcctctgaaacatttagagtatttccagtttttctccagagagccctattcccatacctgtgcatatttccttaattatttcctcaaagggaagttcctggaagcagtatttctgggtcaaagtgtagatataattctgcctctagaaaggccgtgctaatttacttcaccaccaggaaagggttggcttagctaatttattccctgtggatgctttttaaggatttttaatcttctttatacatattttacttcatgattaactaacccatttttgctggtatttttctttacagtaaatttaaaatatatcttgatatccactgttcaattttctccaaattggcttttctttccttacaaatgaagggtatatatgaatcttaggcatagaatcatgttgtttactcattaaaaagattttttttccttcataaaatacatgattctgacccagctcattattttggtaagtggaattggtagcagcctgtatattatgactgggggaggccctagaaatcactttttgtagtcttcaagcaccaactgtgaaatcctgtcatgacacagtcattcataggatggaaaattctgactttcttggcctcagagatcatccaggccaatgcccttgtgactgctcaatgggttcattttaatcactccccaggtacagccaatttgtcaagacagaggaattgcagtagggaaatagtttaattcacccagagctggctgaacaggagaccggagcctctgtggacatttggaagctagggtttttcaaggatagtttgatgggcaagggaatgggtgctgctgattggttgtggatgcagtcacaggagtgtggaaaacagtcctgtgtactgagtccactcctgggtgggggccacaggatcagttgagtcaagagtcataggtctgggtggggctattggtggtcaacaatgcaaaagcctgagaagacaactcaaaaggccaatcttaggttctacagtactggtgttatctgcaggagtaattgaagaagcagcaaatcttgtgacttccagaatcatggctggtaattctttatgcctacatcttagcagaatagctcctctcatcctcctaacctggtggtctttcataagttttacaaaggccatttagttctgaagaaaagtgattatcatttaacctataaactaaatttctcccaacgttagcttggcccaagcccaagaatgactaagggcagttttgagattaaaggcaagatgagggctgattagatcaaatccctttcattgtcttaattttctcactgtcataatttttgcaaagatggtttcactcttatattgcagaaggagaaatttgcagacaatggcagataggatggaggggcattacctgtggggcaaactcctatctcctggttctccttggttaacatctccacccttgacttccagattatatcaacccacaccattttctgtggctattgaaaagcctgaaagtgacagaggagactgagactctaaggggatagtgtcagccaaattggagggttgggcactcatggagaagtgactggtcagccccagatagtggactgtccaggccagcagggagtcatttagcctgaacactagtttaccaccaccatggcagaggaagagcaaaaggctgagagttagagaagcaatgaaatccaagaagagttgagaagttgtatgagataacatctaattctaatgtagttagaaaaatacttagcttggcttcctgcacttctgtcaaagacactgactatgctatcactgaaggagagataatatggagttcttttcaaagcaaatacttcttgcagattgctaggatacatggagtcctggattagtgtcttaagaacccagtttcagaaaaactcccttcaaaactatcactgtgggtgaacacttagtgccagtgagtgaacttaaaatcacaaacgcaaatgtcacactgaaatagattatctataaagtagtcgtccagatgaaacagcatatggctacaactaagtgtctctttttagattatgataagcatgaaaataaacttcttacagatggatcgaccatcagcctgagtttatgcatccctaagagtccaactttgctgaaaaaattcctggagtagtggttaagagcttattttccagattcaggcaaacaaaagttagaatcctggcatatttctcctagcttttgaccttgagtaagatgctcaacctcactaaaaacaaaatttgctcatctgtgaaataggaataataatagaatctgccaaacaggaatgttgggatgactaattgaaataatgcatataaaaggctcagcattccacagtgcgcagaaaaagagttcagccaatgctaggcattaatattaacatcctgcttgagaaaaatatttgatttgctttggaaagtaagtgccaataggagtagcacatgagaactgaggctaattcagtcagcactgtgaggatatatatctttttttttattattatactttaagtactagggtacatgtgcacaacgtgcagatttgttacatatgtatacatgtgccatgttggtgtgctgcacccattaactcgtcatttacattaggtatatctcctaatgctatccctcccccctcccctgaccccacagcaggccccagtgtgtgatgttccccaccttgtgtccaagtgttctcattgatatatatctttagagtttggagagaatgctctgagaagagaaagtcaatgtgattacagaaagggaatgctggcaaaatggaaaacaattttcacctacttagttaaattgtaccttaacttcatagaataactatagaaacctaactgcagcccagtgcaagagatggggatgctaatggatctgcatgagaaagtgctcttcaggatggcatccaccttaattgtagaacagtgattccccaatggtggacagggagaccagacatttggtggagggggttgaaaaagcctcaagtcaacattttaatagagttttattggagtagaatcttggcttatggggagatgtggaatgtatagggattccacagaaggcataattacttccatttctccctggagagacttgtcaaacagatttctatgagatctgagcttaaagagttgagaaatactaccgtagaccagaggttggcaaactatggtccacaggccaaatctggcccactgcttggctttgtaaataaagttttattggaaggtatccacactcattcatttacatatattctgtggctgctttcatgctatatttgctgagttgagtagttgcaatagcgacctgggggctctcaaagattaaaacatttactctttggctcattacagaaagtttgccaactcctgtggtagattataaaggcctaaacagccccaggcagtgtactatttcctttcaacaggaattttgtgaccaaaatttgctattttcttcataacagtccttgaatcctttagaagtataattgttactctttaagacattgtgaaggcttactattatagtaaaattaggaattctaagcaaattcttaattgtttcagctgcttcttagaactggaaattttggtgaacttaccagaatattctttgctaggaaaagaagccaataaaaaatgttagagattttaaaccagggctaagcaattattaagggtatcaaattttaaaggaagaaaagacaaaggaaaaacagaagaaattattcatggattggtgacaatttaaggctgaaaattaggtataataaaatcaccaccaccaacaacaaagtacatgctgaatgagattttcatgtaactactaaatctgctgtctttccacccagcttattagaactgtgtgatgtgcttatctgcttaagctttgacagtggcctgtggggattgacttgttcaaatcaggggctttgaagatattcacaaagacacatatttttcaaatatacaatttcagatcagcatgcattcagctgtggcagtggtcctcattttgccccccagaggatgtttgacaatgtctagagacaattttggttttcagtggaggtgggagaatctgctactggcatttagcaggtggaggccagaggtgctactaaacatcctaccatgcacaggataaccccccactagaaagaattttctggcccaaaatgtcaactgtggtaaaattgagaaacatgatgtataggaggtgagctatttcaacatggaagttatactatcattgaattctcatacagtgtatttacattaggattacctatcttttatttatttatttatttatttatttatttattgacactctgtcatgaggctggagtacagtggcacaatcttgactcactgcagcctccacttccctgggctcagatgattgtcctacctccgcttcccaagcagctgggactacaggcatgcactaccacacctaatttttgtatttttttttttatagagataggatttcaccatgttgcccaggctggtcttgaactcctggactcaagcaactcacccacctgggcctcccaatgtgctggaattacaggcatgagccactgcacccagccaggattaactactatttatagccagtgaaactattatagttcgaataaaagatttctcttttaaataaaaatgttagtttaaaaagtcaatttaaagaaaaatgttaactaaacaatactatagatgacaagtagatttgttacataaaatataaagacagttgaatgaattaatttttaaaaactgccctaaactcttaagcgaatgggattattttcaaactgtcattctttgaaacaatgccagtgttaacccaagtagttcccacatgctatcatatttagtaagtcttcctgttttatttttgctaaacaatactgagatatttaggataagcttttagtcctctggatattggtggctcttctcgtgttcttaggacagtgtgctggcagttgaaattgggagtttagtttaacggattacatttctccttcactttctctctcaaactcaagatggcagctcatgccgctctgtttcaaaggccaccatgtgccaccttttgcaagccacccatctcagatgcccgcatcgggaagcacttttagaagtctttgtcggcagccccaagagggagacacagcgtcgtctgaaagtactttataaatatttatgggattgacttgcaaattacagataaaatacctgaaaacatggtaaagagcaaatttgtctggtcccaactgaagaggttttgactcagtagacctcggctagtctctaggaatctgcatatttaacaattatcctgagtgatgctggaccaaacagtgagaatcactgaggtatgatatatgacaataaaggaaagatcttgattgcacacattgctctcaactttggtactgtctgcttttgtaccatgtgtttgtatgttatagtttgacatcacagactgcctgttcataaaccaaatttgagttttccttatcttctaatgaaccaatgtattttcatttgtccttactacttaataaatcaaaagaaaaataagaaatgagaaaaaagtcccctagacttaataccgatgggtcaaaaatggaaatcattaggcatgctgaaattgaagaacctttaacttgcattcagcagcttttggacataagccaggcaaaaactgtgaagaaaatgaacacattttaaaaaatgttagaaatgctgtcattgaagtttgggtctgaaaactgagggatagttaggaaatgtaaaatatctttcttggtgaagatattttttcttgcagtgggcatgatttttgcatacctttagcatgttcagtttctgaacacattcttggggcatgtacaaaagcaagaggttgccaatagtagaatgacagcaagaaacttatttttcacatcctttatttgaagaagcagagtgacgttcattcccactgtaattacagttctcaggtggtggaaatatttcaagggagccaatcgtctcatctgttattcagacataagcaagatgttgataggactctccttgacaaccatagtactgagaatgttcattttcatggctgaatctccacctgaaaaggattttgtgcttgaactcttaccaatggctcttgtaacttgccttcttaaagttactcactctggtcgttaattagactgtgattggatggcaaaaaaaaaaaaaaaaaggactggagaagaatgtagatgacatatgttagattaggctgtaattttaagatcttgctttaatatctgtacatcttactgtctttttaaaaatttaattaaacattctatttcaagataattgtaaattcacattcaattgtaagaaatattacaaaaagatcctataccctctactcagtttctctggtagtaaagtcttccaaaactacagtatgatatcgtaacaaagatattgacattgatattgatgtagtcaagctacagaacagttccattgccacaaggatccctgatgttaacctgttacagccaaatccacatccctgggctccctctctcctccaccaccacattcctaacttcagaccatcgttaatctgttttccgtttctataattttgtgacatcaagaatgctatacaaatgcaatcatgtagtatgtaacattttagatttggctgtttttttcactcagtataattcttacagagatttatccaagttgttgcagatattaatagtcaatttctttttattgctagtagtattccattgtatggaggatgtaccacagttcgtttaatcattcacccacagaaggatttccacattatgaggcttccaggtttcggctattttgaataaagctataaatattcatatacagattttttttttatgtggggataaaagttttcatttctgtgtcataaattcctaagaatgaaacttctggttgtatgatgctggtttcattttttaagaaactaccactgtttttcagagtggctgtaccatgttgcattcccaccaactatgtatgagtcatccaatttttccacatccttgtctgcatttggtggtggtggtattattattatttcagccaatctgataggtgtgtattggtagccattgtggttttaatttgcccttccctcagaggcagtgatattgaacatgttttcatgtgcttcttgaacatctgcgcaccctctccggtgagatgtctgttcatgacttttgcccattttgtcattagattatttgtttgttttactgttgtgatttgagggttctttgcctattctagataccagttctttgtcagatatgtggtttacacatcttttcttccagtctctcacttgtcttttcatcctcttcacagagtttttcacataacggaagttttcattttgatgaggtccagtttttcaaattttccctctgtggattatgcctttgataacaggtctaagaactctctccagactgtgatctcatgcattttctttttatcgttttatttgatatttaagttttatcattttatttaatatttaggtctattttaagctatttttatataaggtgagtgttttaatgtttaagtcgacgatttttccacccccctccatggatgtccaattgcctcagtactgtacactgaaaagtttgcttttcttccactgaattgcttttccacctttgtatctgtgtttttatattgcttgatggatttaataactgtgcaggatgaaaaccaatagaattgactaattatactaatacctctgggtatttaaaaaataacagaatcctctttcatttaatttacaggttttttgttttgttttgtttttttggtagtctctctctgctgcccaggctggagttcagtgacatgttctcggcttactgcagcctctacctcctgggttgaagcaattcatgtgcctcagcctccagagtagctgggactacaggcatgtgccaccactcccagctaatttttatatttttagtagagatggggttttgtcatattggccagactggtctcaaactcctggcctcaaatgattcatccatcttggcctcccaaagtgctgggattacaggcatgagccaccttgcccagccatacagtattaacttttattaaacaaaacaaaaactaacaaacaaaacccaaaatctattctcacgatccagagaaaacgttgttaacatttttttttgtctttttccaatgcatttttagtatagtggagatcatgacctaaatgaaaatttatattctgcttcacccctccccacaataacatattatgaacacttttctatgtccttggaaattccttctgaaacttgtttcaaatgaaccaactatgttatcctgcagacagataatatatgtattatagatgtagtataatttactatataaatattatgtacactatctatattactattttttataaaataattacctatgttatcttacagatgtataacatttattatagatatattctatatgtatcgtaatatgtactacatgtttactatatgtgtaccatttactttatatagctactaatgttgctctatagataagtagatatattacattatatattgtagaagtattataatttactttgtcactccttattgttgaaatttgagtaatccctgacttttttattgtaaataatgctgctaacattttattgtacattcggtgggatcagacacatatcttagcttctttatttagaactaaacttcggagtagagtggatttcgttttttcaccctgaacaaagcagttaatttatgttcaagtttctgagacagaagagaaaaatggaatatataaacattgcagacaagtagtagttaacttgaattcctcacccatctgccaggtactgatagaattataagaggtttttaaattgactatgttttgaaggaccaaatattttatgtagactttgttttgtttcttcttattagctcagaggttcttaaactttgtagtacataaaatttatttataggtcaaatatacaaaaccacatatatatggtaattggaggtaatttaaggatcgaggataatcatgactgaagagcagccacccgtctgcacttgaatatggaattcattttgttttgggttttttcctaaggatagatttctattctttttctttttgagacggagtctcgctctgtcgcccaggctggagtgcagtggcgccatctcggctcactgcaagctccgcctcccgggttcacgccattctcctgcctcagcctcccaagtagctgggacggcaggtgcccgccaccatgcccggctaactttttgtatgtttagtacagacggggtttcaccatgttagccaggatggtctcgatctcctgaccttgtgatccgccggcctcggcctcccaaagtgctgggattacaggcgtgagccaccgcgcccggcctgatttctattctttttaggttatttattgtcaagcgacctttaaagatgaccagtcgagtataatagtgccactcagacatttgccatcagtaactattattattaaattatactcatttgctgggcgcggtggctcacgtctgtaagcccagcactttgggaggccgaggcgggtggatcatgaggtgaggagtttgagtccagcctgaccaacatggtgaaacccggtctctactaaaaaaatacaaaaattagctgggcctagttgtgcttgcctgtaattccagctactcaggagtctgaggcaggagaatcgcttgaacccaggaggcggaggttgcagtgagcggagatcgcaccacctcactccagcctgggtgacagagcaagactctgtctcaaaaaaaaaaaaaaaaaaaattatacttagtaatttttaggtttaaaaatgtctcattttattttgcttttggagaatattgtttttcatatgctcattagctctttgcattttctctctctggcattattaatattttaatgtgctagtgtaccttttactagttattttcttcaggatagttttggttgctagaatcagacccccattcaagctagcttaattaaaagttgcagtgatgttgatggtgatgggttcctggggatatagatgatttccaagaaacccagaggaaaggctagatctcagtattaggaattgaaagattgtgaagaactaaaatgtctcttttacctagagtagaaatgatctagttccctgtagcaggttccacagcttaactctcctgcaagtgattcaacatggccaacaacttctgtttaaacctaccagcattgacctttcaatttggtctgcacctctggtagtaatcttcaagtctctgggttgaatatcctaagcaagaatctggttggtgttaatcagccaattattagctagttagtttagtgtctggtccaactcttcaccatccattatgaggaatatcacgacaaccatgagctgccagattctaggatgggcaatgagatcttcagcatagaccaagcccatggttttcagatttaattgcacttgaaattctagcatgttccttgaatgcctattttatttgtacatttgggatttttatctctgggacttttttctgaaatatacctagtgatattgctatcaaagcatgaagaaatttatcttcaaatacttattttcttttgattccagtaattgtctgaatgacacataatatgcccgttgtggaaacaattttgatttttaaaactttattttcacaaagcaacatcacatttctggcttgcaaatatttcacaggtgaaaacatcaaaaagaaaacatttaaatgcaaatgtcagtcaggggagatgctgagctcagtctttgtatttccttccagatttatcagcgatgctggttagtattcaagaaagcttcaagcaaaggtccaaaaagactggagaaattttctgatgaacgtgctgcatatttcaggtgttatcataaggtaagactcaattgctgtagctttccagtaatctatttacagggaggcaactggaattactgactgaaaacttgcctgaattatttaacaaaggtacaagcaatatcttttccaaggacaaaacacccctaaaataacatctgcttgctaattgtttcaagtaattgactaatgtaaagtcacttttctggtttcctgctatttgctgtagctgttcttgctgttttccagtctctgctatgggacttatcatgttgttgtactccctacactgaagccccgagaggatgaggactggatctcattgtgtctcagacactgcctgatgcagaaagacactcattcaatgcttggggaatgtggggagagaagggaggggaagaagcagaaaacaggtaacagtggacgaagaggaagttctaccgatttattgttttctttaagtttgatgactaaattttcttagtagtagtgagattttctcaataaaaatagtcattgtgtgttacaactcattaaggtaagtacaagatttacttaccacgtggattcacaaattagctaaatatttccctctacatggcagtatatttccgtggtccttgttaacacgcagcctatgtattttcttttttcatgaaaacgtgtgaaagcacatggttaacactcctccgaggctctggttattttcatatggagaaaatactactcttttgtctatgaaggaactatgcttatttttatgatagaacattttaattttggctttccatcttgaagattctttaagcctcatttggtgagaatttactggggccaggcttctttgccatttaaaattttatgcgaaaccagttgatctattagaacagaaacttggctaggtgggggaagtgaacagcttttccttttgtgcaaattctccaaaagtagtgacttttcgacaccttataaagggtctatgatgacactttggtttatatgatgatgaaaacaatggggaagctgcatttcttctcaaattagagaaataaggactacgttatactttataggcacacctgtatgtacataagggaagaataagcacaaaacaagcttttgagacaggtagagaagggagtcaagggtggcgtcttccatgcatttcatttccctgtcaccccatgaagcagttccacattccaaggcttctcccactcccagcctttcttctctccaatggagaacccacttatacctttttgagtccagatttcctctatcatttatctgtcatatgccaaatatgaaatgacactgttcaaatatatatattttttgttctcagggaggagttgttgaattgaaaatgtattatttaggcacagtgatccatgaagccagtgatagcataactctgaactctgcaaataatcttgagccaaactctccacttttataacactctaaactatttgtatccagtcattttgaaccagatgtattatggcccagttatccctcatgtatccagtattttcccttataacaagatggcgagcaatgctataaggatgacttgctttatttttgctagaacagccttttcttaaaagagaatcaaaatacccaggaagatgtttggcttatcatctagacacagacagagctttaggtggccagaaagtatagttacacatcaggtcttctcttgagaaccttagccggtctgtaactttgcaattcaccctgaggctctgtactgtctggtcattgtgtgtggccttttggtccttttttgtcttggtagagttccaaatatgtctggttcttcacaatccaaacatctaattcttcacaattccatatgccaacctttctgaatgtagaaaaaataagaaataggctatgttacagatagacctatacatacctaagagaagaaagaagataaatgaggaatacattataggaactcctcaaatcccatccatcggcaaatggtgttggctgtatgctcaaaatgtatggagactctgaacacagctcacagtctctactgctactactggggtcctaggcagtgggctgccaaattcttgggcttctagagtctgttcgaaacacttatatcacatcacgatattctttgctgcaacaccctcagccaaggtctgataatggtctatgccagtggtccccaacctttttggcaccgggacaggtatcagggaagacaatttttccacagacggggttgggggcaggattggtttcgggatgaaactgttccacttcaaatgattaggcattagattctcataaggagcaggcaacctagatccctagcatgcacagttcacaatagattttacacttctatgagaatcaggaggtggagctcaggcaggaatgcttgctcaccttctgcggtgtagccgggttcctaataggctatagaccagtactggtccagtacccatctgctgcccagggatgagggtccctggtcaatgcgatcacgcgatttgatttcttgctgcccttttaacctcatctctgagtttccttaatcccaccttcctcttctccaggtgccctgggctcctctctttccttggaagatgccaagcacctcctgccctttatacctgctcttcccttttcctggaatgctctcccccaggtacccacagagctcgctcccttactttgttcagtgcgttgctcaaattgctcctctaagagaggccatttcttgactcccttgttggaaatagaacccacctactcactgccttccacatccctcttattgctcttctcaggaggcaccagaacataacacacttgcttggttgtttcctattgtcttcccctcttccccgcataaaatacggtctacaaagacagggattttttggggatgggagacatgattcactattagttaccagaatctaacacatagtgaacacttttaaaagtattggctgaaaagcaagaaatgttatcagtagaggaaatggaatacatacagatgtctatgtgtcatacttttatttagtttaccagaagaaatctgtacttgaggcatctgaaaccagaaaaagaaactttgatttggagaaaatagggtgggcagtgatggaagcagaaaaagccaggatttggatgttttaggaggacagaaaaatataaaaccaaagtggatgaaaaagctcttgcttgaatgtgaaatgaataaagggaagttgaggacaaacttgctctatttcagacttctacctgctggctttggaatttaatatgtaaatctttggggaaattggtaagccacattctctttcacctataataatcattaaccaaagttcaaagcattagaatggaagaattatctacatttagcctccaagcccttgatgaattcctgtagctgattcatcctctactcttttagatctgatacatttagtattaatctctcggggcacataaaaagctggagtaattctgagatatgcatttttcatctaaatgctgtgtaatttatgaatcttgataataaaatactggggttataagtagcacaccgtgaccaaattttagagtttattctaacataaataaagccgtttccaaaagaaatgaggaaatgtacatcatgctatttgatcaatacggaggtggtgtggtggatgcagacatatccctcccataggaaatcttagcctttataagagcacagtacttctcccattttatttttaaagatattattaagaaaaaaatgccagttttgcatatctgactctttttagaagtttcaacacaagaaaaagattgtagaattttaaaatttggtaccccctcactgaaaatgtagctcgaagtacactcctgcaaaaattggaaaataaacatatgaataatgcacatatagaacaatttattttttatttcttacttcctccacgaagcacccctcaagcacccatagctgtcagagatggctgcaaatttgattaactgtaattcccacaatagtaagactccagtgactttaaatatagtttctgaccttgttaaacactagttccatgttttccttcaggaaataatgttgcttatactaattagaaggggatgaaagtttctgtgcatagttttactttttcaagatgagtaacacttgagaggaaatagagtggaaggaagaccattgaccgcttttgagaccaaggcaaatggtatggtgagaagtatgccggtcctggatttaggtagcctgagttctaatcccagctttgccaccgtatatgtctgacaagtcatcctctttctgtgtaaaggtggcctccaaggcaagtcacacatttgcttcctcatcatcacatgtggctgagtctgcagggattcggttcaccttggaccagaaggacaagtccagcaaatcctgtgtttaatgtttcccaaaatgtgaacgaaagagtgtgtcaaaagagcctttcatgattaaatgttgtgtggtcaaagaaattggcaactgcaacgtttatggccccatctttgagattcataacccactgcagcccctcatgggctctgaaaagtcctacagttaagaaattggagggactttgagtcagcatttccaaaacagctgggccatggaactatttgttttaatcgtgtgttccatggaacaaataaatttaattctagggaacacagtctgggatttgctgctttcatgtgttaacttattgttgtttcaacagtaaacaactagggatgatcgtttctactttatctaaatcagggttaatgtgtgtattaaatgaacgtgaatgtatttgaaaagggaacaactctctaactgtagagattaattgccattattatttttattctcccaaacacctttggtcttatttgttctgtcattctaccctttatagtgactaggtcatttgtatctcctaagctcaatgtcagaccttgttcttcgtttctgcaaaaataggattctagcttccgcacaatgagctaatgtcctaaaatttatttctctggaatttcatccaacttatctgtgtgtgtgtgtgataaccttttctgtactaatgattcattctttttttacacagtttcttcctcatctaaaacatttcctcttccgatacagctgtctataatatgtcttttcaaaatcataaaatgtcacagccccctctttcaatactcagatatttactttggagtcatcccctcctcatgtaagaaactacccaccatgccatattctagaagtttcctaagcttatgccaaagaggacatgactcttcacatctccataaattaaatgatggattattactctgatgtttttcccaggtgataaataattccatatccacatttctaaggcttaggtaaattagataaaagaggttgactgtagtacaaaacaccctatttttccaatttaagtacttttttctagtcaaggaagtatgagtcagtaccagagtgccaaagactcctgaaacacgttcaaaactgactgaactctttcctacccaagcttggtttctttctttccttttttcagatggagttttgctcttgttgcccaggctggagcgcaatggcacgatctcggctcactgcaacctctgtctcctgggtccaagtgattcttctgcttcagcctcccaagtagctgggatcacaggcatccaccaccatgcccagctaattttttgtatttttagtagagacggggtttcaccaggttggccaggctggtctcgaactcctgacctcaagtgatccacccaccttggcctcccaaagtgctgggattacaggtgtgagccaccatgcccggcctgagcttggtttctttatgggcttctgtggctcattgtacagcatcaggatccattctgttattcaaggcagaagccagggagttgtctttgacttactctcttccatattccctctcaaatcaatccatcaccaggtttgcatgcagcactcccgctgtatagaccccttttctttcgtggtccatgtggcaaacatttatcaatccctcaaagtctctgctctgtcttcacctccccaagagtcttctcgactttccctgaggtggttcatctgctgggccccctctgcctggatgcactggtcacaatgaaagcagggctttattttcatggtggtggcaggttctgtccatttggggctgatcccttcttctttggtaatggatgtctgatttctagttggagacaaggcaacccatagtaaagacccctgtgcagagagatatgttcctgcaactgattcctggcctcaggggaataagcacagaagacacatacccttcttcgtctcttgttctttcctactgattcgaaaatgggcgtcagccatcttggcccatgatactggaaagctcatggattgagggtagcccagcaacaggtgaagcctggaactgggtgctcagggctggtctgttctccctcacactgtagaaccccagggcaacccaagactacttacctctggatttgttttatatgagaggaataaacttctttcttgtttaagcctttatttatttatttttaagacagagttttgctcttgttgcccaggctggagtgcaatggtgcgatctcggctcaccgcaacctccacctcccaggttcaagcgattctcctgcctcagccttcccaagtagctgggattataggcatgcgccaccaagtccggctaattttgtatttttagtagagatgggggtttctccttgtgggtcagtctggtctcgaactcccgacctcaggtgatccgcccacctcggccttccaaagtgctgggattacaggcgcgagccactgcgcctggccacgtttaagcctttataatgctggattttctcttgtgtgcaccagagtcctagctattagagatgtagtaaaatttcctcatcatccaatgcactctgggtagggaattctgttattcacagccaggagtatcctgacatggtcactgtccgttggatttgaatttcttgaagatagaaaccatgctttattcatctttgtatctatctttccaacatagtgtctcatgcaaagtaggtactttggattctacaggcccttacggttcccaggaaatgattcttggcctacttatactagtattgcatagtagaaatgttagggaaccctggtgtattgagaattaaaagggccatgtgactcacatgccaaattctctgtcatctgagcacatgcatggttttgtcttatggagaagaccttctaataacagagataatgacatcatattttaaattttatttattattattattatttgagacagtgtcttgctttgccatccaggctagagtgcagtggtgctatcttggctcattgcaacctctgcctcctgggcttaagcagtcctcccacctcagcctcctgagttgctggaactacaggcgtgcgccaccatgcccagctgattttttattatttgtagagacagggtcttgctacattgtccatgctggtctcgaactcgtgggctcaagtgattctccctccttggcctcccaaagtgctgggattacaggcacgagccactgtgccaggcctcatttgtacgcatatttacattaaaaaaatcaatctaaaacatacagaaggttaaaaaaaaaatcaaatggtattgaagcgcttatcatgaaaagtagcagtgcctactttattcccacccttctgttgtgggttgaattgtgacctcccaaaaatatatgcctaaggtgtaactgctggtacctgtggatgtgactttatttggaactaggatctttgtaatgtattcaagttgctgtgggattatcggattagagtggaccccagtcccatagctggtacccttataagaagagacacagacccacagggagaaagccatgtgaagacaggcagacactggagtgatacaattaaaagccaaaggtgtcaaggactgcggcagccaccagaccgtaggatagatgcatggaacagactctccctcacagcctccagtaggaaccaaccctgccagcaccttgattttgggctctggcctccagaactgtgacagcatacatttctgttgtgcaagacacctagtactttgttactgcaaccctactctaggaaacgaattcacctcccgaggcttaatcaccattgtcattccctggtgttcattttcctggtggttgcctctgtaactctcaatgatgtgtttataactttgtttcttgttttattaacttccaacattaccaacagattcctcccctttagaaagttaatggtttggctcatttatgtaatctcatcaactctttcttcttccttacaaattgtgacaattacattactttcaataaatattctactgtatgtggaacattcaataacatggttaaacctctgtgcccttccccataaatgttctgatactgagactgattcttatatcagtctcagttgttaacgatcttattgcctgtcccctttgcttttctcttctctatttgtcaggttttttttttttttttttttttactttcatgttattcaataccagattcttgtcttacagcaatgtgggctcgctcttgtcacacgttccattgtttcgagagaaactggaagcaaagatcttttagttgaacactttcaatatttaactgtaattttaaaatataagaaagtataaattgaatatctctccgggtgattggcctgaaagctgcctttaaaattttttttaaatctcttatttaccccttgaactaatgctagaaagagaaagcaatggtattcccaggaggcaacatgtggcactatacttagtaggtctactattttaatatgtgtaaattacaaataaaactatcatcatactttattgcgttggacctagactcctattttctttcagttatttatagtttatatagatacattcattgtgatgaaaacattacaaatacttcagctataataagacttctatggctgggcacggtggctcacgcctgtaatcccagcactttgggaggctgaggtgagcggatcatgaggtcaggagatcaagacaatcctggctaacacggtgaaaccccgtctctactaaaaaaaatacaaaaaacaaaattagctgggcatggtggtgggtgcctgtggtcccagctactcgggaggctgaggcaggagaatggcatgaacctgggacgcggagcttgcagtgagccaagattgcaccactgcattccagcctcggcgacaaagcaagactccgtcaaaaaaaagatttttattagagatacacatatgcttcccaaaatattattttggtcaacaccattgaaaccatcaaggacaaatttgtgtctatgcctcctctgtaagagtaccctaattgtgattggaaagctgaatgttttatatgccagaatgacaggtttcaaagaaaacacaaagaacaaaatcagagagagagaaaaaaaatacatataccatgtagtatgaccatggttgaaacaaggtcaaaggtgatgtcaatcccatgttgtaacatctacgggggcaggagtcacaaacgttggatcagatatcacctgtgagttgcaagtacaaggtagtttcaaagctgtgcctctgcaatatttcttttcttctttttgaggattcccgtcacccttagaattatatcaaagctcattgccaataccctggtctcctaagccctgtatgattctgctccagcacatttctccgacttgccatgccacttgtcactttgctacaatgacctcccttcatttgtcctgtctcaaagcctttgcagtttctgttcctttgttctattgagctctcccccattttttttctcttccttcagggattagctcaatttcactgcctgaaaagggccttatttgaatactccatgcttctcagaatcacatttctttagtactgtactctcactttatgtgtgggggatacattccaagacccccagtggatggctgcaactgtgtatacctctcaaccctatatattctatgttttttcctatccatacatacctatgataaagtttaattcataaattaggcacaataagagattgacaataactaataataaaatagaacaattataacaatatactgtaataaaagttatatgaatgtggcctctctctctcaaaatatctattgtactatactcacctattttcagaccacagctgactgtgggtaacctgaagcctctgaaacagaaactatggacaagaaaaactaccatatattaagtagatagcctttctcactgttgaaattatgttggccaggtgcagtggctcacgcctgtgatctcagtattttgggaggctgaggtgggaggatcacttgagcccaggagtttgagagcagcctgagcagcatagtctcaacatagtctctctaacattgtctcttaagaaaacataatctacatgtatatttgtttactgctagtataccttaagctccaagaaacttattgtgtgcatgttgtcacctgtaggttcttgtatccatcaccacattaagatactgaacatggtcgggcgcagtggctcaggcctgtaatcccggcactttgggaggccgaggcaggcggatcacgaggtcaggagatcatcctggccaacagggtgaaaccatgtctctactaaaaaatacaaaaaaattagccgggcgtggtggtgtgtgcctgtagtcccagctactcagaaggctgaggcaggagaatcacttgaacccgggaggcagaggctgcagtgagtggagatcacgtcactgcactccagcctggtgacagagcgagattccgtctcaaaaaaaaaaaaaaaaccctgaacatttccatcagcaagaggactttttgtgttgccctttcataatcacatcctccagtcctcccaccccaccaccccagcaggcactaatttgtttcccatttctacagttttttttttcttttcaagaatgtttaatcgtttgggattggccttcttcacgcaacataactcccttgggacttatccaagttgctgtgcatagcaatagtccattcccttttactgctaagtagtaatccatagtatacattcccagagtttgcatacattcatccactgacgaacatctgggtcgtttttagtttctcatcattacaaataaaattggtatgaatattcaagttcatgttgaatgaacataagttgtcccccctcctctccatttctgggataaattctgaagaaagtaattgctgggtcatatggtagttgcacgtttagttttgtaaaaagctgtccaactgtgttccagagggactctaccattttacagtcccatgagcagtatatgagtaatccagtttctctgcattctcaccagcatttggcatttggtggtgtcactatttttattttagtcattcttttctttttgagacaggatcttgctctgtcacccaggctggagtgcagtggtatgattagggttcactgcggccttgaaggcctggcctcaagagatcctctcacttcagcctaccaagtagctaggactacaggcatgcaccaccatgcttggctaattttttaatgctttgtagagatgaggtctcactgtgttgcccaggctggacttgaactcctggcctcaagggatcctccctcctcagcctcccgaagcactgggatttattttagtcattctaatagtgacatttcactgtggttttaatttgcattccctggtggctaatgatgttgaacatgcttctgtatatcttctatgaaatgtctctttatgtatttgacctattttctattttttttttactattgagtattgggagtgtgtgcgtttgtgtgtgtgcgtgtatgtgtgtatatatatgtgtcagattgtgctggaaaatatgttctcccagtgcatagatttttctttcaccctcttaacaggatcttttccagaagaaaagtattaattttgatgagacccaatttctgaatttttacctttattgttcatgcttttggtgtaaagtctaagaactccttgcctgaagttcaatcctaaagattttcttgtttttttcttaagaaaaaaggtatagttttaagttttacatttaaatatgattcattttgagtttaatttttgtattaggagtgaaatgtggattgaatttaattcttttccctgtgattgtccaattattccactatcatttgttgaaaaaaattattctttccttattgaattgatttttttacctttgtcaaaaattatttgggcatatttatgtgagtctgttcctagattctctattcttttccattgatctgtatatctgtttctctgccaatatcatactctcttgattactgtagctatatagtaatctttaatattgggtagagtgattcatttcactttattctctttttcaaagttattttagctaatctagtggctgtgcctttccataaaacttaaaaataagcctgtctatatctacagaaaatccttgttgggattttgagagttatgttaagcctatagagcaaattgtgggagaaccgatatcttttctatgttaagtccattcatgaacatggtatgattctccatttgttagaggctttttaaaatttatttcatcagcattttctaatgttcagccttcaaatcctatgtgttttattacatttatacctgattatttcatttaatttgtattaaattttaaggtttttaaaattgagtatctaatttgtataagccagtcatttttggcctatgatatgacaaaacaatcatctagttttctctcctaccccacaattatttaactaatcttagaaatgattaattgtctttgcattttgggaagagcatcaggtttttaacagtttataaaagtttaatttgtttagtctgtcattggactatttgttttttgttagcttagttatattctgaagaaacacacaatacacataatgacataagaaaaacaagacaaaaccaaactttacttatgaagtgaattgattgtagatgtttttcctccattcatgtgtttcttacatgaatttcttaatagcgtatacctctaagatacaatctatccagtttcacatttgtatgcatatgtgcataaacacttaaacataatccaagtacacatataatctctttgtacatgatgccaaaaggaaagggtgggttttctcaagttggtgaaaagtttgtcagatagtttttccgtttgggagaaatcacaggctattattagccaaggcagtcaatgcccaaaaaattctattgacaaaagatggaaatctactaatcggtttacatttttttgcagatttattttttctctttacacttcttattttttaagttattaaaaaaagcatgttttttgtaacaaatataaatgtttctggctgggcgcagtggctcacgcctgtaatcccagcacttttggaggctgaggctggtggatcacgaggtaaggagatcgagaccatcctggctaacatgatgaaaccccgtctctgctaaaaatacaaaaaattagccgggtgtggtggcgggcgcctgtagtcccagctactcgggaggctgaggcaggagaatggcccgtgaacccgggaggcggagcttacagtgagccgagttcacgccactgcactccagcctgggcgacagagcaagactctatctcaaaataaataaataaataaataaacgtttctgaaatgtatggactaaaacgcaaaaaaaaaaaaaaaaaaaaaattctgatgttggaccctagtccctgccgtcagaaaaaaatgctaatagtttaatgtgcatttttcaaactctttactctgtctgcacacacagaaacatattctcacacacatataaattagttttagaggtaaaatggagtaattcattacatattatacatattatatttaagcagttcataaattcaggcttccgtaggacacatttggtgagcctgtggttcttgcgtaaattatagtggcagttcctttcatattcaaaatattgtggttaatgagataaattatatgatcacacgaattgccctagtccccttttcctcatgttttgactataattctaagtcagtaattaatggctctacctccttaatttaacagctctagcgtactgtttaatatcaatacaccataatctgtttaagcatacccaaattggtggacaaaaatgtttccagtttttgctaataccaattctattacagtaaagaatgtgtgcatctatttttatgtgctcagactaatgtttgtggacgaaacagtcttagaagtgaggtatcaggtaatagcctgcacctttaagtttttttctggttactgccaggatgtctctaagaaggttatataaaatcatacacccactgacagcttatgaaagtccccctcatgtcagattccattctctctgtaaatttcagatgcaaacttctcaacttaagcatttttaaaagaatgcacggtgcacaaatggattattttagttatttcacatggacaaataaagagccactcttcaaggagacgtccacatttataactcagacaggcgctagtccctattttaagtgacctagggcatgtagatatttttggaaggaatgaaaccatgtatatggggactggaatataactgtctagactggttctttcttaagaaaattttaataaaagtgtttgcttaaactgctatgttcaagggtcctgggaggagcttggatgaaatgtcttgtggataaaatttttgatgaaaactgagcatgtttctctttgctcgcttctccctgctcactggcactgtatatttaagccattggtatttttttagaaaagataatatgaaaaggttaaaagttttgtaacacattatacaacatcttttggaaatttctaatagaaatgcttattagagtattttagagtactctgccatttaaacataatcgtataaaaataattgttataatttaattgggttatttactaacacttcagaaacattgtggactcagaaatggatggttttcatgttagttttatttttgaagacaacgtacaaaagttaaaggggcttgtgcctctttattttcggtaggataatggtaggataattaaattgttttttaagaatgaaacaatttgaagcttctgcagagctttgcaatttgcatatacaaagtgaattgctcacttaattcattcagtcccacaagggaaaaaataattaggatacaacctacaaagcaaggcggaaaattaccttttatgtagcagtcttgtttttacttggtaaacataaataaatcatcatctgtaaattaccatcagcaaaagaaagggaaaaattggaaatctgatccttttttttttaaatggcttttgactttgcagcatgtcagaaacatagttgatatccccacaaaatgcagattaattgcataattctgacaggaatatgccagttcctgaagggaatgtgcctttaaaaatcccattgtagtaatctttttgaaacagcagaagaaatttcaacagtttcccgtctagttacaaaataatccatttggaaaattgaattgtgtaatttgcaatggttttccaagttgttaatgcaaaactatatcggtagcaaattaaacatttaaagtatgaccactttgttaattgttggctgttaaacatttatttcaatgaatactatcatttatgatgaataagacatctggagtatggctttaaacagaaaaattaatttggcagtccatttttggaaattcttaattggatggcataaagatttatctgtaatttaggagagtgttgagtatttctttcttttgttggaatcacagtactttgtgtatttgatactcagaaagctagaaaccaagaactgcatagtaattaactatttcttaaatatctccctgcttttttattcctctttattcttacctaggtgaaagtcctaattgctttttgctgttttgtctgcctcgctctcaggacctcctctcctgccctcaggtcccattcccatccttctcatggttaaaggtcaacatgtgtggccaagccagctggacaaggctcaaatccaggaggtgccattctgagagattccatttgagtggtgcttcttatagttgtatgaggcagctgccttgttcattgtccacttttactatatataacatcagcactgttgacattttggttgtgagaggctgtcctgtgcgttgtaggacctttggcagcatccttggccttgaccaaccagatgccagtacatcttctcaattctgacagccaaaaatatcttcagacattgccaagtatctctggggaaggggggtgggcaaaatcttccccagactgaggaccactggcctgtggaatcatctttctagagcataaatatgactgttccatttgcctgcttaagccttttaatttgcactcttcagatcttatgattcaccctaaactcctgagtgcagcgtaccagcccctttaggatctagctctggtccgtctgctccagcctcatgctcatcagtttcctgttgccaacttcctcccatcactcttccctacgttttcatcataccaaactctgttgtcttatgattgcacacgtgtagtttcttttgcctggaagctcatctttgttttctttgcctcataaacccgtgctcatccttcgagacccatgttaggactaacgaggcctaactcagaaatgatggcctctctgacctttttctctatattcatttggtggtttagtaaagagttgttcaattttctgtgtttgaattactgtctcagttattcaccgtctgtatgaacaaattaacctctttatgttgcaacattcttttttttttttttgagacggagtctcgctctgttgcccaggctggagtgcagtggcgcgatcttggctcactgcaagctctgcctcccaggttcatgccattctcctgcctcagcctcccgtgtagctgggactacaggtactcgccaccacgcccggctaattttttgtatttctttagtagagacagggtttcaccatgttagccaggatggtctcgatctcctgacctcgtgatcagcccacctcggcctctcaaagtgctgggattacaggcgtgagccaccgcatccggccgcaacattcttatatgtacaatgggaatacaatagtgccagccagttagattggaaaaaaaattaaatgacatgattgatatgaggtgttcagaacgtaatacctagcatataattaagaaaaaaattaatgtcagccactgccgctattattgttattatgctatcataatatcttttttttaaggttctacaaatggcccacaagcaacgcaggcagcccccttttttttgtaggtcttgggacctttgggaaccatatagatcagattattagatctttccctttgtatgcttctgttgcacttgtgcagacttggtctaaataatcattctctggagttcgcctgcctctgccactagttgggaatggtccaaccatggatgtgttaatgacatcactgtgcctctcagccttcttgcttttacagtgtggatgatgccaatattcacctctggaagtagaactttaacaagcacctactgagggtctaccctgtataaagcatggtttttggcaatgtggatttggtggcaaacacagcagacgaaatcctgaccctactgcagtggggaatagagggaggcagaaaggaatatatataagcaaaatatgtagagtattggtgttactgataaatgccaaagagaaaattaaagcaggaatagaggataggaagtatggaaggagagggttgcagttttaagcagaataatcaggaatggtctcattgagagggtaatatgcaagtcactgatggtagggtgagagtgagccaatggcgtagctagaggaagtgtttccaggcaaaagaagagcaagtgcaaagcccggagcagggagaatgcttgttgggagtgacagaaaaagaccacataaatgaaatggatttcagttgggctttaaagataaaataaagctgggcttttaagataataaagttaggcgaggcgcggtggctcatgcctgtaatcccagcactttgggaggccgaggcaggcagatcatgaggtcaagagatcaagaccatcctggctaatatggtgaaaccccatctctactaaaaatacaaaaaattagctgggtgtggtggcacatgcgtgtattcccagctacttgggaggctgaggcaggagaatcgcttgaatctgggaggcagaggttgcggtgagccaagattgcaccactgtactccagcctgggttatagagggagactccatctcaaaaaaaaaaaaaaaaaaaaaaaggataataacgttggttgtgcgttgacttcatttcagtagagtgtcttccacgtaatgacctctagcatcacaataaggccatgtttgcagagaggtatataggagcttcctgaaagttccaaagagctgcccactagataagcagaacttcagtgtgcagctttaattcttccaactatgcaaacagagccatttcttttagaggaactcagagcgtgtgggaagaacacatgcagttggaatatatcctgagaagagagaatcaaagtttgttcagactgatttttcaggcagtgccatccaacataatcacatgctggagccaaaaagcacatcactgacaaagtagccttctgtcatttcctgcattgctccaggaaaggcgagccggaccgccttccccatctgctgcaagtctctgttgaaggaaggacgctgtgctgcctggggaggttttgaaggcccagctaatgatggaatgcaaatgccgccaaaaggcctgagaagcagagcatcacccatatcccttctcaataggactagatagacacctgtatccacctctgcttggttttcttcatatccttaataagtacagtttgaacttgtggttgtgataacagccagctggctatttctgctgagatacccatgaagagactgacgatgatgtgacattttaatgccactgttcctttcttgaggaagctacctgagtgtgtatagcagctcacctattgacacatctgagttaaaagctgaggatgaggatgtctgtgtgtacaaggactatgtggtgggcactgatgtgagctaaacaggcagagtaaattctaaagagttgaacttgctcatatgactaaattcagtagttacacatttttgaaattaaattgaatagcaatagtgactctagtaataatctggatctctgcagattatattagtgaaaagcattgtggagtagaaacaggaaaaatgtcctcagtcaatgtttatcttgaacctggcaatcatagacatgtgggcttaggaggacaaattgggggattaaaaaaatagtattttgatgcagaggaaagccttagatgaatgctaagactgtttgctgaaatggttgggaaacagtatagtcaggtgatgccaaaacatcacctggctctaatgacaattaggaaaattgctattttactataaacagaaatggcagctacctccaagtgatcaagctgagcctcattcatggagggattttctggcattctttgccttatgaagcgatgccatgtgaagtcctcaacatcacttataaagcattcttaacaaaaatgtttatctgaatctcatcaaacttttaaatgtaacttccattttagaagaagcacagggaatagaaaaattaagggcactgtggaaaaacagacagatctagaacacggaacattctgcaagaaaactaacacgatcttttcaacaggcaggaatcatttacaaaatatggacttttctaaattaaagagactcagagttacaaagaaactcaaggcatgaatcctcatgggattctggattggagtgatggtggacaggcatgggcacacacacctttagaaaacattttggggactttcagggaactttggatatgggatggaagttaagtatatgaggaactattgcctattttcttagttgtgtaaatggctttgaagtgatgtgagacaaccctgttattttatttcatttttgagacagagtctcgctctgtcacccaggctggagtgcagtggtgccatctcagctcactgcaacctccacttcccaggttcaagtgattatcctgcctcagcctcctgagtagctgggacaacaggcacccgccaccatgcctagctaatttttgtatttttagtagaggtggggtttcaccatgttggccaggctggtctcagactcctgacctcaaatgatccacccaccttggcctcccaaggtgctgggattacaggccaactgtgttatttgtaagaaatatttgctggagttgtacagataaactatataatttactttcaaatcatttaaccaaaagcaagtgtgtgcacgtgtgtgaacatgcacatgcatgtgaacactcattacatttatatataaagagaggataaatccaaaaataaaagtagcgaatcttaataattgttcatcctaagtagaggatacattagtgtttgttgcatcattcttttagtttttccatatttgaaaatcttaaaaataaaattttggaaaagaaaatcatgaacacagagttcctggagaaacgatcagaggcagaaaacaaagaataccttttaaaaaaatgaagcatgaaaagaattagaaagaataaaagaggactgaaaatattcccaaaatgtcagtcataataattagtttaaattgatttaacatctatatcaaaagacgatgccttagattggataaaagtataataatccaacttcgtatttcttaaaatcagttatatgtttctataagagatacatataagatgaaagcaaataaaaatttaaaataaattttaaataaataaaatggtcattcacatagaagactactgctcagaagccaaaacttcttatatcttcaactgcaaagatgaatctcacagacatgatattggacgaatgaatccagacacacacacaaaaatatgatattctatttatataaaaagtttttaaaagaaggaataatcaatggtgatagaggtcagaatggtagttttatatgtgggccataatgaccaggaaggggtggaattgactgaaattctttttatatgttcctctatatggttaccacacagttgtgtaacgagtgaagattcactgaactgcggtcttgagatttctgttctttactatatgtgctttgccacaggacctggcatgccgattcctatgctgtgtgtcttaaatttcatttgagtggcagcctgcgtgggctttaaaccatggtgccatatgtacccacataaaaccaagtggttttgagaagctgagttttctttcacatcttaaagtccaagtaggaaagatgagtttagttcaggctgccttcttttgaattgacaagtactttatttttacttagaaattaagatttgcattcgttttttcgcatttccaagtggtgtacttttaaagatgcagtttatgattttcagaaatattctttaacatatttgtctctaagaccatttgcatctttaattttattcatttgctcatttactgagcctgtcagggattcattcatatgttattatttgatttttaaggaacacttgctgtggagagtagtattaggaaaaacatacttgttttagaagctggaagttctagatttgagtatggctccatcccctcctttctatgaaattataattaagttacttctttgattttcactttattgatccttgtaatgggtttaataatagtttaccaaggatgttatatcatccagagaatttagtatcactttaaaatcattcagtattctgtgtttgattaaagtgaataggcttctttcttgagaagtagatttataattgttactattgggaagaggattcgagtggaattcatttctttatttccttatactagctccgcatccatataatgggtcagtgtgttagatttcctttgaaaattaaaaagaaaaaatgattcaactgctaaaataaaactgatagccaatgttctagtacagtttcctgattattaggaatttggctaggaaatctggtcttcatacaagaagcaatattgttacacaatgggatttgagagaaaactctatgaaaatccttggccaaaaggaaatcaaacagagggtgtattagccaatgtctgctgtggcaataattccaaaatcttaacagtttacagcaacacatctttatctctcactcttgttacatgaggggtctggattgattggctgtgagtgtactgaatgcatctcaactcagctgaggttcacctgtgttcagaaatccaggaaggagggcaatgttgttctcatggtggagagttgaagctcaaggagggagggactgacctaattacatgcacttaaagcacattaactcacactgtattggccaaagcaagttgcatggccaagtccaaagtcataggaaacagttgcaagggctgagagggaatgaatgattcttgatagataactcaatctaggacaaaaaatgaaggttgctgtgagctgcagaatgtgcctttggtttgatttacatatccccaaatcctagggagagaatcatttttgccaaactttatctttactgaatcttttccaacctccaggatcacaagtatacttcatgcattaaaaaccttcccaaagttcattatcttttaccactatgtgctgtgaattctgaggtagcctatgataatttctgtaagaaattacttcaggatgtcaaaaatcagattaaatatagaattaagctgggattttgaaatttaatacccatttttttgagaaaatcaagtatttcaaaggtcctaatactgacatttttagtaagccgtatagacacttccggtcttctttgatagctacaaattttagctccatttcaagagaaagaactctggaacctaagcctaaatatatcctgaaaaaagaaaagaaagttgaggaattgagaagagtcaaatgattaatttgaaggagtaaccaggcaggtaacagcccagaaaatacacagaagttattttgattttctaacttggcctgctgttgttttggcagaaagatcgtgtgcaaggatatctaaaaataaataactctatttacataccatttttaataataaaatttgacttctcttcttttctgttatcaaaactctttctgttagtaatgaaaatttataattgcatctcctttagaaaatttataattgtgtctcctgtttcgttgcaacagctattttgtcctttaaatcataattctcagacatatttcaggtttcagtcatggagcttgaaatgctttattttctttgttgcttgcggaatacaatcatgaaatgggcaaaaaagcacaaggaaaacaaatggccctattgagatgagtggtctttaagatatcaaatgggaatcagatcatcacccagtttctgttaaaatctattgtcattcctctgctaagcaaatgagacttgttctgggtgattatatgacattattgtttgtatgctgtactgttgactcagtaggaaattatatgaagaaaagtcaatttcatagcagtagtattagattaacagtatctttcctgacttttaggcatttgtcatttatttattattttttgccataatcagtatcatctttactcttacgaatattttgttttaaatcaggttggtttttgtttaaataaatttacaataagagaaaacttttcttattaccatattaccattaatacaagaacagtatcacttgccatgaatagaaattaacttaataaaaaaatacaatggatagaaaataatattttaaaattctgagtatcttttgctgcctaaaagttgtgtgtgtgcttgtgtgtgtgtgtgtgttggcagggggtgaggcacagtggttaaagaacacataacataagacttacccacttaacaaactcttaagtgtacagtgcagtattgttaattacatgtacattgttttatagcagatctctagggcttttttaaatcacgtgtgactagaattctatattcgttaaacagcaacctcccattcccctctccctgcagtccctggaaaccaccatcctattttctgtttctatgagttcagctactttagataacctcatataagtggtaaccatgcagtatttgtcctttcgtgattgtcttcacatagcataatgttttcaaggttcatccgtgttggagcatatgacagaatttccttcttttttagggtgggataatagtatatggtatatgtatacattttctttttttatatatatatactttaagttctggggtacatgtgcagaatgtgcagttttgttacatagtatacacgtggtgtggtggttggctgcacccatcaacctgtcacctaccttaggtatttctcctaatgctatccctcccctagccctccatcccccgacaggccctggtgtgtgatgttcccctccctgtgtccatgtgttagccttgttcacctcccacttaggagtgagaacatgcggtgtttggttttctttcttgtgacagtttgctgagaataatggtttccagcttcatccatgtcccttcaaaagacatgaactcatccttttttatggctgcataatattgcatggtgtatatgttccacacacaactttacaagaaaaaaacaagcaaccccatcaaaaagtgggcaaagaatatgaagagacaccacattttctttatccatttatctgtcaatggataattaggttatttccctgttttgactattgtaaataatgctgccataaacatggaagtgaaaagatctcttcaagaccttgttttcaatttttttgaataaatactcagaagtaggattactgaatcatatagtagttctgtttctaattttttgaggaacctccacactctttccctaagtggctgcacctttttacattcccatcgagagcacacaaagtttccaatgtctccacatccttgctaacacttgttatcttttaggtctgtggggttgtttttttctgataatagccatcctaagagataggaggatgtggttatggttttcatttgcctttttctgatgattagtgatgttgagaatcttctgatatatccattggtcagtgtatgtcttctgtggagaaatgtctatctttgaatagacatttgcccattttaaaattggcttatttatttttacttttattatttttgctattgagttatacgaatttcttatatattttggctattaaccctttatcaaggatatggtttgcagatatttttctcatgctataggttgccttttcactctgttgattgtttcttttctatgtataaactttttagtttgatgtagtcctacttgtctatttttgctttcattgcctgtgtttttggtctcatatccaagaaatcactgtcaagaccactgtcataaagccttttccctctgttttattctaggagttttatagtttcaggtcttacatttaagtctctaatccattttgaattgattttttgtttatggtgaagtaagggtacaatttcattatttttcatatggatatacagattttgtagcatcatttgttgaaaagcctatcattttcctgttgtataaacttggcacccttgtgaaagaccattttattgtataagcatcaatttatttccaggttctctttctgttccatgtgtctgtatgtttgcctatgtgccagtaccatattatttagattattgtagctttgtagtatattttgaagcaactctggctttgttcttttatgttgattgttttgactatataaggttctttgtgttttcatatgaattttagctttgcttttcctatttctgaaaaaaaaaaaagctcctgggattttgatagagattacattgaatctgtagatcattttagattgtatgttaagtcttttttttaacaatgttaattttaacaatgttaagtctttcaatctatgaaaacaggatgcctttcaatttatctgtgtcttttaaaatgaatttcttcagtgttttctagttttcagtgtacaaatatttcatccacttggttatatttattcctaaatattttgggttttttgatgcaatagtaagtgagataattttcttaattttcttttgggattgtttattgttagtgtatagaaatacaactgattttttatgttgattttgtatcgtgccattttactgaatttgtttatttgttctaactttttttgtgtgtagatagaatctttagggttttctacatataaaattatgtcatcaacaaatggagataattttacttcttctcttcagatattgatgccttttacttctctttcttgtctaattgctctagctaggaattctattaccttgttgaataaatgtggtgatagttggcaccttttgacttgctcctgatcttaggaaaaaaaaatgttttcatttttcaccattgagtatatggtcttcatcatgttgaagtaatttttttctactcccattttgttgagtgtttttatcatgaaatgtattgaaatttgtcaaatgccttttctgcatctgttgaggtgatgatatacttttcatcctttcttctgttaatgtggtgtatccatcttgctatgtagaacccttgtatctgagagataaaccccactagatcatgatatattatccatttaatatgctgctgaattcagtttgctagtattttattgagaaatttgcatgtatattcatcagtgatattggccagtatttttcttttcttgtagtgtctatatctggctttggtatcacagtaatgttggtctcacagaatgaatttggaagcgttccttcctcttcagtttttttgaagaggttgagaagaatttgcattaattcttctttaaatgttttgtggaatacaccaacatttcttccaacaaagaaatacacaaaaagccatctgatcatgtgtatttctttgttggaagatttatgattaattattgaatcccttaatagttacaggtttgttccaagtttctatttcttcatgattcagtctacgtaggttgtatgtttccagaaatttatctacctcttctaggttatccaagctgttgactttttcttggtgtatcatcattcatggtagtctcataatccttttcatttctgtggcatcagaagtagtatctcctttcatttctgattagactccacttattttccttaacctagctatttgtcagtttcattgatctttcaaaaaccaattcttggtttcactggtttttcctagtgcttttctattctccatttcatttagttctaatctaatttttattatttcctttcttcttattattttgggcatagtttgctctgtttctagttccttggggtgtaaatttaggttgtttacttgaggtatctcttcttttttaatgtaggaatttaccattataatcttcttttttagtattgcttttgctacctcacacaaatttcggtatgctgtgtatttgttttcattcagctcagggtattttccaaattcccttttgattccttctttgatctattggttgtttaagattgtgctgtttaatttccacatactgtgattttttttcagttttccttctgttattgttttttagttttattccgtggtggttgggaaagatacttaattctgttattattttttagttttattctattgtggtaaggaaagatacttcaatttgtcaagacttgttttgttacctaacacatgatctatcctatgtgcacttaataagaaagtgtattctgctgctattgactgtatttgtccgttaagtttaattggtcttcagtgttgttcaagcactctgttttctttcttatataatctttggatgtcctatccattattgaaagtggggtattgaaatctcctactattattgtgttgctttctctttctctcttcaattctatcaatcaatgtttacttcatatatttggttgctctggtatgggatacatatatattataattgctatatcttactagttaattcatctttttttcattatagtgtccttctttgtctctcatgatagtttttgacttaaagcctatttaatctgatataagtattgccacccctactcttcttttgactgctgtttctatgggttatctttttccattttttcactctcagcctatgtgtgtccttaaatctaaagtgagtctcttgtagacagcatatcgttggacctggtttttaatttatcttttgatagggcagtttaagctatctccatttaaagtaattactgcaccaggcatagtggctcatacctgtaatcctagcactttgggaggctgaggcgagtggatcacttgaggtcccaacatggcaaaaccttgtctctactaaaaatacaaaaaaaaaaaaaaattagtcgagcacggtggtgcacacctatagtctcagctgctcagaaggctgaggcaggagaattgcttgaacccaggaggcagaggttagctgagatcacaccactgtgcacaagcctgggtgacagagtgagcctctgtttaaaaaataataataaataaataataaaaataaataaatattgataggaaatgattacttttatcattttattgttttctgtatttcttgtagctcttttgtccttatctttttctcttgctgtcgtatttgtgatttaaaaaattctttagggtcatattttgattccttcctcattttcttttgtgtgtctcttataggtatttcttttctggttgctgtggggcttatataacacattttatagttatgatcatctattttaagatgataacaacttgacttcaatcacatacaaaagctgaactattccaccagactcctttatgttatcattgtaacaaatttcatctttttattatgtatccattaacataattttatagtttttatacttttatctttttacttctatatcaaaattaaaagctgtttatacaatattcgtaacattacatgtaatgtaatgttatagtactataatatgtatttgtgtgtttgtatatatgtatatatactataatatatatttgtatgtgtgtgtatatatatatagtactataatatgtactcgtgtgtgtgtgtatatatatatacactataatatgtgtgtgtgtatatatatctagatatacacacacacacacacacacacaccttttccagtaaattatatattttcatttgctttcatgttactatctggtgtcctttcatttcaacttgaagaacttcctttagcatttcttataaggcagatttctttgtaagaggactattatgtcttgccttggttttctcatttgcaaaatagaatgatagtggaaataaatacatctttgaaaagttttatgtgacttgtaaatatctctgcaaaatttagttatcataagtattactttactttattactaaattactaaattattactatactttagcatgtgtattgaggaagtttccattatcacattatgaattagtgtagattgcaaggcttgtgtgtgttgtgtatgtgtgtgtgttgtgtgtgtgtgtgcacatgcccactaggtgtagttctgaggtagagacagagaccgttgctttaaaatttgattgtcctttgacccataaaattatgaccctggctgctctgggaatggtcatttgcttctcctgagcgggggtgttcagttgctgatttcctaaaccaatttcctaaatgggtaattgtgttctgactcatacaattccccctacatttcctgactatttcaggtgactatctcttcctctttgcccttaatggataggtaatgaagtcacatgtttcaaagtcattgctgtgtttcaggctggggtggactactcttacataatgtctcactagagagtcagaataaagttggcacacgtgctctacctccacctcaatttttaaccatgttgaaaagaaagaagtcttaaaatgagaggtggctttcaggggctaaagagcctctggttgaaagtgtttagttagtcattagtgtttcagatgcattaaaagcacaggctttagggttagtttgcttcattttttaagctgtgaacttggttgtatgactttaacctttcgcagtctagtttcctcatctgtgaaaaaggtgataatagtaatatttatttcacagagcttttatgaagatcaaatgagatagtctctataaaaatgctggccgggtgcagtggctcacgcctataatcccagcactttgggaggctgaggcgggcagatcacctgaggtcaggagtttgagaccagcctggccaaaatggtgaaaccctgtctctactaaaaatacaaaaaaattagctgagtgtggtggtgggcgcctgtaattccagctactcgggaggctgaagcaggagaatcgcttgaacctgggaggtggaggttgcagtgagctgagatcagcgtgggcaacagagaaagactccatctcaaacaacaacaataaactaggcacgttatgtggcatatgtgtggggaccaatgcatgttggcatcagtatgattgttttcattgattcagcccttcagtaagtcattgctggcaactcaagtctagctgggtgctgcagagagacaacaaataatacagtagagcttcatgcagcatttatgagaatagagagaagagaaatgttagttgacactaaggccagggcacatttcctagaggaagtggaccttgggggaaaagtgaaatttccctggagaaaagaagcaggaaagagaggcatttgccttctagaagcaccatacaagtaaatttatgggtgagttgggtctttcattcatatagtccacttataattattgagttctcaatatgtgaggggttctgtgtttgactcagggagcacaatgatgagcagagcaaaaacaaaacaaaacaaaaactattcctgccctatgtaactctcacttttcaggcaagatgggtgtgaaaccaataacaaataggaaaggtataggacatcattggatggtgtagccttgagactgactaggtgttaggatgggaggtgtccagtggggcctctgtgggtaactgagatttaaactgagacccatgtgggaatgggagtgaggtaaggagagatagagaaggccctgtgccaggagaaccacagtgtcttctgggaactgaacaaagtccacggtggctgagacatagagcacatgggaaaggtatagagaggacagtggtgagatagcgtgggcaagaccacagggggtcttggtggtcattctaaggatgcaggcttttgtcccacgtgcaatgggaagtcactgaagtgttctgtttatgcacagtaatatttcaagacttatgttttgaaaaaaaaatctgctatgtgcagcatgcattaatggggattaaaatggaagtggaaagatcaataagtagttgtgacaagatgatagtggcttgaattggggtagtggcaaaaaataaaaataaacaaacacatcaacagttgtatctggtgagtcctgaggcacttggtgtagttggagaataagatacatggtgctgagtcactgacgtgatcggtttgggcactttttgaggagaagtggtgtgacatttcatgctaagaaatttgcatttatactatgaaaagggctgatggagattaagaagcagagaaatgaaataatcagattagtgttgtgcatggaggatatttatttcacttcccacctactgcttgagctaagcatttattgaatttagagtaacagacgagagaaacggaacaacatcattgcaggcaaagattgatggaaagtggattcttttgtataacagcacaaaagagatatatgaaagggaggttaaacttgtcagtgtgaaaagctattgatcttgtaaatacttaccctgaagccacctaaggcttcgctcaggcatgacccaaatattccaaacctccaatgcagctgaggatgcggatgtaactggatgagagatgaccactgtggaaatataatgagccaagacactttgtgggaagggaggggtttacaaaagtgttaaaggagccaaggaattatgggagagagggaggagagagagaacgtctagtggggatggctttcctccctgctaggaagaaggcgccactgggtagtgttctcagagcctaaaacagaggccctgtaaccactgaggagctaggagtaagttagagacagtgggaaaatatttggaaaaccaaattcattatgtactttctatgatttggacctcaagtcaggggtcgtttctgagactcttgacgctgtatctctgactggtaaagagtgaaataatctagttatgaattggaccactcttccttcccttcccttccttgggttgatgtatttaagacacttacatggggaatactctgaagggatggaatatttggaggcttttgcagccagctgagaaagaaggctgtccacagagaccgaaacagacataagaactattggtcaagtggagtctttgggaggatttgaaaaactaaagaaaaaagaaaaaccaaaatgttctacctctgtgaagttttaagcttgttccacttaatacgtttcagaaaatttaataaggaaagataatttgttaaccatccttgcggtgtgttacagataatactaaactcacttaaatacatcttagctttcagatgtagatactttttcaacaggttgtgctcagctgtgctgtgccatactgatttccgggcctcacctttggtgttgtatactggagacattcattcagggagtgtgtcaaacttctaattgttcattttcaggttacagaactcaataatgtgaagaacgtagctcgattgccaaaaagcaccaagaaacatgccatagggatttatttcaatgacgatacctccaagacttttgcttgcgaatcaggtttgtctcaggcagggctggggggcttttgcttttagattctgaatggatgctgggcacacagtttaatctttttgacatttccacagatcttgaggctgatgagtggtgcaaagtactccagatggagtgtgtaggaacacggatcaatgacatcagccttggagagcctgacttactggccactggggttgagagagaacagagtggtatgtaaagaaaattctctcctctctctttcaaaactgcttctgtctccatatgataaaacataagacatcttcattatgtaaagtttttggggtataaaaatgtataaagaaataagtaatcttttatctaatccacaacctgtgttaacatttcagtgtatttttttcttattctttttccaattcataacatgaatgtatctacattaataatatcagttagaaattttggggaacctgctatgtgccagtttggtggaagatgcttaactcatctcagattatttattgtacttttcatagcagccctatggtgtaggtataattacttcctacgttttgcagatgaggaaactaaaatttagaggacgtaaagactttccttcaattctgttagctcactagtgtttgattctagacgataccgttggacctatattacagtttacagattttaaaatgtcatgggcattttttggtcatgcctttttcacttaaaatgttatcaacaactttccaatgttttcaatataattcaaactttatgactatttcaccaaatttaaacccatctaaaatctgtaattaaaaaaatacatattttattgaaacacttgagccaactctgagctcagcagtcaatctgggaatcaataatttaaaataataatgactaaaatattcatgaacacttcagcaaaaatcagtgttgatttacagaacaaacctggatgtgaggaatcattcctttgtctcctaacagctgagcctggggacggggtagatcagatcacagagttctgctgtaggctgacttgatctatgagggcatgtcaccatggaaaggtctgtgggtcatctggtttgattacggacatggcagagatggaattgtactgactttttctgtaggtgcacactccaatgttagtaaaaaaaatgctgtccctcccaattggaactatgtcttcatgacacatttacaatctgtgactctttggatgcaccatatctgccataacccatctccatggaaatgttattgaccgagacctagaagccctgggtaattcagaggagcctctttgtagattggaaaattgagctacagagaggttaagtcattgacggggttacacaaccaatccccaggctcctccttctctggttcactaaatcaggacaccccaggcagagaggatacctaggagccaagcataaagaaaacctggcaggttttgattatgattcattttttcacctagagtgctcagatcagcacttttcacaaatttgtatttggggaagcagtatcctgacagcaccacaatctgaatttaaaaattggcggtgcgtaggagatacctttcccacagcagctttctgtgcctcagtttcctcttctgttaaatggaaataatagctctggtctacaagtatcagggattattataaattcaactgtgtcctctcaggccctttccaatgttaattagtatgacttcaaatgattgtaattaaaatggtcactccaccattattgctattactctttttaaatttttattattattttttccctatctctcccctattgttattcttgagtgaggtaggactcagagaacttctaagcaaatagattgataatgatctctcttactttttacttaatatagacagtctttcttacttggaactttcaaggggggggaatatgctcaattagaatacatttttaaatatgattactagaaatcaacaaatatttgtttattgagaatatgaaataattaaaaatttttgaatagtagatcgcggaacacatttcatgaacactatctcagcattactatttactaaattcaactaaaatctatgaaaattcaaatgactatcttatcataaaacaatgtatttagaataccactaatataaaattgttaatgccacattgtcgtatgtaggcaatctaccataatgatgcataggtggaaatatgtttgctatagtaatatttttgttcatttttcactgaaagactttgactcaaaaacttcttaatgaattttccagaaatataacagaaatatggtgactgtatctgcagggatgaaaattaggttaatcagccaagcagtttatgtagaataattttggttgcattttagcaatcatccaaatatgcaatgaatatttctttccactatttggctaaaggaagttctttgttgaaactagttcaaatatatgcattggcattttcccaaattgttggccagttaagtgcatagtattactgtggcattttgtttaaatgattgaaatacagttttattcatttagttatagaaattacaagttgatcaatataactttaataacatggaaccatgacataattgttttgcacctgcatcttttgtgagcacaaaagtgtggatctagttaatgtgttcttggcaggaaaaaaaaattgcttttaatggttgtattgctttagtcttttattggcatatacatttttattatgcaaatttaaaaattctaaaaatggtcttcgctcatgtaaatagtgcttagtgtatgttgacaggctgtatcattattatgttatttaataggatctgcatttaagaaattattttctgggactgttaattaataggaaaggtttatctttctgaatatgcaaccgaaatctagaatgtgaacttgaattgtttttaaatgcctctatgttcctacaatgtctttgatgttttattcctggggattttagactaaccttttgtttttctcccagagagattcaatgtgtatttgatgccatctcctaacttagatgtacatggcgaatgtgccttgcagattacatatgagtatatctgtctttgggacgtccagaatcccagagtcaaactcatctcttggccgctaagcgccctgcggcggtatggacgtgatactacgtggttcacttttgaggcagggaggtgagtttaatgacttttaatgactatttttctgtttgtgtgtgtgtgtgttcatttttaccatgctcgcatcatatgaggcggtaggtttacatatgagatccagctgaagtacacttgaggaaattcatagagttgcgattacataatatgaggggtcttgtgaaatatttatatactcaacatggcttttctcccctgtggaagattttaatgtttcacacacatggtacaaattttcattacacagtttgattccatatcacaaactgaagttgatccaggtaaaaatgttaaaaaggtaccatttcctgggtcaagctgaacagaggccagcttcttgattttggaaaacttccatattattatttcacatatgtttcctcatctgagctaactgtggtagattattaatatgagggcccatggagtttttaccagctgcaatttcttgagttccatctatttggcttacagtgtaaggattctcatgaatactgaaagagattaatgctaaaacttgctctttgtgataccgactaagcactttccgggttttctctttttcctcttaggggttaatctgggagagattaaccagatagtatagtaaccaagccagtagtatatggattggttgctacctacaaaaagattcctctagccataatcctattttccttgtccttcagttttccctcagaatttaggcttcgtttgggaacactgcaggtaattttttttttttttttgagatggagtctcgctctgtcacccaggctggagtgtaggtggcacagtctcggctcactgcaagctccgcctcccgggttcacgccattctcctgcctcagcctcctgagtagctgggactacaggtgcccgccaccacgcctcgctaatttttttgtattttcagtagagatggggtttcaccgtgttagccaggatggtctcgatctcctgacctcgcgcttcggccttccaaagtgctgggattaccggcgtgagccaccacgcccggccagataaattttctattttagaattttaaatgcctaaattttaagaaatataagttcttctgtatatggcctgacattacactcaaattgaaaaccattaacttgtgatgttaaataaaaattgcttgtaaaagcagacagttattcctgacaggaatatgactcttgatataaggaaagtaaaaactgaagttctaaataccccaatccatgtgaatggataacagtagtggtcccctctaactaatctgttaattccattttaatgaacaaagcccaattatttaaaatttacattttacctgtagtcccagctactcagatggctgaggcaggagaatggcgtgaacctgggagatggagcttgcagtgggctgagatcacccactgcactccagcctgggtgacagagcgagactctgtctcccagaaaaaaaaaaaaattacattttaaataatcaaagcccaattatttaaaatttacatttcagaaatatgatcactttgatgttcttacaactgtctgcaaagttttttactttatacttttcatacagttcttttctggtctattttatttttaagtacctagaaacaagttggtgaatctttcaaagactataaaagttatcacaaaaaataaacctttaatgttgagagcaatgttcttattttgtgagaattacttatttattcttcttataagaaaatcccaggccaggacggtggcttatgcctgtaatccaagcacttcgggaggccaacacaggaggattgcttgagcccaggaatttgagagcaggctgggaaacacagggagaccccatctctccaaaatgtttctgttataaaaacacatgcacatgtatgttcatcaaagcactattcacaataacaaagacatggaatcaacccaaatgctcatcgatgatagactggataaagaaaatgtagtacatatataccatggaacactatgcagccataaaaaagaatgaatcacgtcctttgcagggacatggatggagctggaggcctaattccttagcaaaccaatataggaacagaaaactaaatactgcatgttctcacttataagtgggagttaaatcatgagaacatatggatacatagaagggaacaacacatatggggcctatctgagggtggaggatggggaagggagaggatcaggaaaaataaataatggatactaagcttaatacctgcatgatgaaacaatctgtacaataagtcaccacgacacaaatttacctatgtaacaaacctgtacatcctgcacaggtacccatgaacttaaaacaaaagttttttaaaaaagaaaataagaatacctattcatcattgggtatattgtacaaaaaataaaagcaaattaaatgaaaaaaaaattagccaggcatagtggcacacacctgtggtctcagctactccagagactgaggtgggaggatcacttgagcctgggaggtcgaggctacagtgagctatgatcttgccaatacactccagcctggggcgacagagtggaccttgtctcaaaagaaaacaacaatgacaaaagaaaatccctatagaaaatgaataattttttttggtaaggttggtatatttttccctttgggtctcagaaattatttatgcattaacgataaccagtgaaatctaagtattgaaaatgttttataaatagacttttctatgactgtacctctcatatcatctccattcatatttcatattgatgtgtaagagaattctgcattgatcaagactctttggatctgttttgggcagcacttattcaattattaatattttaaaatctttttttatttaccatttacaggaaatagtagtagaaaaaaagtatagctttttatggtaatgtttgaggatcaaaaccttagtaaactttattagtatctcatatctattttaaacttgaaaacatgttatcttattaattttccaggtataaaatgaacactgtacatatcctgcaaacgtttaatttattcatattgaaatctaacggaactgctaaggatttaggtgattacttaaaagacctcgatatttctcctaagtgctgtaggaaaccatagatacttggaggctggtatgtttgagtctctgtgtgtgtatgagatgtgtgtatatggggtgtgtgtgtatgtgatgtaattgtgttaatagtttataaagggctgggcgtggtggctcatgcctgtaatcccagcactttgggaggccaaggcgggcagatcacgaggtcaggagatcgagaccatcctggctaacacggtgaaaccccatctctactaaaaatacaaaaaattagccgggcgtggtagtgggcacctgtggtcccagctactcgggaggctgaggcaggagaatgcgtgaacccgggaggcggagcttgcagtgagctgagatcctgccactgcactccagcctgggtgacacagcgagactccatttaaaaaaaaaaagtttataaaggtcactttgatcacattgtgcacggtaggatagaggagataggtatggatgtgggagatattgaaccagttcaagtgaaacaatggtggatgaaaagatatatgggtgacaaagttgagaactatttcaatggtctttaccaacatgctgacttggaagatataagtgttttatcccatgactttgatgacccctttatggtccatccatttgcttatttcatccaagaactccactggttagatgattataatattcacaacccaggccactcaatgttatatctccaatatcgtagggacatagaatatttattgattttgaatagcattatttcttatgcattggtcatgttttgcagggctggtgcaaacttgagattgaatggtcagaaaggaaagtgtgggagttgtatgcttagcatcttacttctcaaacagcttggtgtagtatacaaagtactgattcagaatttagagagaccctgagtaatctctattttttgctagctgctaaccttggacaaagttcttaactttccttgtaagttgatcagagtaataactttcttgcaggtttgttgtaggtaaaggcagaaatgcatgtagatgacctggaaggatgctgggcttctcctaaatagtatctttggtattctattatgattacttttggagcagaacataagcttgcaggatagtgttaaatgcaaggtaaaattactattttatattttgcttgaaactcaaataaagataaatttttatacttaccatcaagatgctcaggataataagatcattcgtgttccacaccaagcgtgaaggtttcatgtctgccttgctttattagtgaagataagttttttccttggctatttttggatgtgttgaaacaaagcagttttatatcaaccagtataattttccccttctctcacatcgagaagtgagcaggagttgtctgtctaagcaagtagttttcacatatccaacatgcatctgcaaaaacttaacaatatcctctagaacacagggaatctttcttggacaaagttctgctcatgttcagcctctctcttagaactagaactgagtgttattcctgctcagtggctccgtttcaccccaccaaagctgacagtggggcatgtgtaacagactgaactggaagttggaggaaatgaagtaaaattacagttctatcacatactggctgtgggaacgtggatatgtcacttaactcaccgagctttttttcattgccacctgtaaattgggaacacatatattacttatctcaaaagattgctatgaagattaaataaaggcacatgtaaagacacctggaatagtgcctgaatgtagtaggcagttgtatccacccaaactagtactgaaaagaaactcattgacttccataaactcaaagtctgaggagtaaagatggcttcaggcttggcttggctcagtgtccaaatgataatcccaggttttatgtgacagttctgtttcttctaaaatagcttcattctagctccatatggtgactttcagaagctttgagatctccccacactatctcagtaaaagagagatatattactactctctgctgtcattatatatactatgtgtcaagcactgcactttacacaaagctcacagggtacaaatgcaatgaggttggttcactgaaggcaggaagagggtactgttgctatcagaagaggagtggaggtgaggcttttaaaaactaacaaaatatgtacaatatagcatttaataattgctcaaaacaaataaggtcaagaggctatttgactgtaattgacatttgcactcacaatagtgccgatttccagagcagtggttcttagctagaggtgattttgctcctaagggacatttgataatgtctggagacatttttgattgtcacaacctgggcagggggtgttactggcatctagtgcataaaagggccagagatgctgctacaggcacagaatagtccttgacaacaaaggattatcaggtctaatcatgtggttgagaaaccctactctagcaggtgtatgagccattgaaaatcatcactaccatttactgagcccttactatatgaaagcctctgtactaagaggctcattacctcatttgagctactcattatcatacaaactaggggatacagttatttccctcttaaaatgaaacctgggcaatggcaagaggtccgaagacacaaagctgataaattcaggactcacgctcagatcttttacttccaaactccatagatttttaagaaggctcaccttctactggaggttagcctagttcttagttaacttctgcagagctaagggagagaaagcatcttttacttccaaactccatagatttctaagaaggctcaccttctactggaggttagcctggttcttagttaacttctgcagagctaagggagagaaagcatgcttacataaccaaagcttgctaaatccattttggatgatcttgtgagcatattatcctttcccactgaagctgcctcaatgtgaggaaggcatctgtcaataagccacagacttgcaaagatgctggtgatgtaaatatgcctcctgagctgcgcactggggtataaatgttcttagtttgacttgactttttggaaccccctgtatgttctcttagtttggagtgtaggcacatacatctttccagggcagcactatgtggatcataggtcattagggtcttctgcacagtgtttttctccttctcctcctggtatcataaaatctgaccatattctctattttttgaggaaattcagaattagaatataacattttttaataagatgaaattgcacaattaattacccttggagacagagaataattagtttatcttgggggctaatggacatattgcttattttgtttgaagttttcttagtcttttgtttgtttctttccacttcaaagccctgaaacctcacggcacatcagactggcaggggcactaattttttatgggaagatccaattgacatgaagttctaactgcagcaaaatctcccttggaaccattcttgcaatgtgattgtgtagagaagggtggcaggtgtccagtccctttctctgttaactgtacagcttgctgctgagttagcatgcttcaatgtcagacttgccttacatcctgactgatttaaattaataccctgggtttcgcacctgcaggagccagagaagctcaggtgacatttggcagaacgtactaaataattaccgcacatgagtgcctttctttaccagctggagagagtctctcttgtgcttttgacatcgttttaagagaaacttttaggtatgccaaaaatatgtgaaaatccaaattgcatatacaaatacttttccttaaatggagttcacaagcggtttttgaaaaagatttttatttatttggatatgaaggcatctgaacagctttagaaaataatttgtttttttgtatatttcaccctaaaaccagcctaattggtgaaataacttttcattcaagaaaaaaactgtttactcctttaattggtgagtttacaggtaaaatgacaattgttttgatagcttatgaatattttctatttatttgaatatttgaaatatatgtgtatttgcatatttgaaagctacatattcccaatttatcttcttaggtagcttcttagtaatctctcatttctgaatgttttacagagcatacacttatccttattgaagaatttaaagcaagtaagcaatccagtatgctgagctcccccaactatgttgagtatgacaattagaatacaaatgtgctggatctaacacaagtttgctcaggagaagtaaagtcctcttcttttgtaagaaaaagggaacaaacattgtgtcatttaaatggccacttgttattcattagcattttcctcaaaaataattttaattacaaagataatgcacacattataaatattccaatagtagaggcatgtatgaaatcagaagggagcattctcttttctactccacggagtaacctctttaataatcatcttaatagatgtttcattattgcatgtctactgtctaccacacagtgtgctaagtgagaggtatgaagacaaacaagacaaggccaccattctaagaggcttagctagatcctatccacctctgagcttctgtgattttattaaatagcatgcaaaattcttgaaagaaaggatgacttttttctgacctttgaggcaaaattaggcactcagcaacataccttgtctgtggccatctttaatgtaggtgatggcccactggtgtttgtgattactttatatgagatggtgttttggaattctagaaagggctagtaaaaaagaatcattccttcctttatgcaatattcacctagtgcaccctaatgcctggtgtggttttaagcactgcagatgtagcagtgaaaacaacatacaacttactcaacagaagagagagatatagacaatgatgaacattttaaaaggtaaaatagatgttagattgagtcccacagtgaaaaataaagtagggaaggatgatagacagtgccaaagaaggggtgcaattttaaagagagtgagcaggactggctttactgagtacgtaatcttaagaggtgagagtgtgagccatgtaagaatctgggggaagagcattccttccagaaggaagatggaagaagatgctgaagaggaagtattcaaagaagagccaggaggttgatgtgtctgagcagaatcaatggatgggaagccacatgacacaggtggagatgcagcggggtcaggccatgtggagcttgaaggtggttgtgaagaatttggcttttagtcttagtctgatggggagccctcaggggctgtgtagagttggacaactacagagtttgagcaagtccccaagatggctctcacttctgacaccaactgcaagttcatgggtttctaaaactaccctaagatttagtaagtcactaaaatgactcccagaactcaccaaaagctattaaacacacagttatggtttatcacagcagggcatatagattgaaatcaagcaagcaaagaagtgcatgggaggatggagtccagagaagtaccaattgtggagcttctgttatcttctccctgtggaatccaggcatgctgctttcctcctgcctgcatgtgacattacacatggagcattgcctacctacatgcccctaagccaccactcacaaagattttactgggctccagtatgtacgtgtgattgattgattgattggtggatctcagtctccaggctgactgatatcacatgacctgaagccgttatcttgagttatattgttcctgtctagctcaagttttccaggcaggcaaacattaccttgcaggagatcctagcaaagggctatttttagatgaggttaaattcttctctatgctggaggtgttaggcaaagaagtgacataatcttttttttctttaagactttctcaggctaaaaccagttacggggtattgtagtactcatgtgagggacaagaatggctgtagccatgtgggtaacagtgaatatggtcttaagtcttggatgatgataggtttttaagctaaagccagaaggatttactgacagactggatgtgggctaagagggaaagggaagtgttagggaccctccaggagcagctaagactgcagagaaagggtgcagagtgagcactggggctgaggattttccagaggtcagttttggaaaggttaacttcagggctcattcagcagtttaccccacttactaaactgccatttcatcttgtcagagattagtaaagctacacattgtgtttgagtttagaactgttaaaagcactgctaattccaacccatttcttataactgctattgcaggaagaatgtgtgaaaatgctttcttcacacaaggagacagatcatatcataaagcaaaaatggaaaaaagtgatcttcctttgactttatgcacatcataagtgataaagaacagatacaattaataaacaaccactgtctgttatactagctttgttctatgactacagataattaatttattcttctgtttgttggttggtttttccaccaaccttcaagtccaggcagtaagtattagaatttacatctaaaagtgatagcgaaggtctctgtgcacatttgaggggactctggctgttaggaaacctgtgctagtgatgatgaaatggcaggaggagggccacagtgtggccctgcacagtctgcactggggcctttctcttcaccctgcacaccagctaggaagctttatatctcataaggtgtgctaatcctccagcacagacactgtacttcactggagctggagaaacaaaacacccaatttttgcatcctagtttttctttaattaaagctgatccttttcttagagggcgattcctgtttccaaattcatattttcattctcaaagaagaggtttattttattctgttttcacccacccatgagcctccacatcactctttctcccagtcacacacgttccattcccatacttcttagtcattcttgcttccctactgctgttctgggttgcagctgcccgcatttccttcaaggcaaatatgtggctgtgcctctctcgtgaggttttccaaagagtcctgttctctttggctttgacgttttaaagggttaaaatagcaacaacaacaaattctaattaaatgcttatttgatgccggatcctttgctaaatacaaaatgcaatctctcaccattctgtgtggtttgggaaaccttgttattcacatttgaaatatgaagtcatggagacttcgagaagtcaaggcacttgtccagggtcgtgattgcatcatgggagggagctgggattgagacttcttatcttccagacatagctccacatcacctggagcagggctctaggaactagacctgtgtttccaaaaatgtggtatgattttgggcagtagaggcgatgttaaataaatatgagtctcacggtgatagtcattttcttttccatttactttttgatctttttggttgaataatggagaaacatttcagttggatgccgcatgcctgacacacatctctaaaactttctaatgtacctgtgttactaagaagtgagcaaacttctagctcaaatctttgacagcaagaggatgtagcagaatttgataacaattttttaatgtattttttttagatggaatctctctctgttgcccaggctggagtgcagtggcgtgatctcggctcactgcaatctccacctcccgggttcaagcaattccttacctcagcctcccgagtagctgggattatagtcgcacaccgccatgcctggataatttttgtatttttagtagagatggggtttcatcatcttggccaggcagtcttgaagtcctgaccttgtgatccacccgcctaggcctcccaaagtgctgggattacaggcatgagccaccgcgcccagacttttaatgtattttttaagtctgctttcaatttataacaggggatactggtttgctattgatgtgatgattctaacttacaaaaatatattcgtttaaggaaaataaagcaagttgattaaaaatgaatcacgtaggtggcacaaagatttgacaaccatcatgaaagttgtttgtgaatgatggatgtcgccagctgtcccatgctcagaatcctgagtggcaagtgatacatgatgtgttatctcacatcaattcccatttctcaccctaccagtcatagaaagggctaggaaaacaattgcagtagcaggtgggccagattcccctgatttccagcgagtacacacacggggcactaggagaatagactgctgctttgtcttaagctgagatcaaccaggcagcaatgccagtgattggaacaggaaagacaacaaagatagtcaaccacagaatgtccttgtcatcccagtctgtactgaagcaacagttccctaaactcggacactgccttgtatagaaaacctcttaccaggtattcattacctgggttctcccttgtcctcattttggtctatttcaatgattttcaactggggatacttgtcaatgtctggagacacttttggttgttaaactgcagggtactactggcatctagtgagtagaggccggggatgctgctcagtaaactacaacgcccaggacagccctaataacaaagcacgatcagaccacgtcagtgttgctgactttagtagagctgagatcaagtccgtattacaagctccttagaaattcctcccaaatttattcctcacaatgaaactcctagaacctacgtggctaagcctcttgcttcttcatctcatgtctgtgaaagtacgttttcttgtcatagtgttgttggccttgctatagcctcagggggagggggaggggattgtactccacttgttcaaactgtattttttttttttttttttttttttgagacggagtcttgctctgtcgcccaggctggagtgcagtggcgcgatctcggctcactgcaagctccgcctcccgggttcacgccgttctcctgcctcagcctcccgagtagctgagactacaggcgcccgccaccatgcccggctaattttttgcattttgagtagagacggggtttcaccgtgttagccaggatggtctcgatctcctgacctagtgatccacccacctcggcctccctaagtactgggattacaggcatgagccaccgcgccccggcctcaaactgtatttttagtttgcctcactttcacagacaaaagtaaacattctgtgctttttttttttttacttttaattttatatccctctctgtcaggtgcttcggatctgtttctctcaggtttttggattccagattttcattttcccaacgctgacacccacccctcttctcaactgtacatttccttttttaattgccgcatcagtatggctcatgcaaccatgatattattctcaaatgttttgcatatgtagatcttgtctctccaaattaattctcagctcctcaaagagaaagcctatgtttacatccttcacagcggctgttatgctttgtctctgataggtgtaacaagtaccttattctttcaattataacgtaattgtaaatgtaaaatacaacattgatttaatagctgccttggcaggggtagggaaaaagaaaagcttaccttaaatatacatgttggccgggcacggtggctcatgcctgtaatcccagcactttgggaggctgaggtggatggatcacccgaggtcaggagttcgagaccagcctggccaagatggtgaaaccccatctcaactaaaaatataaaaattacccaggcgtggtggcaggtgcctgtaatcccagctacttaggaggctgaggcagagaattgcttgaacctggaaggtggaaaggttgcagtgagccaagatggtgccactgcactccagcctgggcaacagagcaagactgtgtctcaaaaaaaaaaaatatatatatatacacacacacacacacacacacgtatacacacacacacgttgaggtcaaaatgtgttctgcttttggcagtgtccatatattctacacacacacacacacacaaacacacacagagagagagagagacagagagagccatgtgcacagaatacatcttggaagcaagaaaatatgaaacttattggcttactgatttcaaatgtttacttattcattctgtctaccatgagataatttattttagttttcataatttcaaccccattagtatttttctaataagatatgttagtgtgcaatgttatgggcaaaacgagagaacagagtttctgaagttgggcactcagtgcatatgaaccatagtgtcttggtcttgaatcttcacagtacccaggatcacagtcccagcacatgcacacttgtgctctgtccactgggggctcagccccgcaggctacccctcttcccaccacctccccaacatgttggcttcacttacctgtgtcccaccttaaagctttatatgtgcagttctgtctgtcaaggctgtttttcctgccttctttctcaaaccactcccctccccagggtaactcaatgaattctcagtgtcagtaaaagttgctcaaggaagcctgggtcaggttcccggtgatgcttttcctagcactgccttctgcttcacaattcattctacagttatttattgaacatgaaatgtaaaccaagccatgctctaggcattagtggaaaagctgcgagtatatcagaacaaaatccccgtctacagggagcttacattctggtaaagtaatggaagctctctttacttcaagatgtaattgtgtactctacatatcctatttaatacttgcagtaaatctaggtgagagttcttagcattacatttgtttacatataaaaatgcagatttaggcaggttagatagctgacagtaggtcacaaagctggtgagatggcaggccagccaggtgatccctggtcaagctcctgcattctattatgttgcctttggtaggtggaagaatgaatccttcccaacattttctgagctattggttccttctgaattcttgaataattgaataatccatgattcggagtgacaggcatttcatttaggcaattattgggaaactcaaaactatacctgcatctatatggcagcaatattattatatttgaatccttatcatcacagaggaaattagaaaggcctaacttaaactttttttttaaccttctctgggtttccaatccactggtttccattaatgtacggagtgtttgggccacttggggccactttggatacaggaagagcatccagggtaaaaatcaatgggtaaagagaaaggaggaatcgggagcaacagaagttaaagcaggtggctttgctattctgctaaagggtaaacccattagaacatctttgttctgtgttgcattttctctggagacgagaagcagacatggctgtaggaggttatgtaagaccattagcctgtttgatgtgcctttcttttcacttcctttttttggtttgtttgttttcttcttactgccttggggagttagcccatcatatggttttgatggaggcatgtagtaacattttagagtgttgtaaagctgcttatgaaacggttccaaacacatcaattaggaggggtggataagataaaaggacttgtgggtagagtatagaagagacctgatggaagagcatctgaaggtcagtttgtggtcattagcatcttcatgggtcaggctgtccaatgaaggacacatggctttgagcaataggagcaaaagtcctaacaatttacaccaaaggcctcatttctgttctatttagagctcttaatgcattttgtgtctttaatgcacagtggtgatttcttggccagatctggttgattaaggccttttgactctcacaacttaaaaagaaaatgaaacaagttgctgacatataaaattcaggtgacttcacataaaagtcaagaagtcttgcttctcttaaacataatagaatgcaggagcttgatcagggatcacctggctggcctgccatctcaccagctttgtgacctactgtcagctatctaacctgtctaaacaatcagaaactgtgagtaccttggacgcgtatttccccattcccccacatagactcctgtctagggctgacttctggataccatgcttagacaggacctgtgctctctgctagctgcgctacctctaccctaggtcatagtgagtttgagcacctttatgcattcacgttctctgcctgaactctaatggaatttgaggttgtgtctcctgttgttttctgttagtggtaagtggtgtgtgtgtgtgtgtgtgtgtgtgtgtgtgtgttccagatcttcaggcagaggagagggaagtccatgtacattaaagaagaatgtttagtcctatagttttggtttcatttgtttttgataacaatatttatttagagatttaaatgtcattaagggaaggttgtggatttattatgtttcttaaaagtgggcattgggggccgggtgcagtgactcatgcctgtaatcccagcactttgggaggcagaggtgggcagatcacgaggtcaggagttcgagaccagcggccaaaatggtgaaaccccacctctactaaaaatacaaaaattagctgggagtggtggcacatgcctgtagtcccagctactcatgaggctgaggcagaagaattgcttgaacccgggaggtggaggttgcagtgagccaagatcgcaccactgcactccagcctgggcgacagagcgagactccatctaaaacaaaacaaaacaaaacaaaacaaaacaaaacaaaacaaaacaaagtgggcattgggtaagagtgattttccaagagtaaaattaattaatgggttatgatataaattaagcattccaccactagtattacaaataagatagaatagaaaataatagcatgttatagattgatgatagattgataggtatactggctaaaaatctaaactacatttcctacggcgggttgcagttaacaaagactttgaaagcaactagattgtccaagcttgagaaacatagctgcaagttttggtattaatctgtcacactacaagtatttctgagtaacaggtaccttcattacttctggaaccaaggttggcatttaaggaagtaaataaatatacagtgacctctgccccaggggaaaccagtggccactttttcctcttaaagaattgattaagattacttccttctcttgacaaattaatatttcctaattgatggaataaagatgtatgaaaaacaaaaccttacagaattggatgccaaacaatagagtcaagtttgtatggcggcttaaataaggaagaggaagtagaaagggtttaagtattttaagatgtcttcagggaagaaatgggactttactgaaaatgccttgaatttcagtttcagatcttctttgggttaaaatgacttaataattaaaatcacatgatcaacctcatgagctagttctttagattagcttattgaaagagccttcatgtttttccctctatttcttcttcttctttttttttttttttggtggggggatggcacctctctctgtcacccaggctggagtgcagtcgcatgatctcagctcactgcaacctccacctcccaggttcaagcaattctccctgcctcagcctccagagtagctgggattacaggtgccccccacaccatgcctggctaagttttgtattttttagtagagacagagtttcaccatgttggccaagctggtctcgaactcctgaccttagatcatccgcccaccttggcctcccaaagtgctgggattacaggtgtgagccaccacacccaaactccctctgtttcttcatacatggctcatattcataaaattcatgaaatttaattcaaatgtaatgggttttggcccactacttaggccatgccatatgtatagaaggctgtcatttggctgtggtactgggccaactgcgaaacattagatacatcttcctcgtattattgcattaactgcatagactgggctagactaaaaaaaataacagtggtttaggctgagaatttgcttagtttctatgctgtgttaaacagttctttagatgggagcaaaattcaggcactgaagctaccgttcagtttttcagcaagaaattctgaaatggaaggagtggcgttgtgtcttagaataattcggctctttaaaacaagcaagcaaacaaaacaacctcttagtttactgttggcatatgtatgtatcaaattcagagcttcttttaatatccctgcatatgattttgtccaagttctttaaaaatatttataataattaaatatatcttagtgtagttttatatatatacacacactaaaatatatatatagcatatatacacacacactaaaatatatagagagcatatatatacacacactaaaatatatagagagcatatatatacacatacatatactaaaatatatttaagtaaaaagcatttatttgtttcttgcctaattgtgtgtaccagtcttcccttattaatgaaatttatttctctttgtttacctttaccatctgaggtacagataccgttcttcttaacacttgatgttaattatcaaaaccatacaactttccgtgaagaacttctctaatgttccaaatattaattcagcacagtcatgctcattgaaaaaaaaattaactgcatttgatccatcacattgaatgaaagctggagtaatatttgatctaggattttaggaaggaaagaatccttaaagtcatggtctgtagggaaagcgagaacagaatctaagagacatagaatctttctgtctctctgcgctggcagtttctgatgaggagctattcacagactgtacaaaggaatacgcttgcacaggtatttctctttgagagtggcaaggtgaaggatagggaaggtgaagtatttattatactgcaaatcaagaaacagcttttttttaaaaaaaatttctgttttactttgtgataaaaccattcagcacaggttagcctggagtcccttggtcccctgcccttgttaataacaattaattgaacactttgaacattccgattctagttaactttgtttaacaaatgtgaacaagaataaaaaataataaatgggcgcagcctaatggagtatgccaggatcttggtgcattgaacttctaggcgctggattttcagaagctgttttgtttttgttttcacaggatgtgtgagactggtgaagggctgtttatctttcagacccgagacggggaggccatctatcagaaagtccactctgctgccttggccatagccgagcagcacgagcgcttgctacagagtgtgaaaaactcgatggtacgtttggaatttcttcctcgtgtcccagtgcctatcactgcagaaagcaattgggtcatttttgtgctggaaaatatggtcagcattatttgagcagatgactgattcctcttctcaacagtgtatcacttggattaaatggcattccagaatgcctgatgtgggccgttggtaataccttggccatacatccccattatctactttacaactcaatcgtaagggtgtgtaaaactaatttgcgtgtgtacagacatctatagacacaaccatgtggatcatctacctatggagatatgtcttgctatgtcagaagttatttcaaatgtcaacaggggccagagagaaaaatgtaaatgaaagaagagggctgagggaaactggagtgaaatgtcaaaagcccaagaccagacaactgttgacatgagaacaagagattgtgacatccatctaggtagatcccttgatttttcaagggaagccaaagatttgagtctatatgtaatacctgctagttggtaactgttggaaattaattctagttaagagtgcaacactttgtgggtcaaagagaacctgtctgcgggtgaactgctacccacagccatgcgtgtgccatctcttcacagtcatcggtatataaagatgcccaaacataaacacatagcacacataaacatgccctcagaacacttactctttgctttacactgtgctggggacttggattacataaataattatgttcatgaggccaggtgcggtggctcactcttgtaatcccagaactgtaatcaggctgaggcagactgattgcttgagcccagaagtttgagaccagcctggacaacatggggagaccctgtctctacaaaaatacaaaaattagccaggtgtggtggtatgcgactgtagttccggctactcaagaggctgagataggaggatcacttgagcccaggaggtgaaggctacagtgagccgagtttgtgccactgcacttcagcctgagtgacaaagagagacactgcctaaaaatttaaaaaaaataataataattatgttcatgagttttttctttaaggagggtaaattcatgaaatcataaatcataaatgaatgcacaacacttaagtaatgcacatcatgcgttgtggctgcaaatgtatatatagagcttcacatctggaaggaaatatacaaaacaaaaaggaattgcgttggcaagattagggtagtttgaaactttatgattgaaacatgtggggtggttggatttaaagagtggaggggcaaagcatgccagtaatgtgatctgttccaacacagccccgggttattcccaaatgacgtctataggcagcaatccgggattttagagccggggtcagcaaatcttcctgtaaagagacagtaaatgttttatgctttgtggactaacatggcctgcaagtacttaactgcccttgtagcacagctgcagctattggaaagatgtaatcaaatgagcatggccatgtctcaaaacaaactttattaatggacattgagatacaaatttcatataattttcacatgtcaggaaatattactcttctgttgattttctctcaaccattaaaaagtgcaggtttttttcattgtttgttttttgcatatgggtcattcagaaacagtcagcaggctggatttgggccgcaggacagagcttatacttggaaaagagcaagtgcctgcccccgtgagccagtgctgacgtaagcatttgcgagaaaccaggcttgaagacttgtgtatgatttcagaggtggtggacgtgggcatgctgaggaggcctggaatgaattaagggattctgatggttgtttttatatgtcaacctgactgggacacagggtgcctagatatttggttaaactttcttgtgagtatgtctctgagggtgttcctgagtgacagtaatatttgaaatgatagattgagtaaagcaaattgccctctgctatgtgagtgggcctcatccaatctgatggaggccagaatagaacaaaaggagggtaagagagaattagctctctttgtggtcttgagttgggacattggtctcctttggccttcaaatccagaccagaaaccatcaccattggctttcaggccttcagactgcatatcttggtgtatatatcctatttactctgtttctggaaaactgtgactaatataactaatttaggggtagaaacagataaaacagagataaatttcagtgccatcatacagtgttcaagatcatggcccgtgaagccagacttagttccaacaccatttctgaaacattccagctttgtggaggagaacaaagttcttgatatccctgagctccagttttctcctttgtaaaatgggaagggtaatagtatttatcttaaagacccctcttaaagtttaagtgagatatgctcataacatgttcagcccagagctcattatatagctttccatgaactgtagctgttattactgttgttaatagctgagccatcattagcattgctgttaatagctgagcagactggttggtccagattgatcctagcaatggctgatgaaaatggctggaggattatctagtaacaacatctaagcccatttacatctgcgcctcatctctctctctctctctctctctctcgtcacctctctctctctctcgccatctctctctctctcgccatctctctctctttctaaatgtctaagtagagcaaatgtaaaattagattgagaaggaatggggaatgatataatttaatagattttagagaattagaacctactataagaaactataagaaatcattatatttattattttcttatttcaaaaggaatctacacattattgaaaaattgtagacaacacagcagaacaaaaagaacatagtaagtcatccctctgcccgccacacaagaacatacctgtttctcacttttgagtgggtagctttccagtattttaactaggtggatgtagaaaatagaattatattgaatacattgcttgtgctagctttttgcaagaaaatgtctatatattgtctctttaaatatcatctgcaacatcatattttgtggtcctattttattatatggatatttcatagatttttaaaactatgcatcaaggttgggtacggtggctcacacctgtaatcccaatattttaggaggcctaggcaggaggatcacttgagaccagaagtttgagaccagtctgggcaaaatggtaagatctggtctctacaaaaaatttaaaaactagttaggtacagtggcttgtgcctgtcctcccagctactcaggaggctgaggcaggaggatactttggccccaggaattcaaggcagcagtgagctaggttcccgccactgcactccagtctgggtgacaaagggagaccccatctctaatatatatacatatatatatggttatatatatttatttatatatatggttatatatatttatatttgagtttatatgtatacataaaacaacaacaaaaaacctgtgcatcagcttgatgctcagtctgtatgcatcaatgactatctgtttaagataaattcttaaaacttgattgctgaatcaaagtctgagaatgcttttaaggatttgcttttctttccaagcagccttccaggaagactttcttttcgaactaatacaatcttggtatttattttcccatgtacttagaaattctggatatttcaataaagagacatcagtggatggatggagagagacagagggaggggaatgcgagagagagtgagagcgagctgtgaagtagaattcaagtcactgaaaacttacagggcaacatgtcattgtattagtgttgtgcggctattccattagatccctttaggcacctgaagaagtttgtctaagattgtcttgttcgtagagccatcaattagcataaattgttttgtacttgaaaggcgggttctgcatgctcatgcacatgtttttccatttacaacctcctcattatttccgctaaaaattaatcaggaatatgagtaaatcgtttggattatccctttgcaaatttaactagaaaataatgtcacttgctcttaatttgctgtatgcttaatgggttctataaaataaatgtgatttttaaagccacggcatcctgttatagatggaaatgagtaagcttcaacatggatctgaatcttaaggagttaaacgagggattgtgaaaagcttaaaatcaatgtactttagtcaatctctgattaggggataccatgctaaaataaaacaaatgaaggcaacattactggctcaccctgcctcggttattgttttgccttttctggtaattaagagtggatccacatagccctggctacattccccactaggaattgcctttatatgactgctgacttgcttctatgagatggccaagttcataaccggagaaagacggcaaaactcatatctggccatagcctcactattaggaagtcctaactcattgtttactgtcactgttgtaaaattcccaagagtgtgtctacagacagaatgttgcactgtggggccaataccaggctgaaattacagcctggagtgaattgatttcagtcagccttatgaccctcaatcccaaaactcataaagaaggggcctgtgggtccgataataatagtaacagttgtgggaggctgaataatggctccccaaatacgcccgcattctaatctatgcagtctgtgaatgttaccttacaaggcaaaagggactttgcaggtgtgatcgagttaaggatcctgagatggcgacagtatcctggtctatccaggtgggtcgaatataatcacaattgtcttcagaagagggaaacaagaggagtcaaacagagggcaaggcaatggtggaagcagagagacagagatagagaaggggtggagagggagattttaaaatgccacgcagctggctttgaaggtggaagaagggactgtgagccaaaagatgtttgtggccttgagaagttagaaaaggcataaaaacagcctagcgcagtggctcatgcctgtaatcccaacactttgggaggccgaggtgggtggatcacgaggtcaagagattgagaccagcctggccaacatggtgaaaccctgtctctactaaaaatacaaaaattagctgggcgtggtggcgtgtgcctgtagtcccagctactgaggcaggagaattgtttgaacctgggaggtggaggttgcagtgagccaagattgcgccactgcactccagcctggtgacagagcgagactccatctcaaaaaaaaaaaggcataaaaacaggttctcccccagaacctccagaaggagccagccctgttgatgccttgaccacagccaagagaaactgatttgggacttctggcctctagaaccgtaagacaataaatttgtgtggttttatgccaccacttgctggtaatttgtttcgacagccatagaaaactaatataataataataacaaaacaagaatgtgttatatctctgctctgtaacagacaatgtgttaaggacattttgtgtaatttctaaacctcatgaaaactcttgcattgaagaccccaaaccaccagcttagaaggtattagggctcaaatttggaacaggtgtgctgacataacccctgccttacactgtatctttgaatcaagcccctagacacgttttctttatcctacatgagattaactcactgttattctgaaaactccaaattagtgaccaacatttaaaaattgagagctaacacataaatctcagatttttatattttcttgaaaagtgcaaagctctggcagtgctgatcttgcatcctgacaaggcaatgcttagatacacccagtagtgtctgtcctcacacatctttctctgggaccttgctactgatgctgtggctaactgatgtctatattactatataaattaattttctattgccatgtaacaaagtaccacaaactatgcaccattaaaacaacatccatttattatttcacagtttctgtgggtcaggagttttggcatagcatagtggaccttcctctccagtttttcacaagcctgtaatgtaggtttctgttggggctgcagtctcatctcaaggtaaaagtggggaaggatccactttctttttttttttttcttttttttttttttttgtgtagagaaggagtctcactctgtcgcccaggctggagtgcagtggcgctatctcggctcactgcacgctccgcctcctgagttcacccaccattctcctgcctcagcctcccgagtagctgagactacaggcgcctgccaccacacccggctaatttttttgtatttttagtggagacggggtttcaccttgttagccaggatggtctcgatctcctgacctcatgatccacccgccttggcctcccaaagtgctgggattacaggcgtgagccactgcgcccagccaaggatccactttcaagctcacatggttattggtggaatttagctacttggggttgtgggattgagggctacagtttcttgctggctgttggacagaggccactctcagctcctggccacatggaccttgccagcacagccacatacttcatcaaagccagcaagagggcacaatcctatgtatcacaatcatggaaggattattttattcatcttatcactctgccatagtctgtcgatttttttttctttttttttggagacagagtcttgctctgttacccaggctgaactgcagtggtgcaatcacagctcactgcagcctcgacctcctcccacctcagcctcctgagtatctaggactactggcatgcatcaccatgtctggttccttttatttattatttattttttgtagacatgaggtctccctataatgttgcccaggctggtctcaaactctgggtttaagcaaacctttttcctccgcctctcaaagtgctgagattacaggtatgagccactgtacccagccagtctgttgactaaaagcaaatcataagccctgtgcatacaaaggaagggcaccacacaagggtatgcccaccaggaggatgagatcatggggccacctcagtgtctgtcccctgcactgtgaaactttctggaataatatttacttagtggtttgatttttcacttttaaatatttttcctactttatggcacttgctagtaatacgatgtatttattgaacatctactatatgcccaactctttagtaataatagccactgttatttttcaggcctcctacaatatagcagatactttacttgccttttctctaatcaccacaataactctgaggtagattcatttgttcactctcattcatttgaccatttaaacatgtttattgagaacctactatgttctgttttgtgtggcaggataccgtggcaagtagacacttgaggcctatgctcctacagggcttacaatggaaaagaatattcatgatccctgacctggaaggaatcactgtcctatgatatagatgagaaaagggatgttcagcatggcgaagtcatttgtctgcagctacgtagctcattactactggagccaggaatgcagggtggttttatctggttccaaaactctacctctggccatgatgcctcactcctttgaagggttttaaagctcttatgtccccactgagcatggtcttagcattttcccttttttttcccttttttttttttgagacagactctcactctgtagcccaggctggagtgcaatggcatgatctcagctcactgaaacctctgcctcccgggttcaagcgattcttccccctcagcctccctagtagttgggattataggcacctgccagcacgcctggctaattttttgtatttatagtagagacggtgtttcactatgttggccagactggccttgaactcctgaccttgtggtctgcccgcctcagcctcccaaagtgctgggaccacaggcatgagccactgcacctggccggtctcagcattttcaaatgaccttgataatcagagtacctttcagaagcatctatcaatgtataatatatctttttaaaaaatcactgttagggctgagcacagtgactcatgcctataatcttagcactttgagaggccaaggcaggaggattgtttgaggccaggagttagagaccaacctgggaaacatagggagaccccatctctagaaatatttaaaaattagcccagcatgatggtgcatgcctgcagttctagctcctgggaaggctgaggtgggaggatgacttgagtccaggagatccaggctgcagtgagctatgatagtgctactgccctccagcctgggcaacagaacaagaccttgtttcaataaattatatatatatatatatatatatatatatatatatatatatatatatatatgaaaaatcactgttaaatgaaatctcatttatttgtgtagttttggctttagatagcagtcttgccactttattatttctcgtctacatttccactttaaaaattcaatgcattgttattattcactctaaagggggtgctggaagaagtgggggtgggcctggagtatgaggtggagcactaactgtgaatgaggcggggaggcgaggactgtcttgcaccagctgccagctgccttgctggagaagccgcagcaaaacttcaggacagctcaggcactcccctgagcagctatagctatttttgccacctttgagatcagtgtctatgacaaagtctaattttggaacaaggcgtggcagtgtgtgggatattcctcattccacgactgggcttgtcatttttagactttccttcaaggcgagagcctcaaggtgaagaatgcctgcttttaacaggtttttccaggggctccgggtggggtgagggggccccactgagggggacgttcaggcccctgggtgacttctgccctgtactctggagtcctgattacacacaggcttgagagttcaatctgaacttttttttgtcacttctttgtgtttctttgtttaaaggattgatttacttccaagctgggatttgcaaatacaatttgctaatgaatttgtagaattcaagtggcattcttccataatttttgaaatcaaattaatttatattcaatctaattttaaacgcaatatgctacacatttggctttcttagatatagaaggcatcaaagaaatcatagagtcaatttcattactattcagacactaaagtagaccctcgcatggtggagttttatgtgtgtaaacgctcttttcacaactcagcatctcctactctcccttgtacctccccaccacaagaaaatctgtctttccctcttctatttatgggctctggttaattgggttaacttatggattttttaaaatgtgctgcttaaagcaattatcattttccccctcctgaattaagccctttttatatcctggcatattaattatccttcaaaaaacttttatgaaatacctatttgctacttgcaaagcaatgtgttagatcttatggagaatatataataaagcataatttgttttcatcttttatttattgattgattgattttgagacagagtcttgctctgttgcccaggctggagtgcagcggtgcaatctcggctcactgcaacccccgcctcccgggttcaagtgattctcctgtctcagcctcccaagtagctgggattacaggcacctgccaccatgcccagctaatttttgtatttttagtagacacagggtttcaccatgttggccaggctggtctcaaactcctgacctcaagtgatgtgccagcctctgcctcccaaagtgctgggattacaggcatgagccacagcgcctggcatttgttttcatctttaaaggagcttaccatttaaataaggagttttaaatataccccttatgcaacagtgtaattctgtgggttcaatttgctatggtctctttggatgaccatatttattgaaattaaatccacacatctttttattcaacagtagtgcttctaggaatttactctgacgtatactagcagaagtgaagatgatgcgtacacaaatgttcacgggaggactccttcctttattcttagattcctctttttaacaagtatttgctgagccctgctgcccactagatagtatacgaggtgctggggaaatggctctgaagaagatgaagttcccattcttgcggagcttatttgtaagagcagaaataactagaaagaagttaagtgtccaccacaaggggacagattatggcacatgatataacaagaattacatgaggcagctaactagaaatagaggagattcatgtatagtaatgaccacatgaagagagtcatatataatcatatcaacgtgtgtaaaggaaatgaatggatatgaggcagatctcaaggtggattctgacaccttcactaacgctattataagtgcagaaaattaacttatggcagggtacaaatggatgtgttagtgttggctaccctttgggagcaagactatgatttggagagtctgggaagaggctttcatgtattactttatgtctttctctttgtttaacagttttaaatcatggctatataatatatttttggaaaaagaaacagtggttgagtttctggcatatggcaaatgtaattgattcaactggtaagagagagggagggttctttcacttcaagtacataaaaatgcatgattggctgggtgcggtggctcacgcctgtaatcccagcactttggaaggctgaagcgggcagatcacttgaggtcaggaggttgagaccagcctggccaacatggtgaaaccctgtctctactaaaaatacaattagccaggcatggtggcaggtgcctgtaatcccagctacttgggaggctgaggcaggagaatcgcttgaacccggaaagtggaggttgcagtgagctgagattgcaccactgcgctctagcctgggcaatagaacgagactcggcctcaaaaaaaaaaaaatcacgattaaagatgataacgccttaacatactgtatcaaagggtgctaccatcccatttttatggcttaggagtttgaagtgtggatgcacagataggaagtgataaagccaagctttaaacccaggtggccactggctccggttcccacacttgcaccactatgctgtacttactcatgaattctttagaaattaaaagaagctaaatgggctgggcactgcagctcacacctgtaatcccagcactttgggaggctgaggcaggatgatccacgaggtcaggagatcaagaccatcttgaccaatatgctgaaaccccgtctctactacacatacaaaaattagctgggcgtggtggcgcatgcctgtagtcccagctacttgggaggttgaggcaggagtatcgcttgaacccaggagtcggaggttgcagtgagccgagatcacgccatgaactccagcctggcaacagagcagcactccatctcaaaaaaaaagaaaaaataaaaaaaataaaataaaaaaaagagctaaatgagattaacctacatttactaatagacatttaacagagaccaaactgtttattcagacaggatagatgtggatgaaactcaggcttcttccttaaatttgcgatggctttgttcctgtgtattaggggaagaaaatctcattttctcagcacttctgtttcagtctcttataacaacgtaataacttgcaacgtgcaggggtgtgttttaatagtgctttcacctgattattaaatgctgccttagcttacacagctcctccctggagctgggagctcctgtcacggtgccagggatgttggttgactcgtggctatgcctctattggaaaaggagacaacttgttttgctgacagatcgtggctttgtttataaactcgaaaactagttttaatacttgagatgggggctccgtcagtaggcagtacattgcgaccttgatggcggcaaggcagcctgtcatgccacgacccttccctcatttggagatgttcacttcagagcataaaatcacacgtgcatctgcttgaccgtgtgggcggtggtgagtaatcctatttcccagtgtcgagcatggcaaagaagagagagatagaaatagtgatgaggactgagagaagaaagaaatcaattcagtgcagtttctgatctgttttgggaagtcaaggagtaagtttaaaaactcttaagatttttgaaatggtggtagcagggcatgaaatcaagtacaggacccttctaagcacagagccccgtatgactgcacacactgtactcctgtgaagccagccccagtgaagagttatgcctggggaacatacataaacagtatgtgagcaagcaaattggaacgcgtagtcaccctaaaacagcggttctcaattagtggcagttttatttcccaggagacatttggcagtatctggagtcatttctggctgtcaacaatggggtcccattggcatctggtggatagaggccaggagtgctgtaagttccatacaatgcttaggacagcccccctgccctcgacaaagaatgagcttgccccaaatgtcaatagggccaaggttgagaacgcttgctcttctgatagacaggttctgcttgaagctgggccagaattggatgggtctgtgtgtttggggttgaatatcgcttatgagctgtgcaacccagcttctgtttgccttgttcacatcatatgtaataagtgggtgatactaatgtctctgcctggttttgttagttcacatgagctagtgcatgtaaggcaacgagacgaggcatagtaagattcaacacatgtgaactattacagtgatttcgtctttttttatttttatttttatttttctgagatggagtgtcgctctgtcgcccaggctggagtacagtggtgcaatcttggctcaatgcaacctccatctcctgggttcaagcaattctcctgcctcagcctcctgactagctgggactacaggcgcccaccaccatgcctggctaattttttgtatttttagtagagacagggtttcaccatgttagccaagatggtctcgatctcctgacctcatgatccacccaccttggcctgccaaagtgcttggattacaggcgtgagccactgcacccggccagtgatttccttcttacttacacaaaccaatatgagttgggcgaggagaaagagactcaccttgaagcaatggggatataaacaggaaacaccaggaatttgaatgatggagccgagagctcttgtttccttaagaccctgatgatgtttgtgcagtattaaagaatagagcaagcacaaccacatgtgactatgaggtaaggcccctgtcttctgtgcagctcatagcctagtactcagcaggaattccagaaatacgcacagtcagttatacctgctttgtaaagcaaagtgcaacaagaaaacaatatgtgaatacatggtgtaggcgattctgcccagcagcccaccccttcaccctggcatgtgcttggcatcttgtcacaaaagcacctgcttccactgagtgtgagcctagtgtttaaagggacaatctgattatatgtgatttttatgttatgcattaactttaaaagctgacctctgagtaagtggcagctccattcgagcctgtaaacctctggaaggcagggacaaggccccatgggtgtgtaataagctcagggtctggcacagggcttaaaggtttgttgaatgaacaaaatagggatcaaataagttattgtgtgagccaagagaaaaagaaaaatcgaagccaaaataccaagtccagttctctcctaatgcccaaacagggcacaggttccaggcaagtctgctttaaaaggccacagaaaactcagtccctaaggatatctatttcaatgtataggtgggggagagaatttttttagtaaggaggcagaaaaagttaccggaggcaaagggagcagtgaatttgttttatgcatgtggctgagaattcagatggctccgaataaattgatgcaaatcactttcattccccatgaaaataaccatttgagtgcatctggtgctcggcaacatgctgcacttggaaatttggccccaaatggttgatttcactaacagtctgctttgtcaaagctgtaagccacaatggaggcattgtttctgccagagtctgctcactgtgtagtgtctttgctgcatgtttttttttttcccttagcaggaaagcggtctttctttcttacccacatttttttttctaacatcgaggaagtaagcctctactcactctattttcttgacagtttcataatattctgtgataccttggtaacatttggatgataggagtacccatcacttttcctccaaatgtcagaacaaaagagaggacttggagaaagtaaagacagctctttgggtggttcctgccaaacatctgtcagagctggaatcagaattaggcagcccatgaggactggttcattagaatgtcggggaagaccacatgtttggcagatcgttaatttccacttgaaagaaggcccctgggacagtgggggtccaagggcctcatagaggttctaatctcctgtttttccagatggtgggggcagcgtcatctccttgcagcctagacgtttggccagttgccatttctttaagctttggaaatacagttaaggtgccttttatcatttggaacggagtagatttgagtccatcctttaggatctgtataatactctcagtactttctatgagaaatatgtagaattgtgttatgaactgtagctctggagtaagaggccaggtcctatatcctggctggacatctttaccagctcagggtcctcgggctactaactttaccacccttagtacttgttcccccttctacaaagtgtggattatattagttcacaacttgccaggtgagataaggcaggtgatttcttggcacagtgcctggtacctattaaatatagcagcaacctgagctgttattattactgacttgtagtgggagaataaaatggcaagggaaggcagattatagggaatccccattcacacaaatgattcattcatttcttcaatcaattcatccatccataattcaattatccaatccctttttattaaatgcctactatatgccaggaatcatggtgggcacgacatctatgagcatatacaagaaatctctgccttcaggaaggagaacgctgctgcgaggagggtcttctctcctttttagaggaaggagcaccgttgtggaggcagacaatgatatatccaaagcttggctttcaactagctgtctgaccagacactctaaaatcctgggggacagagaaagtgtgaaagtttttattcattttaagtttgcagaccctggcacagtgtgtggcttataaatgatgcccagagtacatacatggatgggatgagggaatgaatgagccgaagaacaccgagtgcagaattcatcgaaaggggtgagggaaagagcggaggtttttaggtaggaagcatgtgagcagaaaacccagttaggaggcttcttctaattgagggataattagagttggaatgagtggctccatctggctctttgctgagagtctgcgtgctttatttccttcaattttcacaactatccttggagatagggactggtttttgaatcttatttatttttacataaacacatgtctgtaaaatttaactaactgcaaaattatggtcatatagatgatgattagtgctctattttttctttttataatttgtttacatgcattttccccctcctgtctctttattagcaattcctaaccttgttaagaagttcacatgtacctttccatgttttcctgtgtacccatattatcctgtacagatatgcacatctacatatatacatagacacatacacagatacatacaaaagatgggtgtcgtgatgcaattgtttattttacaaaattgtgatcacaacacacgactaacccctagtttttccgttcaacagtaaacatttaatggaaatagtttgaagtcttgtagtacagttgtaattcagaggttgacaaactacagcccacgggtgcaatctggcctatgactgtttttataatttaaattttattggaacacagctacatcctccctgttcatttatgagttgttgttcacactgaaacagcagagtcgagtagttggtgatggtgtggcctgcaaagccatttactatctggtccaaaacagaaaagtttgccgactttgttcctattcattctttttgatggctgcatgatatttcagagtcttgatgtaacataatttattaaacgtacgtataagaatatcagattttttgccattaaaacaatactctttgactgtgaagtgagtccctgaaaataaaaaacaaaacaacacaacaacatcaaaaccaataccgcaacaattatccttgtacacagttcttatagattgttaaccttattgaattgagtttgtgaactttagttaatggagttttctaaactcgggagtaggattgctgaattaaaggatttaagtcgctttttaaaatatttaaatcagtgttgctgccttgtcttttgaaatgctggagtatcttgcattttattggacatattagtagatccatttcataatggcagaaactgaggttcggtgggtcaccctttagttaagtagaaagtcaggacgggaaccaaaagccctggactgatactcactgggaactgaaaggaagaaacaggtttgggaaacttgtcagaggttgaaagcggagagagcctctagggtctgagggtaaatgtgtctgtggcgtgggtcagggtgacagggtaagggtacgggaaagaaagacgcagtggatctccaacttacgtgtgcatcacagtcacctacaaagcttgtaaagccacagatttcggggttccacttgagtgttttaacaggcctggggcagggcattgaaatgcacatttctgataagtactcaggcgatgctgaggtcgctagaccaggtaacatgctttcagaaccgatgctctggagtgaatttcaggatctggccccttagtcctgagaagaacaaaaagatgtatagtctcaagaagtgtgaccgtctcaagaagaaacaagggatggaatgggagctacagaaatcatagcatgcaccttgtgcttctccacccttcatgatacaacggttcacagtgagacatactcactgatcagtaatcacatcctgtgctgagaacagagtcaattcaggcatacttttctacttgtttcatcacatcggcgctagccagcttttagtgtgtgttagcactatatgttcacaaggttgcgagtgtttagggaaacaagaacaagttgtaagtgattatgttctctcattggagaaaattggatcctgttaagaattcattcttccttctctactaaaaatacaaaaaaattagcccggcgtggtggcgggcgcctgtagtcccagctactctggaggctgaggcaggagaatggcgtgaacccgggaggcggagcttgcagtgagccgagatcgcgccactgcactccagcctgggcgacagagcgagactccgtctcaaaaaaaaaaaaaaaaaaaaaaaaaaaaaaaaaaaaagaattcattcttcctgtaacacaaagaggaatgcagcaaatccagcagatggaggaaagaggaggaaccagaactgatgcacaggactctgtctgtatgccctaagaatgacttactcttctcatcagcacgtggttgccccacgattatcacaaaacttgttcaataacatctgcatctctgttccagaggaactggttactgccacttagcatagcaattagtatattacgcagtttgtatcgattaaatgaacctgctccgtcaagcagaacgagccccccaaaatgcagctaatgtgtttttctcaataaattatgcccctcaccaaaccatacaagatgcatttgtgagaactttaggaaggtattttataaacctcagaaataccgacttttcagacttggtaaatagattacacactgcacaagcacattttttatttttaatgtcttttagaaaatggattatctatgatcatcattcttttttaagggagaccatttggtctgagtcttgtagaaatgcagggaacattttaagattgagttaaaagcatacttaatattcatgaaatattttgaatacttctttctagagactcaaaattatgtttggtttctttgaggactctgctgctctcctttgaatttcccctggttttcattttctagtgtcatttggagaaaaacaaaagggttggggatagtgctgggggcaggacttataaaaccacagtgtatgaagtgggaagatatttcctctttataagattgcgcttagaggagtaatgcacttaacatatccctcagtgcctcatccacagatacagagtccttgaaaccggtgaatagaatactgtgcaagtgagcgaggaagctgtgatttattttgagatgcattaatttcaaaataaagcacttggattaaaagattctattggtaacatgatataaaatataaacagtgcaaaagaacatactctataaaacaagtctctgtcccatcgtcccagacacccagtttacattctctgaagcactttaccagattcctttgaatctttccagaatataaattgtttaatagatataaaacatatttatgaatacattcattcattctacacatataagtacctgttctctgtaaggccttgttccaagaagcaggagtacaacagagaacaagaactagtctttgtcctcaaggagtttactacattgctgtgggtggagaagacaatcaacaatcaatatataaatatatatcaagaactgatagttgctatgaagaagacaacagtgtaagacagagagaatgaccgggaatggtcactctggtaaagtgatacccaggcagacagccattcctaagggccaggtgcttcaggcccaggagcctttaagtgccaaagccctgaggcagtctgtgctttgcgtgtgcatgtgcaaagaggttggtgattctggagcagctgaaatgaggagaagagcatagcaggtgaattctgaaaggaactgtgagtcgggtcctgtcagaccctgtagctatgagctatggattttccttggggagagttgcgtagtcattggagggttttgagaaagggtgatatgctaagtttgctttcgaattgatcaccctggaagctgtttggaaacgactgggggtgcccagagcaagggtacgagcaagaagatgagttaaacgctactgcagtcatctgagtatctaggtgagcatcggggtacggaccaaggtggtggtgatggaggtgagggaaagtggtggatcctgggtatatttttgaagattggaccaataggatttgctgatacataagaagtcttatagagtagaggagatagtcaatctcaagattgtagttgtttctgtgtgtgttttaaccagaacaacatgtagaatggaggaaacctgtactcggaaggggaagaggttgaggggagaggagtatgaggagcgacagttcaggacatgttaaacgggagatgcctaccggtcatccgggtgggagtgggaaatagtctccttaatacacaactctgagatttgggggagagataagggttgctgatttccaactgggaattgtcaggttgtagatagatggtatttaaacccgcctgaatgacaagctgtctctgtgaatctgtttagattaataattcccttccttgtttttacgatcgtttcatatcactgcacaaagatttaccttttctcttcttattggctacagattagtctgttacacaataatgtgaaggtaagacttctctgtgtaagaataaaaatgaaattgccaactcatctacttttttgatatagcagcaacataagcaatttttgagtcagtctaaaatctattgtaatatgcaaattaaaatgaaattctaatattcatttaaaaaccggttatcagaacagtcttcaatatagtaggtcccaggatgaaaattgtggtcagcaggaaaaaaaaatattacagaggagattgggtcagaatttaattttactgtctcatctggtaaattaaacagtggttagggaaatgaacaaacaaagtatgatagagccaaaggatggactaagatccagacattgaaatgatgctgtagaagacagtatttaggaatgttaggatatgttcataatatactaaatgacaaaagaaaatggcatgagaatacgtacgctatccaatttgtgttaaatatacattatgtatgtgccttttaaaaaatattggccctggcaacatggcaaaactccatctctacaaaaaatacaaaaattagccaggcatagtggcacatgcctgtagtcccagctacttgtcggggggctgaggtgggaggataactggagcccaagagactgaggctgcagtgagccatgttttgccactgcactccagcctgggcaacaaagtgagaccctgtcaaaaaaataaagaaagagaagaaaggaaagaaaggaaggaaggaagggagggagagaaggagagagggagggaggcaggcagccagccaggctatctggctgggagaaaatataccaatatgtcaaaagtggtttttatttccttgttttgtttttctgggtaatggatacgggttgatttaaaatctaccttatatgttttcctgtattttatgaacataataaaaaatatagcaaaaggaagaacataatttattacatgttaaaaaatgtgtaataggccaggcgcagtggctcacacctgtaatcccagcactttgggaggccgaggtgggcggatcacaaggtcaagagatcgagaccatcctggccagcatggtgaaaccccgcctgtagtaaaaatacaaaaattagctgggcattgtggcacgtgcctgtagtcccagctactggggaggctgaggcaggagaatcgcttgaacccgggaggcagaggttgcagtgagccaagattgcaccattgcactccagcctggcaacagagcaagactccgtctcaaaaacaaaacaaaacaacaacaacaaaatggtaatgggtaataaatatcacaaaaacatggacccctccccgctttttggtgccaggcaaaatactaccagacccaaagatagagctgtcttggagactgtaaactccctgcaggggtcgtggctgaatgtgagggcttagagcttttttgcttttttcttgttcctgcaatggttccatgcctatagtaacatcttaactcaggcttgttccttggattcattgtacactcactgaaaccaggtgattcaatgtattctctaagcatattatttggtggttttatgtatggctttttgtcgttgttgcctaaaaatattttaaggtttctgccctcaagctagaaaaacagtccaatatcagatatttagatttgaaaagaaaatatgaatgcttctattatgaccttgttcagaaattcttgttaaagacagtatcatgatatagagctaattctaaatattggcaataaccatggaactccacaataaattatgcgtggcctaagaattagctgcaaagcgagaactattttctctcttttttactgaccagatattgaggactaagggagattaaataatgagcctagggtcatgcagctattagtggcagattctagactttaactcagattttgtgactttcacgtgggctcttaccaccgtggaaaatttcccagaatgattgttctaaaggtaataaatagcacaggacagtaattctcaaagcatggttcctaaatcattaagatcaaaaccatctgggaacttgttacaaaatacaaattcctggccgggagcagtggctcacacctggaatcccagcactttgggaggccaaggcgggtggagcacctgaggtcaggagtttgagaccagcctggccaacatggtaaaacctcatctccactaaaaatacagaaattagccaggcgtggtggtgcgtccctgtaatcccagcttctcctgaggcaggagaatcgcttgaacccgggaggtagaggttgcagtgagctgagatcgcgccattgcactgcagcctgggtgacaagagcaaaactccatctcaaaaacaaaacaaaacaaaacaaaaaacaaaaaaaacaaatgcctgggctccacccttggaaattctaggagtggggccaggaatctgcatttgaacaaaccctccaggtaatgcttctgcttgccgttggatagctgaactgctgacccagggcccagaaagcatagggagatcatgttttcaaatattattttcacaagagaataagtaggcagaacccaaagatattgttcaggaagccacctggagaatggcagtgaatgtggagggtagtgtagatgagagccgagatttcagcagaatgagaaaagcaggtattcagaggctggcttcacttggaatgtggttttattctttctctcttggactgagatgtcccttctgactcaactttgcccatgttttgtgcttgaaatattgatagaaaattagttgggttacatatatgaaacggaagatatgattagaattggaagtttctcaggttgagaatgtgttcaggcgtggatgtggcttctgactcagctgaatcttatcaagacagtgtctttattcagtcgctttagggcccaggttgaatgaaaggaaaattacaatacgatttgcatatgcagagttgttattggcaaagaccccacttgagttattaatactttaaggagcaacctgatgaaaatttaagagcttgatgaggatggaattaggtattgaggtactgatctttttgccatagtgaagatttgtgctcgtttctgaatgaatccagactgatgtcacaaagacggcatatggtactcatgattgactgtcgcagaaaacaattacatcctgtcgtgctgttcaattttgcaaaacacaatgctctaccataaaaacagttggattccagagaaggacaatatggtgcagtattgaggctaagacctgccactgctctgcactcctggtctcagactcatgaaagaagtgcaccagcagcaagtcagtgtcagcgaaaccaaatgaggaactgggaaaccagaaatgcatttggcaggtatggcagacagttgtttttcttttctcagtgacaagctatgcgcagtggtccggtcattagaatctttttctctcccaagagggctgatagaattttctcaccattatgaggaaagggccttggcaatcagcccttcactcactgtgagtattgggaagtttttacaaggcttttactgtgctgttaatgacaataatgacggcagggtgggggcgggggcaggggaccatgcttcagccagttgtcggtcaggtcttcattcaatgttactttttctggggctgcttgaccagaagtagccactcaactaattcatcatatcatgcttttttttttttttttttttttgagatggagtctccctctgtcacccaggctggagtgcagtggtgcgatctcggctcactacaagctctgcctcccgagttcacgccattctcttgcctcagcctcctgagtagctgggactacaggcgcccgccaccatgcccggctaattttttgtatttttagtagagatgaggtttcaccgtgttagccaggatggtctcgatctcctgacctcgtgatcctcctgcctcggcctcccaaagtgccgggattaatatcatgcttttaaaataatcttcagggcatatactactatctgcttttttttttttggtaacaggtttattgagatatgaacataccacacgtaccataccatatacatgtaccctttcaaactgtacaatttaatggttttaatgtagtcaggtttgtgaaactatcacaattgattccaaaacattttcatcaccctaagaagaaaccccacctcctttagctatcacccctggataccaaaaataaaattctaagctcttcagccaactggaagaactcctgttctctgctaaggacattcaaaagttaacctgaaaaaccagttcagcccatgatgggaagtgggggtcagacatgcctcatgataccctcctccctttggagttcaggcaaaactgaccagcattaacattaaaacagagacctcaagactgacaaaacagactctttgtaggagtaagatactaacatgagagatagcaggccctgaaagacatttaagtattttactccaaaatatattatttgacatattttgaaatgaccctgcaaagctgtctcttgtggggaaaatctgtattctgtagagaatcttcttcccttttcaggtgttttctctgatccaggagagaattaactaagagtctggtgcccttttaattctgataggatatatttaccatctcttctctctgaagcctggcacctgaaggcttcatctgcatcataaaaaccttggtctccacaaccccttaccttaactcagatactcctttctgttaattccaggcctttcgataaattccttcaaccaattgccaatcagaaaatttttgaatctacctatgacctggaagcccccatttggagttgtctcacctatctggatcaaaccaatgttcatcttatatgtattgattgatgtcttatgtctccctaaaacatataaaaccaagctgtagcccaaccaccttgggcagatgttctcaggatcttgtggggctttgtcaatgggctatggtcactcatatttagctcagaataaatcttctcaaatatttttgacagtaccctctaggcctcagcaaccactgatctatgttctctctagggatttgtttatttgggacattttatgtaaatggaatatcttagtttatttttacggctataacagaataccaaagactgggtaatttataatgaacagaaatttacttcttatagttctagaggctgggaagtccaagatcaaggtgctggcatcttggaaaaggccttcctgttgtgtcataacatggtggaaagtatcaagtggtgaaagagcagagagggccggaagagagaccaagaggggatgaacctactcctgcaataatacacctgaaaccgcctttgaaaaattatgacagtaaaagaaatctgacatggctgactccatcttgattctagcctcacaggctggctgccttcatttattcctgggcatgggccaagctaactttaagagaaatttagtttatagtttaaatgataatagcccttccctgaaactaaactgcccttgtaaaattaatgaaaggccaagttaggaggatgagaggggcctcagttcttctaagatttagatgtagtttaaaaatgaccggacattatactggaggccacaagatttgcaacttccccaattattcctgcaaataatatcactattgcagaacctgagattggccttttgagatggctgttcagatttttgcatttctgacaaccagatggccccactagacctgtaactcaactagtcctgtggtcccacccagaagtgggctcagcatatgaggaccattttccacacccttatgattgcatttccaaccaatcagcagcccccatcccctaaccccttgcctgccaaactgtctttaaaaaactcctgacctctgagccttcggtgagattgatttgactaataactccatttcccacgtggtgtgtctgacctcacatcaattaagctctttctttactgcaatgccatgatctccatgaattgattttatttgtgcaatgggcaggaataactcattagatggttacaaacgaactcccaagataatggcagcccctttgaaaggtttcgcctcccaaaacagtcacgagacaattaaatttcaacaggacttttgggggggacaaacattcaaaccatagcatggaataacataatccctggactttcatgactagcacattgttttcagaatcatacatgttgtagcacatatcagaacttcattcttctttttatagcaatctgaatatttttgttaatttgtatacagtttcatcacaggtctcttagttccatgagaaaagagacctgtaagcccaagcaactcccatgaagcaaagcgtcttctgcttctacattgtaacatgggtctcgtactgcatggttagcttctctccccagcagcatgatgctttttgtgcattcagaacccaattgatgacataagtcgattgattgctttaagtattttatgccaccaggcagcatcttgactcacttaggccaggttaggaagagacctgcatgcattcatgctgtttagagggaaagttcaagtgttgaagtacaagaaggcatttgtttgactttcacaaaggcttgtctttctactcttgtgggatcttgagctaacactgctaatagaattaataaatgttcagtgctaaactcccctgctgttggatagtcctaaatgattgtgcatatacacataagaaagatctttccccaaggtcctgcttctgctcatcacttgaatggcaaagtcgagtgaagtagtcttattgccacgttccccacagtcagtcacagccatgttaatttaaccgggacctaaagtttcagcatgaattcagccttgggctaacagtgcttctaatttgatagcttggttaggatttatttttgaagacaattttctgctacttaggcaaatcctgggttcattcattcattcattcattcatcacacatttgttaagcctctgaaggctctagctaggtgctgggaataggatacagagataaaagataatccctactttggccgggcgcggtggctcacgcctgtaatcccagcactttgggaggccaaggcgggcagatcacaaggtcaggagatcaagaccatcgtggctaacacggtgaaaccccgtctctactaaaaatacaaataatcagccaggcgtggtggcgggcacctgtagtcccagtgacttgggaggctgaggcaggagaatggtgtgaacccgggaggcggagcttgcagtgagccgagatcatgtcactgcattccagcctgggtgacagagcgagactctgtctcgaaaaaaaaaaaaaaagataatccctacttttcagcagttcatggtctagagcagaaggaaggctaggttagtgactatcacaaaacagtgaaatgatgagatatctggtagaagcacctgatcctattaagggaggagaagagacatcaggagagtatctaaaggaggtgattcctgagctgactcctgaagggaaggtagaatttaaccacataagtaatggggagaacctttgggcttaggagcagatgtgcaatggatttccaggctcttggaaatgcctgggctgaatggtgtggtttaggctatgttgaggcctgagaagggaagggtgtcaagatcagagccccccaatctaagaagtttggccgttagcatgaggatatatagtcccttgaccggttaactcaggagactaggctggatgtcccccatggttcttccaactctaacgttccatgattcttttaagtttttctgacataggaaacaaaatgggttatttgtaatttttgtggttgttttttatagagtccagggacatgattttagtaggttatacggggtcaggagtatgggtcacgtgtagtatacagtttgttccaccataacaccatttcttttcttttctttttttttttttttttttgagactgagtctcgctcttttgcccaggctggagcgcagtggcatgatctcagctcgctgccaccatgcctggctaacttttgtatttttagtagagacggagtttcaaccatgttggccaggctggttttgaactcctgacctcatgatccatccacctcagcctcccaaagtgctaggattacaggcaggagccactgcgcccagccacaccacttctatattgccactgagctcagatgtatttgaaaaattggaaattcactacaatattaaggttgtgttggttcctaagcaattttttctaagaaagggaagcccagattagaaggagtgaaattgtaaccttaagctggataggaaaaggtacttacagactggtgcacaggcatggcctcttccagaagatgaaccatgagcacaagtccctggactccctccctataaaggggtgtgcccagcctttgcagtcttgctcagctcctgttcatgtggctgcacagccaccattgccagctttctgcaatagccccttctctacctctgtcacctggacttcctcaagctggcacttccaatcaagtgttttctacattttttataaccccaaatcaacctccagtctagctgggctgtgcaaactatcccccaaagtaacaatgactctggttgtaaataggcatacatttgaatggccaacccaccccctgaattttcccacaattttgtgaatgggaggtttttcaagaacttctgtgtcaccttacaggggaaatccccatactttacaattctatggctcagggtaatttttatttttacttgttaatgtgaagatattatatctattgtaaaaaaaaaactatataaaaatatattttttaagtaggaagactgtaatccttctctccaaatacactaaatcctcatttaatgttgttgatagattctgtggctttagcagaaggacatacagcaaaaccaattttcccgtaggctgattgaaataaagaagagttaaattcctatggcatatttctggttacaaaaacattaccaaacttctagataaagacaaaaacacttctaatattacacattgaaataaatgtgagctatacgtacatttgagaaaagattaatcaaaacaagacgattatttacccagtggttccagttcagggtcacgggtggccagagcccaccatctctgcagctctgggtgccaaatgggacccagcctggacaggatgccctcccgtctcaggacacactcacccatacccacacccactgagacagggaccatttagacacaccagtgaagccaacaggcagttttgggatatgaaaggaaagcggaggacccagagaaaacacaagcaggcatggggagaacgtgccaaatcgacacagacagtgaccctgccaggaacagatttctatattcacattgaagttgtaatgaaacaaagctgaatgcattgacgttatttgaggacctgcggcgctccaggtaacccaatttcaactcttccaaacatgagtgctaactgctatttccaccagggcggtacatcagtgccacttgtggccctccactggtggttgatatcaaggatagagggactcagggcgtcacagaagagggagcggaaacctgcctactggattctcaccaaatgacttcctgcgtcttttctccctgacacaattatgcagacatttctgcattgttataaggcttttctttttgtccaaagacaattaaaatgcttctttcataaaattagatgtttttccaaagggttgagaaagaactagagagcccggctttgtaccgttctcctcttcaaaacgcggcgttgctgtcatttcactcttgatcccaaatcagctttctgaaaatacagtcaaatcatgctgggctgcctaaatatatttgcagtgaagtagtgaataatttgaagtgactagtattccacaaatgttttctttatatgaaattttctgttaaattaaatagaatctctttatatcaagaaaatcaaataacccctacctctaaattgagttcttttccttcttttattttttgaattccatgcaaatgaaatagaatgttactaaaagtcactggtaaatcgttctggatttttttagactttcatgtatacagaaataaccactatgagaagctgacgaggtgagggatatgttaattagctcaaatgaatttttttatagtatgtacatagatcaaaacatcacattgtactctataaatatgcatacttattatttgtccattaaaaatacattttaaaaattaaaaacaagaaacagctgcagaacttttctactagcttagtacttagcttttggaccttttcatctaaaagtttatttttaggaaaagttatcctcatggaatctaatcctgtgtgattccacttgggggcatgttttggtaattgtggaattatgatagggacagggaattcgattcagcaaatgtaaattcaatgcatacaaattaaattttcttttgagtgaatattataatctttttttcaagttgaatctcatgaactacaatgagttttggtcttcaacatatgaagcctcctattattttggctttactgagtgaattatgcctgaaactaccatgctgaggggatgtgtacagtggagacttttttttctttaagagattggaaatttttaaaaaaaaaatcctaacatgggcattgcaatttctaattatcatcatcatcatcatcatcatcatcatcatcatcatcatctccatctccatttttcccctttacctatttgttactaggtaagtccaagtaggtatcatctcatcaaactcttatactttccaaatggataggtgtataatttcgacaattttcatatgagcaactaaaatgacattgcactaggtctgtaaccccctgtgtctccttcgtggtacgacatataaatgtttcatttccaattcatgtaaatcttccatctttgccaagtattacattgtgcctatgtgtagttaactgggccttgaatgggaggatacttaaatagccgtcagctctcgccaatgtgaaattacctcccaatgaacatcttgcataaatctttgtgggtgaatttttttaaagatgggaatggattatttgatattcaagcatccaggaaattcaactttgcaaatagtcacttcttacacaatggcataatcaacctgcgtcatgattgtgtctaagaccagggctcagatacgggggtgcctggaggtctgcttccacttgcacccccattcttcttgcatgcgttgaccccgttcacctttccttttattctacccatcctacaggctcttttctctctgaaactttccttcttttgtataattctttccccgatgtggttggtcaggctgttgactgctctctgataatctgggggactagaactgtgtctttagagttgcctgctgccaaaagccatttcatcttttttcctccctcaatgtctggaacaatgatttgtcgacaatacttgttcaaacagacttttattttttctttctgatgccagaacacccaacacaagtcagtttaaactgacaagaattaggctgggtgtggtggctgacacctgtaatcctaacattctgggaggccgaggtgggtggatcacctgaggtcaggagttcgaaatcagcctggccaacatggagaaaccccatctctactaaaaatacaaaaaaaaaaaaaaaaaaagaaaaattagccgggcgtggtggcatgtacctgtacttccagctactcaggaggctgaggcaggagaattgcttgagcccagaggcggaggttgcagtgagctgtgatcgtgctaccacactccagccttgctgacagagcaagactccatctgaaaaaaaacaaaaacaaaacaaaacagaaaaaccccaaactgaaaagaatgaaatggctaatacaattgaaaagtctggggccagcctctggattcagtgggatccaaggtctcagtggagtgtgtgaagatctctctgcttttcttggctgtcttcttctgaatggtgtctactcactgtcacgtggtccctttgtagttccaagataggctccagtcccatctccagcctcttaacaactccacgagaaatcattcaacacatgttacttgtatatctattacatgcaaggcaatattctgcactctggggatagatcaatgaacaaaacagtcataaatctttagcttacttctgctgattctctcttccacaaaaatgctaacaatgtctcagtaaattatttcggagtggtctggcatgggtcaccagcccaaccctaaagtgaatgggggaatcagccccaccgggactagagggacttagctgggttggagggaagttccccaaaggaacgtcatcaaggcactgttgccagcagggtaaagaatggatggtgctaagtaagcaaaaacagtagctggccaccatgcccaccaccttcaatcgatgttcattgatttgcagcctggccagctctgtggttcttttactccatgctctcctgtttcctcagtcaggccactttcggccccagtgttgctgacgcacaactttcttccctttggctgcagctccagatgaagatgagtgagcgggccgcctcgctgagcaccatggtgcccctgcctcgcagcgcctactggcagcacatcacacggcagcacagcacgggacagctctaccgcttgcaaggtaagcgtggggctacctgtgtccagggtgtgggccaggcctgggagtactggggagggggctcagctcaactcgcagctgctgcatgccagctggttagtgcccttcctccaaaggtaggacccccatcaaggcctcacacacgaggcacttaatctttgtagagccaaatatctgtatggctctagagatatttgtatctatcacagtgtccggggggaagtcacttaaaatgaagattcttgggtttcatccccagagactctagatcttaaggcataggatgtggctgagcaatctgcacttttaacagaccgtacacagggtctgggcgaggggccagggaccaggctacaagaaatgatgtagtggactgatgaatcacagcatcagcattacttgaagtcttgctagaaatgcaaatttccatgcccttccccagacctactgaatcaggagctctgagggtggggccaggccacctgtatttgaacaagtcctccaggtgattctcccgagagctcaggtctaggagccaatgttttggtggatggggccctggactgaggccagaagccatggcttcaggtttgctgaatgactttaggcaaatcctagtaagctcttcttctagagaagtggtctctgaagcatgatgcagaacagcccatagtgtggacaacatgaacaatgaaaaaatctgcttaaaatggccaggcgtggtggctcacgcctgtaatatcagcactttgggaggccaaggcggtcagatcacctgaagtcaggagttgaaggccagcctggccaacatggtgaaaccctgtctttactaaaaaaaatacaaggccgggcgcagtggctcacgcctgtaatcccagcactttgggaggccgaggcgggcggatcatgaggtcaggagatcgagaccatcctggctaacacagtgaaaccccgtctctactaaaaaacacaaaaaaattagccgggcgtggtggcgggcgcctgtagtcccagctacgcgggaggctgaggcaggagaatggcgtgaacccgggaggcggagcttgcagtgagccgagatagcgccactgcactccagcctgggtgacagagagagactccgtctcaaaaaaaaaaaaaaaaaaacaaaatttagctgggcgtggtggcatgtgcctgtaatcccagctgagtcaggggaatcacctgaacctgggaggcggtggttgcagtgagccagaattgcaccattgcactccagcctgggcaacaagagcaaaactccatctcaaaaaaaaaaaattctatttaaacctatcctttcaaacatatttgttttgttttgtttttcatttcatagtacataagaatagcttattatgttatgcgcctttgtgggggatacttgtaaaaaaactcttttttttttttttttttttttttttttgagacagagtctcgctctgtcgcccaggctggactgcagtggcgcgatctcggctcactgcaagttccgcgcaaaaaaactctttaatgatgaggtacaagaccaccaaactggaaatagagtgcactggactacacgtagtttacgtgcagaaatttgctgaataattgaatgcaagaatgaatgaatgaccatggaagactatggccttagtcctccatgctcgctctgaaccctcagtcctccatgcccgctctgaaccctcagtcctccatgcccgctctgaaccctcagtcctccatgcccgctctgaaccctcagtcctccatgcccgctctgaaccctcagtcctccatgcccgctctgaaccctcagtcctccatgcccgctctgaaccctcagtcctccatgcccgctctgaaccctggtcacaacagcatttttttctcagtctttgctgttggtcctttctcccccaggcagcttttcctgtatgctgcgcccgtccctcatcctagttaactcctgctcacctccaggtctcacctccagcgcccctcaggctccaagaaagccctcaggactttcttgtaactggagtggacatctctgatgacgtgcactcataagatgcagatgatggccggttttcatttcatatttatgtggccaattgactcatggtcagctctcccaggaagcaataatgtacaggagggcaggagagctgtgcctccttctatctttatcattttatcccccggcaccttgtatgccttccatcaggatttgtcgaaagaatgcataatgttaagaaagcactgggggtatttacattttagttttcatgactctgtgctctgttcactagcagagagcatggcacatagcagatgctgcaaaaaaaaaaaaaaaaaaaaaaaaaaaaaaagatactgagtgcctctgtgagcagctgagcaaacgactgaattaataattgacaaataagcttaccttccaagatttctctgcagagagagtgagttagattgggttgtcacaatgccactgattctcacttaaacttcaaaaatgtttgcaatatttgagttatatcatcacaatttttgtcatatacataccagaatgttactcgattttactctcttctattttaatatacttctttaaaaaaagcatattttactaccttaatactgttatatccactggttatactgttttttttttttttttttttttttgagacagggtctggctcttcgcctaggctggagtgcagtggtgcgatcatggctcactgcagtctcaacctcctgggcaccagtgatcctcctgccttagcctaccaaatagctgggactacaggtgtgtgccaccaagcccagctaatttattatttttagtagagagggtgtcttactatgttgcccagactggtctcaaacttctgagctcaagtagtcctcctgcctcggcctcccaaagtgctggaattatagatatcagccactgcacccagctagttatgctttttaatagacaataaaataaataataagtattgaagatttaaaagatgttcacagagtacctaaaattatcttgcttatcaaaagtggctatttaaacaagtacatttaaaaaaaaagttttattcttctacctatactacctaccttccctctcccctacttttcataccccttagaaaaaggaaataggattgggaaaagttaatgacttgggggcctggggtgtgccatatgatgaagttacagagcctttaatttcttcttgttttgctgatgattatgggttgtaattcctctggccaattcacctacattgatgaatttcaggctttttttttttttttctggcaaatctggaggttaaggttggaaatcatacagacccttaaggaggaatttaacaaattggtttgagaataatggtcattttcttcaaatgtagtcttcgagagccccctgctggttgatttgggaattatcattttactacagtttttggtggggaaagggaggtggctggttttgacacgtgccacacaagacatacctaatctaccttcactgcttctcccacgtcgttttaaaattttcatagaaattctcttctatgattatgcagatacaaaatcaacattggaagtaggtttataatgaaaactgtctgggcgtggtggctcacacctgtaatcacagcactttgggaggccgagttgggtggatctcctgagatctcgagttcaagacaagcttggccaacatggtgaaaccccacctctactaaaaatacaaaaattagctgggcatggtggcgggcgcctgtaattccagctactcggaaagctgaggtgggagaatcgcttgaacccaggaggcagaggttgcagtgagccatgatcatgccactgcactcctgcctgggcaacaagagtgaaactctgtctcagttaaaaaaaaaaaaaacaaaaaaactatggaagaaacttacagaagcaatcaacaagtttatgttgaatactattcactggattcttttaggaatgcattggataaaataacagcagttacatcagtagcatttcccaaattatgttccttggaaagctaactctggtagacagcacctttcccctaagaaaggttactgtggtcaaacgcgtctgggggaaatgctacatgttaagttctcatggagagtcagaaaacaaatcaataatttcagggctctgagatgccctgcaatgaaaaacctgattaaacttgtttaaaccaaagctctgcacatctatttggacatgaaacttcttttccttcttgttatatgaataagcattcacgtgccaccagtgcagtgctgaaatctcagatttcatcattacgagggagacaagccatattcaatggggtctttctaaaagctactctttctgaggacctactgtgtaccagctttccgctgggacctaacatacatgatctcatttagatcccaaaacagctgcccgaaagggtattttattctcatttgctgttaggaaactgagaatttgaagggttattaatgggtccaagactacctatctagtaagtaacaaagattttaaggtttttctctctcattcttccatccatccattctttgtttactcagtaaacgtttattgagcatctagtttaggccaagcgctgtgctagatgacagacatacctgggactcctaggcagggatattccttccctctcggagcttataatctaatggagagtcacaatccataatcaagcagacatagttaatttcagatttggtatatggaacagtggaaaagaaagtttttatgataaagaaagtgaggcagagctgttggttttgagaagatgctgacaaagggacttcttgagatggggtagtcagtggaagcccctgcaacaccccaagaccttaagtctaaaagaggcagccataccgagagccaggggaaggcattctccatagagaggtcagcaaatgcaaaggccctgagtcagaaatgagctgcgggcattcaaagatcaggaaggagccagtgtggctggtgcctaagggacataaagagacagccggggtggtgaatacaggtaatcaagacttgcttattctaagtgtgaggggaagcattagagggtcctcagcatggcagtgtcagatttaatcgatattttcattcaagggattgcaagagaacaggagaggaagtgggagactagccccaaggccgttgcacatgagcaccggagtgtctggcctcagtacaatgttcctctaactctctcacctccttctcaaagttatcatctcagcaatctttacccttaggccaaggtgcttcattgctccagtgttttccgaactcttctgtgggaattgccttggaagatagcatcactgtttcaaaacaaaaacaagaaaaactaggcacctatatcatagatcggacctaagataatttgaggaaatcaaagagtggcactaaacagttgtgtcactgaaccaggcgtcttccatgtagccttatggggttctcctgacaaccatgggagttggtgagagtgggactatggtctccatttcaatgactgaagaaacagagacctttggaggttaaggtcttactccaggccacatggctggtggatgtaggcgagaccccctccctacaaaaaatccaagaattagtcacgtgtggtggcacacacctgtggtcccagttacttgggaggctgaggtgggaggatcacctgagctcaagaggttgaggctgcagtgagctgagatcacgccactgcactgcagccggggcgaaaaaaaatacatacaaataaaataaaataaaataaaaacaacattgttttgaatgtgtgtgggtggggcggacatgctccactggctgcaatcctgtttcttgtgcctgcttgatccacacatttactcaccaaggctgcggaagtttgttccaaaggctttgcggtgagtcctgagatcttcacctagccgtgtacatttctttgcttgcggtaaccgttggccagcaggtggcagtagaacctctagtttttgttaaatcagggacgcattatctacagggattggcaaacaatggcttgtgagccagatccagcctgctgactattttcattaataaagcattattaggacgacattcattacatattaactgtggctgcttttgtgctacaggcagcagggctcagtagtcgcaatgagaccatatggtctgcaaaacctaaaatatttagtgtctggctctttctagaaaatgcttgacaacccttatattattaatatgtcacaaagggggctaatagggatcttgtgtgttgccttcttgactttttaaactctgtttggtctgaaatctaaacctgaaataataaaggctaaatgaattttaggaagttctccttaacatttacaagattaccaaagtataagcataagactgccttattgctgctcaggtttccagaatattctagctaaaagtttccatagttctgtttctatctcatttctcctgaataccctggatatggggattgatgcagatgaaaaattaaggaagaaaataattgctaatggactgaccatggctcagcccaaaggccacatgcaaatgatacgtaaatcatgcaatctctgtgactcatttacatatcatcctgagaggcctttggaaaaaattctgccttaagtacatttacttatttctgttatagagaaagttgttgccacctaatttgattgtgggctttcttgaaatgtaactgttgattttaaattctttttggaaaagatgtttccagccctctgaagcttcatcgaacagagacttttccagcctacagatctgagcactgacagtaactgccaagaattgttaacacacttgtgatgtgtcagccacagattcacccaggaggtcacagaatgacagcaagggaaatgacgaccaagagaagaagcttaaagtcctggctaattgtgtggtcattggaaaactctgcaatacaataattttctttattttctttttcttttttaaattcttagtgtaattgaaacgtgctctatagatattgactctgtgttccctcttttacagctggacagaaagaagtcaatgtcacgaaatgattttctattgtagatactttgtcccttgcacttctctgaatctgtccttttgtggattcttgtgattttccttccaagtgtttcagttgtatgacagtcagtattgacaataaaatggcttttaattatttgttatttgtttacaccctattcctcagttattattactgtggttctgattaactactggaaattatatttgattatatcaccaattagttaaatcagtgcttcgactcactcttatctgttctgttcaaaactatttgttcaaagaacccgttagtgttgtttacagggttacagtttctctcacatgctttcctcacccctttacccccctttttgaaagcctttattttgttcggagtctcttcataaaacatttgaaaataaaagatcattcttcaccca

SEQ ID NO: 1174 - DNA, 11090 bp, Homo sapiens
ggccccttcgtggcgaccacaagtcctatcacgccacaagaatctcggcttgttcacctacaaatgaaggccgacgatacttgcagaccgagtctgacatctatgggaccccactcctaccctgcgcctcaggggccgggacaaccgtgacccgtaccgactcctcgcgcctccgggatcaacctcagacccctgtgggctcccggggaagacgcatgcgcactgctccctcctcgtctccttcccttcgttaattagtccatcgcatttcaagtgctggatcctttttgtcccctactgcgtgcggtggcagcttccttgcggaagtggtgaccgtgagagaagaagatggcggcccctgtagtggcgccgcctggtgtggtggttagtcgggctaacaagcgcagcggcgcggggccgggaggcagcggtggcgggggagccagaggggcggaggaggaaccgccgccgcccctacaagcagttctggtggccgatagcttcgatcgccgcttcttccccatctccaaggaccagcctcgggtgagcgccgcgcacgcgagcagccagagggcaggaagggtggcagggctggagcaagttctcatttcggctaactacaacagcatgcccttgaaggacctgcgtctatgctgttatcctaaaaccggatgcagagggactgtctaaaccctgatgactgctgaccaagttagtggccggcagatttgggcattcgtaatgctgtccacctcgggtttgaaaggaatgaagagagctaaatgtagaaacagcgcttgagagaagccttcacgcggggattcagtgcccctagaagaggctgcgccgcttttaaccttgccgatgacggttgcttaggtgaaaagaaacgaccttttgcctctgaaagggcggtaatatgccttaaaaagagcgggctagatctcaggcagtgtattttttttttccttccaggttctaatgatagccggtgctatctgtcgaaaggacaaaatgggtttagtggttgattgccatcagcccccgagttgtctagacaatggggtattggactcagctgggtcgttcagcagtcagttcagaaagagggaactgcattggatttaaggaaaatcctctctaattccctcgaaaaagcctaatggctgttcatttttgacaagtgacgggagatggctaacctctgacacttagaaagggatcaaggaaggaaatcttatggggaagaaggccttagcaatgcttaaatttatggaaatatgattgatttccagtattatcctttgccagcagtgaactgccattctgtcacagctctgtgtctgatacaaggcacatagattctgtacttaccatccccaaattgcaatgtctcagactcaggcttagagcatggcatgaacatcaaaggcaggaacctgtttatctttgaattggaaagatacagcaaaattacactgtttggaaatacgaatagaggagtgaaaattgttgcagtggggtacccaaagggattcgagacctcaagttttttttcatcttgtatccttcaggtcctcttgcccctggccaatgtggcattaattgactacactctggaattcctgactgccacaggtgtacaggaaacatttgtcttttgttgctggaaagctgctcaaatcaaagaacatttactgtaaggccctgcaacttttctttccatgtttcgccatctttttccagttttttcaggatgaatgtaactaaggggaaatgtgagaggggaaaaatgtgtctacttagatgtcattgtaagttctaagggtattttctacacttatcaggaggtgagcagctgaaactttgtatctgtctgtcttgggttttctgtgacaaagattaaagaataaacttgggttttttctgaatctcattataaagtttggtgccagtggactttgcttttatttaatggcttcagtatggaagttacaatgataacatctttgttttcccactgagtttctaaatcttgtttgttctcaccttcaaggatataaatgagctccttgtcatctttgtattcccactgcctagctcagtcccaagcatatagtgagcacttacatgtttgttgaaatcttgaaaactagggaatcgcattgcttatggaagtccaggatgtaaagactaggacattagcatggtctccatcagacagttcctaaatgttatatggattgcagaaggggaaagctgacgtgaagcgtgttcccaggctactttgtgtaccctaggcttcagcaggattttgagttcaaattgatgtttagggacaaggggtcaaggtatggagaggaaataaccatgtttcctaacccataaaacaagactggtgacacaggatgctgaaagcattcattatagttcataatactctttgaagttgaagacgctggcaagaacccaaaaaagccatcgagaaggactgtgagtgctgaaagggggtgaaaaatggggaaggctcaaatgatctttatgcttgatacactcattcccctcaccctcccttcctttaggaagtcaaagtggtgccgccctacatctctcaatgtggttcgaataattacatcagagctctatcgatcactgggagatgtcctccgtgatgttgatgccaaggctttggtgcgctctgactttcttctggtgtatggggatgtcatctcaaacatcaatatcaccagagcccttgaggaacacaggtcaggatgggaaaatgacaggaacaagggttaaagaccagcagagccctgagactgcttttttgcagttctgtccctcctgtcctttataggttgagacggaagctagaaaaaaatgtttctgtgatgacgatgatcttcaaggagtcatcccccagccacccaactcgttgccacgaagacaatgtggtagtggctgtggatagtaccacaaacagggttctccattttcagaagacccagggtctccggcgttttgcatttcctctggtgtgtggatatctggggtcctttgagatggggaagtgacaggcttcagtgggagaaacaaattaaagtccttgtaacttctccccacagagcctgtttcagggcagtagtgatggagtggaggttcgatatgatttactggattgtcatatcagcatctgttctcctcaggtgagctctttagggctggggctgcacacccaaagagtagaactctgtgggtctgttattgtccccttagaaggccagggtatatttcttctccctgtttattttcattatttttacttttattttttgagacagagtctcgctctgttgcccaggctggagtgcagtggtgtgatcccagctcactgcagactctgcctcctaggttcaagtgattctcctgcctcagcctcctgagtagcagggattacaggcacaccaccatgcctggctaatttttgtatttttagtagagatggggtttcaccatgttggccaggctggtctcgaactcctggtctcaagtgatctacctgtctcagcctcccaaagtgctgggattacaggcatgagccaccacacctggccttattttcatttttatttatatatattttttgagacagggtctcgctctgtggcccaggctggagcacagtggcaccatgactgctcactgcagcctcagcctcccaggttcaagggaacctcctgcctcagcctcctgagtagatggaaccacaggcatgcactaccactaatttttgtatttttttgtagagacggggttttgccatgttgtccggcctggtcacgaactcctgagctcaagcaatctgaccacctcagccttccaaaatgctgggattacaggcatgagccaccagttttttttgttgttgttgttgttattgttgttttgagatggagcctcgctctgtcgcccaggctggagtgcagtggcatgatctcagcttactgcagcctccacctcctgggttccagtgattctcctgcctcagcctctcaagtagctgggactacaggtacgcaccaccacatccggctattttttgtatttttcagtagagatggggtttcaccatattggccaggctggtctctaactcctgacctcaggtgatcctcccgccttggcctcccaaagtgctgcaatcacaggtgtgagcctctgcacccagcattttttttttttttttttttttttttttgagtcggagtttcactcttgttgcccaggctggatgcaatggtgcgatctcagctcactgcaacctccacctcccaggttcaagcaattcccctgcctcagcctcccaaatagctgggattgcaggcatgtgccaccacacccagctaatttttgtatttttagtagagacgaggttttaccatgttggtcaggctggtctcgaactcccaacctcaggtgatctgcctgcctcggcctcccaaagtgctggcattacgggcatgagccactgcacctggccttttttttttttttagaatctattgtaaagcaaagatcttgtctccagtatcccactgggagtctctttggaattctggtccatgttcagctgtcatagggtttgctaggtctctgggggattatctgtgctcctagagaatagtacttaatcctggccaagcgtggtggctcacgcttgtaatcccagcactttgggaggccgaggtgagtggatcatgaggtcaggagttcaagaccagcctgaccaacacagtgaaatcccatctctactaaaaaataaaaatacaaaaattagctgggcgtggtggcggacgcttgtaatcccagctacttgggaggctgaggcacaagaatcactttaacccaggaggtggaggttgcagtgagccgagatcatgcaactgcactccagcctgggcaacagagctagacttgtctcaaaaaaaaaaaaaaaagaatagtacttaattctagcccactccacttcccttccacaggtggcacaactctttacagacaactttgactaccaaactcgagatgactttgtgcgaggtctcttagtgaatgaggaggtgagaaaagtcttccaatgcctctttaggagagaggagaaggctatgattgtatctcatgctggtaacttttgatcttttttgtattttattgaggcttaggagggaggaaaagcaggggacaggaggaacagtacacaaagaagaatctttgtggcagtgagaggcagaggggaacttaaaaggattagaaaagttgtacttgggggcattcttcctgtctttcttgcttaggtgacctccctttccttctcattcagatcctagggaaccagatccacatgcacgtaacagctaaggaatatggtgcccgtgtctccaacctacacatgtactcagctgtctgtgctgacgtcatccgccgatgggtctaccctctcaccccagaggcgaacttcactgacagcaccacccagagctgcactcattcccggcacaacatctaccgagggcctgaggtcagcctgggccatggcagcatcctagaggaaaatgtgctcctgggctctggcactgtcattggcagcaattgctttatcaccaacagtgtcattggccccggctgccacattggtgagcacaggtggggaatcaagccaactatcctaggaacaggaacctgggggggccacgtctccagaaacacaagggatggctacacaagggacagtccctgggaataaggaactatagagcggctacctcaggaaaggaggaaacagggatttgaaaacagcgataccttaatttgtagcctgtgggcctctcattggatgactcttcacattccagggtaccctgtagtcacattcaggagcaagtagataattaacatgcagtaacaacatctatttagcacattacagtttacaaagggcttttatatacattgttacatttaatcttcataatttacaaataaacaggctcaacaagattttcttgcccaaggtcattggtaataatggtgggacctgaatctgggtattctgaatgtaagtccagtgttcttttgagtctaccataactgcctggttggcctcttggtatctcattttggttgcaggagtgtgatgcgtctaatagtactgcccctttccaagaacaacagtaaggctcagattctaggggctgagcgtggtggctcatgcttgtaatcctagcacactgggaagccatggtgggaggatcgcttgagcccaggagttcaagaccagcctgggcaacatagcgacaccccttctccacaaatgatacaaaaattagctgggcatgatggcgcgtgcctgtaatctcagctattcgggaggctgaggcaggaggattacctgagcccagaggtcgagggtgcagtgagtcatgatcatactactgcactccagcctgggtgatggaatgagaccgtgtctcaaaagaaaaaaaagacttggtttctaaaatgtaccagaagaggtggaattatttggttctgcttgtaggcgtggatatgattctaataaggttttttgagttcagagggtccccagaaatcctgaaggttctcgggttcttaagctctgtgtgtagtctataattgttgtaaacttggtgaagtatcttctcaggcctgggcttagggggtgagtgggtgtttctggtgacttgcgggatggggaatgagagctaggtgggagctgtgctggtgtcagtcagccctgtcctctatgaagggctctgctctgcggttggaaccctgagttacccagaggtcttcccatcctgagccaggtgataacgtggtgctggaccagacctacctgtggcagggtgttcgagtggcggctggagcacagatccatcagtctctgctttgtgacaatgctgaggtcaaggaacgagtgacactgaaaccacgctctgtcctcacttcccaggtgagacctgatctatactgtgcacaggccctgaattgcatggcagtcacactgagccagaaggggcattatttccacccataatcctgtctaaaaaagttgctctcattatcaggatgcacttttcctccacaccctaatggttctgtgttttttttccccttaggtggtcgtgggcccaaatatcacgctgcctgagggctcggtgatctctttgcaccctccagatgcagaggaagatgaagatgatggcgagttcagtgatgattctggggctgaccaagaaaaggacaaagtgaagatgaaaggtgtgagactcaacaggtgtggggcatctgtgtgtctcgctgcctcatagaagaaccagtgtttcctcctggagggattggtgcttccgccgggccctctctatagatcattgccttttccaggttacaatccagcagaagtaggagctgctggcaagggctacctctggaaagctgcaggcatgaacatggaggaagaggaggaactgcagcagaatctgtggggtgagctaggcctgatgcctgcccttctcctcctgaatcggaatattttgaaggataatgaatacttcagagtcacattacttattcactcctttattcaggcagacagggcaggtatattgctctctgtcaatgactctttttttctttttcctcacccattatggcttctcaggactcaagatcaacatggaagaagagagtgaaagtgaaagtgagcaaagtatggattctgaggagccggacagccggggaggctcccctcagatggatgacatcaaaggtgagtggcaggggagaaatgcgctggaccagtttattctctgcctggatcaactagccagaggcttacgttcctcagaaagggtttggtatcgagtcaagactagatgacttagagcattctgaatgatgttggcccatgaacttatccttgctttgatttcagtgttccagaatgaagttttaggaacactacagcggggcaaagaggagaacatttcttgtgacaatctcgtcctggaaatcaactctctcaagtaagagcagcccctccctgttctcctcggggtgatcccgggaaggtagaggctttctcgtaagtgttttgtctccaaataggaacctattccttcgacatcccaaatggaaagaccagtagtatttggagcaaggagagcattattaagttctagcctcagcatagactttctccttcctaaaccctccccttccatattgttccatccagattcctctccaatgtctatcaaagtcatagttctaagcctgctgaaaggccagtgaaggccctggtgtcaccccagtctccccacaggtatgcctataacataagtctaaaggaggtgatgcaggtactgagccacgtggtcctggagttccccctgcaacagatggattccccgcttgactcaagccgctactgtgccctgctgcttcctgtgagcaaagattggagctgagtacaagggattgggtacaggcaaaggaaatcaggagtagactgtcttgttatattgggtgtatgtcacttctggttcctttttccttgcctctggaagctggttgggctctagagcagccttggctggttcagaggggtcagattgagttcaatactgactggcctttgagactccaggatttcataccatcctaggcccacaaaggtatattcagaatggacctggacattcagactctatggcagcaatttgacccaacacaagatcagcctctggggtgggaataggtattttgaggcagcctatagcatctgatcccctttcaccttccctaaggaatctctttttcccaaaccctgtcaacaactcccaagtccctctgacataattccacagaacctgtatcatctcccttttgtccacccatgtcatcagtatggatttgcttggatgtccaggtataggtgaatgcttaggaatatactgcagctcccttctttcttccatagctgctaaaggcctggagccctgtttttaggaactacataaagcgcgcagccgaccatttggaagcgttagcagccattgaggacttcttcctagagcatgaagctcttggtatttccatggccaaggtgaatatgacctcaagccccattcttctgcacttgctttcaaacgagggttggtgacccccttgggagacataaaatagaagctaatgtgaatccagtatggaccatccactcccaatatgcttattgctagaatagtacagcttggagccggactaataaggtagccatctggggggtggtctggaaatgtgcaaagctctccccagcaatagttccagaagttagacctgccccaggagcagagcgaacagctcactcttgtccgttttggaggaggctactcagtgcatagagggatctgagggcctggtagagtatcctgctggactttccaaggcccctgaggtcccctttattggccttttgcaggtactgatggctttctaccagctggagatcctggctgaggaaacaattctgagctggttcagccaaagagatacaactgacaagggccagcagttgcgcaagaatcaacaggtgcgtcaggctgtcctcctctcgccaagatggttatctcattcccaggtcctggcccctagactctagggtggttggtttctggggctctggttgttagagctgtttatctgccgaggggagcaggagagttatgtgcacctcccccagccgatctctcctctgcttctttacagctgcagaggttcatccagtggctaaaagaggcagaagaggagtcatctgaagatgactgaagtcacactgcctgctcctttgggtgtgattgagtgccctcctggctcctgggctgggacaagtgaggaactagctgcagagggatgagtgaccaccatccaggctgagactgaaaggagcagaggctggaactacagtattctttcccctgctagcaaccatgtgcctcccatcctgactgtggagttgggatgtggaagtggggctggaacaaagcttctgcctagggaggagctaagcaggcccggcagttggaggaaggccagaggaacagctttgtgctccggctttccctcagggaacagcagagagcagttggctctttctgctgcttgtatatgttaatattaaaagagagagtggtgtatttggtttgtctccatccctgactaatcagccagtgaagtatgtgaccagaatcacatgatagcctttccttaacacctgggggagagggaggacgggtgtgccagccactaggtggtactgtggtaccttgctaattaacctttcccatggctcatgggtagtggagggcggaggttcttttccagcctctgtggaccaacttgtgatcctggggtggtgtgcctaagcccgtttccatagagtcccattttgaacacttttctgccagaggattatgttgccaaccatatgtaaagcccattagacatgccagttcctttcacatgccttttccagttgatctggtactcgttctgtcaggaagctgggccacgcttcatcagaaataaggaaatcagctcaaggtcacatgactcttgaggggtaaagctaaggacttgaccctcagaatccagaactctgtccttcagcgtattgtgtttcagtgaagggaaaattggccccacagacaaatataacccagagccagtaatggaggtcccaagaacacaggaaggccatgtgaagggtgctttcccttgagagtgtttactatgtgacaggcaagcagttttcacatattgtttcatttaatcctcacatgagccccatgaagtcttatccccattttcagataaggtgcctgaagctcacagagcttccctagctagtaactgacagagccaggtgtgatattggactcttgacctggagcttgttactttgctgtattgctttaaccttaaccaaaagagacatgcctttctgtcttttc

SEQ ID NO: 1175 - DNA, 26454 bp, Homo sapiens
aagctcggtgcacggcgcgctgattggctggatccgccatgcggagcggctaggtggtgcacgggaaacgcgggcgtaggtgaccggcggctttctcagttttggtggagacgggcgcatgtgggcgctttgctcgctgctgcggtccgcggccggacgcaccatgtcgcagggacgcaccatatcgcaggcacccgcccgccgcgagcggccgcgcaaggacccgctgcggcacctgcgcacgcgagagaagcgcggaccgtcggggtgctccggcggcccaaacaccgtgtacctgcaggtggtggcagcgggtagccgggactcgggcgccgcgctctacgtcttctccgagttcaaccggtcagtcaacgagccacgccccgtcccgctgggccctcagtgcggcgcagcctctgagcatcggggcacctcccagggcttcggcttccctgcttcacacatgtggttcactgttgcgggggttcgtggagttatggtgggtgggaaatccgagattctttgcatccatgtgatttctgcggatctgtgaagaacttcaggcctgggtctgagcgtccttttcccaacccttgggccccggcctggctgtcagcactttcggagctccaccctcttccgtgcaccccaaggccagtgtgtcgttgttagcgtgtggggtggacagatctggtgtgtagccggtggtggagaaaggactcattttgtcctagcacccacacacacaggcccccactcctctccacctctgctaaggagggctcaaaacccaccagcataaatgtggctcggtagtccaacgtggacttttaatttttttttcttttttttttttccagagtctacaataaaacatctaattggtgtcagagagtttacagaataaaaccttctgaatgtcttgtgtaatgtttgtcttgtaggtatctcttcaactgtggagaaggcgttcagagactcatgcaggagcacaagtgagtcagtctcttgctttcggagggggagttgattacggggcttgaaagccgaaatgagaggccagttgttttttatagcaaaagtggtccttgttctgttcatgttatcctgtttaaatgttttttcattcttaggttaaaggttgctcgcctggacaacatattcctgacacgaatgcactggtctaatgttgggggcttaagtggtgagtatattctttgcagtgtcagaggctggtgggaagtctctgggattttaaccggctttaccatttttccaagtctggggtgggcagctacttttttttttttttttttttttgtcagtggcgtgatcttggctcactgcaacctttgccttctgggctcaggtgatcccctcacctcagcctcccaaatagctgggaccacacgtgtgccccatcacacctggctaattttttttgtatgttttgtagcgacggggttttgctatgttgcccaggctggtctcaaacttctgcgatcctcctgtctcggcctcccagagtgctgggattacaggcatgagccaccgcacctggcctggaattctttttataccagcccagtcagcagcagcacagagcattaaaagctgtgactcaggagaacagattttaatatggataccacctcttaagtgttaccatccacttagtttcttgcgttgcggggacagagatttgtggcagtaaactggagagtctagcagtggtgattacagttaatatgtttaccgcagacgccattggcacattggcagccacacacatacccactgtccagattaccctgtcatttatgtctatcaaccggaaggtcaggattgtgttgcagccaaattgtgtgggcttggtggcatggaccggaaggagtgaagtgttagaccagtctcccttctcagggctgagactagggtgaggcacttagggtgccagcccttcacttgcatgattccttacattttgcacactgggtgccttgctgcttcaccctagtgacagctcagcccattctagaggcatttaaagaatatttggtgtctgttacacctctagctggcatcacttctgctctgtacatcttccctggttgtacttccaaagctggaaggtggagatgtagataaatagttggattagtacggggtgctcctcctgttagtgacgacaggtcaaattgatgagagatctgattttatgcatcctttttaggaatgattcttactttaaaggaaaccgggcttccaaagtgtgtactttctggacctccacaactggtgagtctttcctgacacatctttcaaaagcaatctttccttttgtaatatcagtaacaagaattttcctttttgcaaatcagtcttctgccctccagagatacctggtcgttgaaacgcttcccctttcaagttaaaaagacttgagttctgattaactatgtgaccttgatcaagttactttacctttctgagctttagtttattcatctataagatgactatcacgtttcatagagttgttaaagattaaatgacgtagcagcacatataaagcactaaatcactttattagatatatgtttggcaccaagtaggcacacaagaaagggcagcttttgtttttattcaataaatttctgacatcttcttacctttcagtccagcttattacactcttgagaaggcgtgtgtgtgttgttgaatataacagttcattttccagtccttaagaagaaagtcaccaagacctgttaagtctttccccaaaataacgtttgaaatccatccatttgtctcttattgaggccttccttatttctgttttctatgcctgtaaactacaatagcctcccatattcattctcgccttcctgtaatccatctgccacacagcagccagagaggtcacttcaagacagaaaagtagtgtgtcacttgccaccctaaagcccttcatgggctccccattgcaatacaatcaaaacaccttgatatggcctacaagtcctgtaggccccggccgctacccacacttccatctgtacccatcgctgaactgcagctgcatgggctgactcttatgtccctctaactccctggccacttcaggactttcgcccttccgcgggttccctctgcctcttctaattgctgcctatattgttactgaaccttcagggctcagctagagggtcatttactccagaactgcctcttcttctctagacaagttggatcccagccttctgtatttttcattttccttgcagagcacttagcataatgccactaagctgtttctgttatcgtgtttccttttgtctcctccactggcctgattagagcaaggcctccatctctttttcctgctatatccttggcatctgatataatggatactcagtaaatatttgtaataaatgatgttcaaaatatttactaagctttgttttatgttgatacctattggtaaccttttaaatacttgaatagttgctgtgttctacatttgttcaaccataactgctcatttctttgtttttcattaggaaaaatacctcgaagcaatcaaaatattttctggtccattgaaaggaatagaactgggtacgtctttgtctgtgactcatcctctgctatttctaacttatatatgccctgacctctcaaattagaatccattaaaaacatcaacatcaaacctcaaaatcaaatgcttcatcaccacgagatttttttttttttttttttttttggatagagtcttgctttcttaccaggctggagtgcagtggcatgatctcggctcactgcaacctccacctcctgggttcaagccattctcccacctcagcctcctgagtagctaggactacaggcgcatgccatcacgctcagctaattttttgtatttttagtagagacggggtttcaccatgttggccaggatagtctcgatctcttgaccttgtgatctgcccgcctcagcctcccaaaatgagctaccatgtggctggagatgggatttctaaatagtgacattttctgtgttcccacctcatgctgtaaaaataggggccaggtcggcaggagtgattgaacagctgatgcctgcctgtgtacatgctgtgtggcattctccatccagacggcagggctcctgcctcagttccagaggtgcttctcgtcgttgagttgctttgagttgggggcgggggtgacaagggttccctagaggttttgtggccaactttgtacattgaaacgcagctccagctgcgcaggggggcttacagcctcttgatgggaagaggcctcactgaggatgctagtagggctcttgtcctggcactggtgtgtatctgtggcttgttaatactcctcttttatagaaacactaatactttgtttcaaaatatacatcagctcttctggtttgcgatgataggttccctggcttcactattctgtttgttaacttgggtctctgaaagttgagtactagtttcttgtttttcaatttttaacggatagtcaccaaagattataatgtcttttcatctggctgtagtaaatataaatggctgaccaaaatacacttttatttatttcctaaaaatggtaatctccttagaaagtctggttttcgtgtcagattcccaccataattctgaggcaattcagttgctcgtggttggtgatcctgaagttactcttcccacacatcttcactaatgcaatcactttgctgttgtgtggttttcttgtagctgtgcggccccactctgccccagaatacgaggatgaaaccatgacagtttaccagatccccatacacagtgagtatgaaagccaggtttcccaggaggagggtgtacgtcctgagtaaagaaaacatggatgaaaatagaaactgaacacttgctgtgggcaccctgttttgtgttctgagcatgattagaaaatttagttgaggaatgaagatatggctcctgccctggcttataaacttacggatgtctgacttatgcctaatgatagtgattatgctttggaatattagataatcaagcactgttggtaaatagattgcattcaagtttgcacattcattgcttggaggttttttcccacaggcgtaataccctcttttgatcagacgatcatgaagaggtttgcacagatagatttttttaaataaataatgattacagcaacctaaaagaagtgttgttgggggttagaagctcctgcaaattccgaagtatcagggccagatgatgtggtcttagcttaggaaaagagttagtcttgtccttgaacttggctaaagacattcatgtctggttttacttacatgtgaagagagtaccaagcagtaggggtatttccttgttagtactaactaatgtgatgcttactaagtagtgctgatgggtgacagaccagagcacccagcaaaggccagagaagtccagaacctggcgaggagatgaggcttacactgactgaaggcagaaggcagcagggaggagaggaatgtgccggagcaatggcacaagtgctcctaggccagtgctgtgatgagctgatcagcactcccattgcctggcttgctcctcctgctcagatgccttctctcacctgacccctgctgtagccacccccagcctgagttgcatccacctgtttgttgtccatttccagcaccctgttcttcgctccatggcatgtgacagttaactttcatatgtgatttgcgtgatcgatgttaacatgctcagttttgccgatcactgttttttcagtgtccagcggccctcagtgagtgaacttacgttcattctcgttgcagctgtgctttagcttcttagagcagcgaatttttttcccttgatcttgagccttaactaaatgtaaaatgaggctccttcttgagataggtaccctttgggtctatgtgttttagcgggagtgatgataataaataagcatgtctacaacccacatgctgtttagataacacgttgttgagttggtactgtggccgaggctgtgagctaagcagaaacataaacattaataggacataggtgcagcccagaaaccaggtaggaagttaactaactagttatttcctactgtatagtaaaaggtgtgctgatttaattggcgttctggcattcccatgtatgaacgtctgggccttggctgtcagctcaccttgtgcagtgtgtaatttggtggtatctgtactgaccaggtgaacagaggaggggaaagcaccaaccatggcagagtccagaaaggcctctcagcaggctcagtccagagcgatcttcagactccgagtcgaatgaaaatgagccacaccttccacatggtaatagtataaacaaaacagagcagcagaaaggcttgcgttttcttaattctctgccttgtaatgcttgtagagagtcattattgtaagaaagccaggtgtgtaaacagatccttcttcctgggcttactataacttggcccgttgggggaatgagaagggttgttgtaaaggtggcagcctgcaactttaataatgaccagtccacagttttggccacccagggtctgggtaggcccaaaactgtgttctgttttcccagaggagaacagggcctgacaaacggattcattttgtatttttcattaatgtaacatttatgcaaattttccattaatgtggaaactataactgctaagccaatgagacagtcaaatcagtgagaggctctgcacgtcttccagaatgacagcccactgggaaacggagttaaaagtccaagatgagatgtagctcaggagtcaggccgcttcgggagtttgttgtccttaacagaaggtcagcgttggcaaagctcggcagctcctctttctgtcctgaggtcttgtctagtgactgagaacaggctgacccctatgtgctgtccttgtttggatggcaccgggtaaagactgacaccagcattttctctgcaggcctttgaacttttgtgttatttcatatattatatgtgttataaagcacattacaatatatttttctctgtcttctccagtcctaggtgaaatgtgtcatttaaaaaaaatttcacttgccattctaaagtttttctggtgagagttttgtgtttttcatttacgcaaacacatctccacataagtagggaaaaaaagtcttcttgagtatattagtgtcttcagcctttgtattgggacagtagcgtccattaatttttatgtgaagtgaaattaggtatcgggtcataatcagtctgtgatgtcttcacagctttcacatttaccttgtgataatcaagtgtgtttttcctcaggtgttagccagagaagaggggtcagggactcttccctggtcgtagctttcatctgtaaggtaaggaagactttccggagggctgtacatgactggggtcttggtcagcgacctctggtttgcactttttcattaatttgagggtaggcactcctgttacctgagacaagaagagatagcagatcttcagaaaagctgatggaaggccgggtgcagtggctcacgcctgtaatcccagcactttgggagtccaaggcaggtggatcacgaggtcaggagtttgagaacagcctgaccaacgtggtgaaaccctgtctgtactaaaaatacaaaaattagctgggtgtggtggcgcatgcctgtaatcccagctacttgagaggccaaggcaagagaatcgcttgaacacaggaggcggaggttgcagtgagttgagattgcaccattgcactccagcctgggtgacagagcaagactctctcaaagaaaaaaaaaattcgatagaaatgacactggcaatgagcctgcaacaagtattactactgacctttcataattgtcatcacttgtaggtttcagagtttagatgctctgtttctcaaaataaccccatacttttatttccttttaaatttttttccagtgccctgtcagcctccgtacattttttttttttttttttgagaccatgtctgtctccatcgcctaggctggagtgtgcagtggcacaatctcggctcactgcagcctccacctcccaggttcaagtgattctcctgcctcagcctcccaagtagctaggattataggtgcgcgccaccacacccagttaatttttgtatttttagtagagatggggtttcaccatgttggccaggctggtttcactcctgacctcaggtgatccacccaccttggcctcccaaaatgctgggattacaggcgtgaagcactgtgcctggtccatattcttttatatttgccaatgattggtccttttagaattcagaaattattgaaggcagctgtgtttgttttccttcaactccatcaggcctttattcaaagtcttttaactctgttttactttatttcattcccctgcaatagctaaggtctaacaccagattaattggaatattagctagcattcacaaaggcctagatctgtaactctgaaattggtcaaattccattaaaaatttttgttacaataagctgtttgtaagatctgactagtggcttatttttaatagaattttgcattaaaattttatcaatacaatttgcaacaaatttgtctaaatatgtgaaaagatttcattgcctttttgtgggcttagattattttttaatgttgattttgaaatatatttggaattgttatctaaattctaaaagctacaagtgaaaataataatgaaagtaagtagttaatattagtggcaagatcattgccagtatcatttctatcgatttatttgaataatgtgattttcataaaagttaagtactactgttaacaggcttattacttgtatgtttctgagttttagatagcaaaatcattttttaaagttttaaaaatattttatttttgataatctatatttatattgtctgatttttaaactgttttctatggtaatctttaaatcgtattcctgctttccggaataggtaacagtgagcatgatgaaaagtgacaagctcacttttacacactcgggcagttgccctattatcaggcagccgttcctgggggctgccagctgcctgccctggcttttccatctccttccttgctgtcttctgcggctccttctgagggctgctgtcactggattagcctataacgcctttcccctcttctaattaatttgctgctctcaggtgaggttttggaaagcaataaagctgagctaggtcaagttccaggagtctcttggcatgaggacctgaaaaactcatctgttggaagacctcggctttgggcagctggtgcactgttggggcgttattggctgcgttctggctctcatcagtcttccagatactctgcattcctcagagaggaacatatctccatgggttgagttcagctcccagggagatgggtttccctgccttaagtcggcaagtacctttttttttctttttttgagacagagtctcgctctgtcaccaggctggagtgcagtggtgcgatcttggctcactgcaacctctgcctcccagggtcaagcagttctcctgcctcagcctcccgagtagctgggactacaggagcgcaccaccatgcccagctaatttttgtatttttttagtagagacggggtttcaccatgttggccaggatggtctggatctcttgatttcctgatccgcctgccttggcctcccaaagtgctgggattacaggcgtgagccatcatgaccagcctttatgtttctttgtttgttttgtttttctgagatggagtctcgctctgttgcccaggctggagtgcagtgttgccatctcgacttactgcaacctctgccttccaggttcaagtgattccttgcctcagcctcccgtgtagctgggatcacaggtgcctgccaccatgcccggctaatttttgtattgttagtagacacagggtttcgccatgttggccaggctagtctcgaactcctgacctcaagtgatctgccttcctcagcctcctaaagtgctggggttacaggagtgaaccaccatgcccagccttcaattaccttttatttattttatttatttatttatttttgagacggagtctttctgtgttgcccaggctggagtgcggtggcgcaatcttagctcactgcaacctcctcctcccaggctcaagtgattctcatgcatcagcttcccgagtagctgggacttcaggtgcccgccaccacacttggctaatttttgtgtttttagtagagacggggtttcaccatgttggccaggctggtcttgaatttctgacctcaaatgatcctcctgcttcagcctcccaaagtgctgggattacaggcgtgagccactgcccccaacagcaagtaccttttaaacattagagacatttagttgccatcctcaaacccgtttgggtgtgtggagagaatgttgggtcgtgacatggttgttagttatctaaagatgtcagccatcaatcatcactgtgtgatgtgcacactgaagctgtaatccttcatctaggatgatattttttaagatggaaaattctacaaccctgagaataaggatttcagatccaaatttgagactcagccctacgagtaactctttaacttcagagagttaaaagaagatgcacagttgatgaagatttaaaggagaaaatggaaatcaaatgtcatttagcactcaaaggcctacatgtcatttctgacatttttctgtttgtgtgaaattttttttttcctataaaatgattgtgaagttttctggtagaattattgtttgcctttctaatgtaatagcatattagggtttttttttttttctttttctttttttgagacagagtctcactctgtcgcccaggctggagtgcagtggcacgatctcgggtcactgcaatcttccgcctcctgggttcctgcctcagcctcccgagtagctgggactacaggcgcacgtcaccacacccggctaattttttgtatttttagtagtgacagggattcaccgtcttagccagggtggtcttgatctcctgacctcatgatctacccgcctcggcttcccaaagtgctgggattacaggcatgagccgctgtgcctggctattagagattttttattataatttatctccaagataaaagcagtgacattatattgccacataattgaaaaatacaagagaaataaaaatcatccatgcttttgttagcctatcactgtcattgaaatattatgttacatggcagtttgcttgctggttgctctgttaggcaacgctctggtgacattcctttagctattaattgaggaatgtagaatgacagaacagtgtttctcctcaatgatacttgaaggatatttattaactttcatattgaattacattttattaaatttataatgagttaatgctgggaaataaaacactgatttaagtcattttggcttttagtactaaagcatttgacaataaatgacttcttcagaatatggtataccttctgaaagcaataaacgcattttaatgaattgtaaggaaacaacatcattttattttttatttttttttttgagacagactttcgcttttgttgcctaggctggagtgcaatggcgcgatctcggctcactgcaacatccgcctctgggttcaagcgattctcctgcctcagcttcctgagttgctgggattacaggcacgtgccaccacgcctggccaattttgtatttttagtagagacggggtttctccacgttggtcaggctggtctcaaactcctgacctcaggtgatctgcccgcctcagcctccgaaagtactggaattacaggcgtgagccaccgtgcctggccaacattattatttttttttaatctagaaaaatacacttctaagaaaattgattaaaaccaaccttcttcattagcccctaagatcacatctatgttctctttgttgcagcttcacttaaagagaggaaacttcttggtgctcaaagcaaaggagatgggcctcccagtgtgagtgtggggggtaaggcttctggggactcactgggtacacctgtccacttaaggaaatcacatttcacagaggccttgcctcttcatttcagtgggacagctgccatcgctcccatcattgctgctgtcaaggacgggaaaagcatcactcatgaaggaagagaggtgagatgcctggttttcttgattcagcagttacaggtagggtctgaaatgctgggcagagtctgtcttcttcaggccctacagacaccacttttgaaggacgtggaacagtttggacatcactcagctaagtgataaaatggcctcttttatctgtgtttgtcccgcatgtcaacacggctgcattcgagcatttttgtagattgtccatttaggatctagtcaccgtcctccttaaagggtgcatgctttccttggtacttgagctcaggacagtgtctaacaacagaccccatatggatgggcctggggtttatggtccagaggaatgccacagtattctatgtcaagatatttcctctgacttctgaggacattaggaccagtggccacagactgaagaaaaccttaatgccaagcctcctttcctggccagtgtaggcctgaagtgcctcaacctgacagttacctgtttaggtatccacaaagagaccagaagggtgttgatggtgatgtgtaaagttggttttgtgctttgtttacctctcagctcactggataggatatgtcatgttagcagttgccttgaaggcagttcagtttggtggctgagctgtgacccccagtgggcgggcttatttggttttgcagattttggctgaagagctgtgtactcctccagatcctggtgctgcttttgtggtggtagaatgtccagatgaaagcttcattcaacccatctgtgagaatgccacctttcagaggtaatgaggggtctctagggtgggagaagtgagagctgaaacccagcccagcatcgacatgggcatcttgtggcaagagctgtgtttctgggaagaccactatctgggtttacagttcagaggccggcactcctgccttaagtcactgttggtagttggtgggctccggtgtacacagcctcaaagtgaaattagaaaagattgaaaactagaaacaactgaggactagaaattcaactagaactcttacagctcttataccagaagaaattctagaacttttttgaattctaactaatgccccagattatcatttggattattttgaactgaattaattttcttccattacctgcattgaaacaaatgaggtgggtcagagtgtgtgagactgtcgtggtcaagagtccgtgttatgggatggactcacagctggggaatgtcttttgggctaactgccactctgttgttgtcctctatcgaagttaaccagttttgcggttcagctttcattccagatggaatcatctttgacccacctatctgagtttgaatcttttcccccactcttaatggtttacctgtatttttcctgttcctagtttgtatctatctgtattttttcacttgtttttttctacttaccacaacaaatccttttgggctgctgtaccccttccgagtcagagcgttaggagttgtttcatggtctgctttattctctgtgggtgaatttggatgcgctggtagccccggctttgtattttaatccagttttgggcagcaaaacctcttcaatgaatcaggtgtcatttgagagccatgtgtggatgtgtgatgatgctgggatagataaaaatagctactgtgtatatttctttttaaagggaactggagggaaacacatcagcatgttagtaagtggtctgttgtccaggtggtgaaatttcagatgattttcatttctcgtgcctgtgtctcaggtcctctggaaggcagacaccagggtggcattggaggtgcaggaggtttattcgaggaaatttgactgtgagagaggaaggagagagggagcaggaggaggcagggagagcctgggtctggctttgcaggttggacccgtatgagtggagagggtaggaaggaagtgcagtgctgagaaaggatcagccaggcctactggaaagcccagagcagagcttgccagatacaggaatcccacgtccattggaaatggcccagcaccggggtctgccgtgagcagcctgctgtgagagcatggcctgggcgtggaggctgtcagctcactgcagtgctgcagagggccgcacgatacccctccctggctgcgtggtccctgtcttggtgtgtcctgagtctgcatcactttgtaaagccccactcttctgcccaggtaccaaggaaaggcagatgcccccgtggccttggtggttcacatggccccagcatctgtgcttgtggacagcaggtaccagcagtggatggagaggtatggagcccagcccagcggcacttggggtaactcttctgggcagtggtggattcccctttcctcccctcgtgctctttccagcgctacctacccttctgcacctgcctaaactttctgtgggattcctgccttcccagaattctaggcttcccagatctgtgctacactcgtgaagaaaatgcaccgctaggtggcgcagtgtccacacgattccatttattttacaccctccacactcttcagggtgtctgaacaaatactgccgtttggttgaggattccataagtgaattccaaagaagagattgcagctataaaatgatagcttccatttactgaatgcccactttgtgggaggcagtgtgtgaaatacccttcatttcacttcatttcctctagggtcgtcgccagcagccctgggaggtagatgtttagtcactggaaggcatctttttcctcggggcatcgctggccagggccaggtggaggagtatgagttgagctcgggtgcggggtgaccttgggctgctttttggcccctgcccgtatctccccacatggcccgtttacctgcccctcactccatggcctgctctcctgctgtctctttcattcctcagggtttgggtcccctatttgtatgccctggacatcttctttttcttgtttttcctctcactcttcccagcacacctgaaaggcagctgagctagggaacaccgggctttgagacagcaggagtgggaccatgtttggccatgtagtaacactgcttggggcaagtcactgaactgtttgaacacctcatcctcattaccactcctgagctcagcaccactcctcagggggagctgcctcctaacagacgctgcaaatgccgggtctgtttcttcacaggtttgggcctgacacccagcacttggtcctgaatgagaactgtgcctcagttcacaaccttcgcagccacaagattcaaacccagctcaacctcatccacccggacatcttccccctgctcaccagtttccgctgtaaggtagtgtctcagaccggccccttgtcggcccagctctcgtcccctctctttctctccatgaatgtgttttgtctctttcagaaggagggccccaccctcagtgtgcccatggttcagggtgaatgcctcctcaagtaccagctccgtcccaggagggagtggcagaggtctgtgccatcttgaactaatggaatcgtctcagtcgagttgggaaacatttctgtaaatagccacatagtaaatgttccaggaggctctccagaccatatggtctctgttgtaactattcaactccgctttgagcacaaaagaaacacggacaataagctaatgaatgggcttggctgtgtgccagcgtgaatttatttagaaaagcagcctactccaggctgggttgaggtgggcggattggggccagtagttctccttttccaaaattgccttgcatgggaatagcagtgatagagctcgtgtgtttcacagtatagaaaataggaaatgtgtgatgaacaaagtcacccataatcctgttgcccagagataatgattgataacattttgtgtttcttgatttgtgtatgtgggtttatattgtcagtcttttcctgtatcactaaacagtcttaagtaacaagatttttattggtattccaaatagggatgtttactcatttgggatgtttccaattttttgttgtttttaatgaatgaaacaataaatgtcttatatataaatctttgatgggaactctgttcccttcaagtcattcctaaatgtgggattactggcccagagtgtgagacttgttaaggtacttgataaatgtaagatgccatcttgaaagcctcttccagtacaatccaaccaggaaagtgaacagccttactgccccacatctttattttaattaattaatttatttattttatttatttatttatttttttgagacggagtttcactcttgttgcccaggctggagtgcaatggcgtgatctcagctcactgcaacctccgcctcccgggttcaagcatttctcctgccccagcctcccgaatagctggaattacaggcgcctgctaccacgcccggctaattttttgtaattttagcagagacgggtttcaccatgttggcaggctggtctcgaactcctgacctcaggtgatccacccacctcagcctcccaaagtgttgggattacaggcgtgagccgtgcccggcctgttttaatttttaaggatctgaaccttgattttaagtttcctgcccactccacagtatttgtattagaatagagcatgtgctggattatgactggatgctgtgtgctgttgaggttgggtagttggggccctttaagagactatactagcaagactcgggcccacaggcaacatcacggggttgaagaacctggtgtccctttgttggcatctgcgcaggctcttaacacacagcagcgatacacagccctagccgacattcagatttaccttgtgcttgtgaaaaatattgcacagggcctgccctagacctagtgaattagaatcttgagagttaggcttgggactcacaagctcccagatgattttaatgctcagcgaggttgaagagccgcctgtccaaggagttgccactccgtgtgatctggggcttgctaggaaagtgggatctcaggcctcactgcagagctgccgaactggcttctgcgttttgccaaggttcctgggtgtgaacatgagtttcagagtcactcctctagggcccctgcttctcagctcggaccattgacccctcagaggacatttggcaacatctggaaacgttcttggttgtcacagcctaggaggtgggtagtggtgctgctagtgggtagaggtcaggggtactgcaccaggacagcagcactggccacagaaaaaaactgtcttgccctgagcatcagtagttccccgttgactggccctgaggcagagcgatgcagcatccaaaaggcggtggagcagacctgccccagatcctagtcacttaaccttcagtgttgatctgaaggaacttcctgcagattgtccccctgaatttattctggacatccccaatggggtctgctgaggccatataccctgtccgtcacctgagatgcttctctctcttcctgcagggatgccattattacttgcaatcctgaggaattcatagttgaggcgctgcagcttcccaacttccagcagagcgtgcaggagtacaggaggagtgcgcaggacggcccagccccagcaggtgagtgggagcccacagagcagcctttctttcctgggctctgcccctgctgctgttttcctagcattaagtggagtgctggtggggcgcattctaacctggcttttcagtctaatccagggcttctctactcagctctacattagaattatagtcattggaggagggggctttggggagtttaagaatcccaattcctggctgggcgcggtggctcacacctgtaatcccagcacttcgggaggccgaggcaggtggatcgcgaggtcgggagatcgagaccatcctggctaacatgatgaaaccccgtctctactaaaaatacaaaaattagctgggcgtggcggcgggcgcctgtagtcccagctactcgggagactgaggcaggagaatggcgagaacccgggaggcggagcttgcagtgagccaaggtcgtgccactgcgctccagcctggacgacagagtgagactccgtctcaaaaaaaaaaatcccaattcctgtgccccatcccacccaatcagagcatttggcgatggcacccaggcattcttggcaaggcacgcactgagtgaaacgttttagtgaacacctgtggaaagagctctgagcagggacttggctggcagagatctagtcctggctttgcggatgcaaatccatggaggatcttggccacgtcactcaactgaggctgagggccgggcacaggctttggaaccatcgggtctccctggatttgaatcctgaccctgcctcttaccatcttcactggagacctgggcgtctgagcctgtttcccccttgggaagcagagcatttcctacctggtagggctgggaggatgcgaccgaagtgcatggtcttgcagtgagagctggatgcaaggcacacactgttctcttgaaataaatgacagttcccagcataaagaaatgtcattttttaaatgtaaaagaattacagcaattcttttgaagaaaggactggagaatttatttgttcttcttagccttttggtgacagatagcctgtgggtcccacactggtgcgaagtcctttgtttcagagcggttgccaggggcctgccagtccccctcctgggaagctggatagaactatgttgcttacccatctgtcttagtctgtgttttgttattataaaagaatatgtgagactgggtaatttatcaagaaaagaggtgtatttagttcacggttctgcgggctgagaattgaaggtcacggccctagcttccagtgaaggcttccatgctgcatcataacgtggcagaggagcgcaagtaggaagtggacgcttgtgaagacgggataacctgagctgcactctggctttataacaacccccctctcctgggaacaaatccattcccttgagaagtaatgcagtctcctgagagccagtacttactactgcagctccaagccactcaggagggtccgtccctgtagcccaaacgccttccactaggccccgcctcccaaaaccgccatactagggagcacgtttccacatgaggtctggggacaaaccaatgacactcaaaccattgcaccttctcatggctgcatgctggctcacttttgacccaaaggaatggattgtttcacatggattttttcacagagaaaagaagtcagtacccagaaatcatcttccttggaacagggtctgccatcccgatgaagattcgaaatgtcagtgccacacttgtcaacataaggtatgctgctttcccaggaagcatccttccatcaagggcacgtttactttttaaacaaaagtcctgctgtactcaccagtcgatttgaaatgcggtatcaagccctgtcacttgtcatgtcgactggagtgtccaggagaggagcgtggccttactgcattttatagcctcagtagcaaactttaccctgggaatcaccaaaattcatcccatgatgtcttttaataaacagctgattttactgtgggcagtacacctagctaagaaattagctcctttaatttttacattaatcctatgaagtggtgaataactacccattttgttgatgagtgacctgatattcagagaggtgacttgctatggttcctacagctggtaagtggggcatctgaagtttgagcggggacttggggtcttgattgctacatggtattgtcccccagccatttgttggtagtatgttaaaaagctttagggttttgcacatttgtgttcagaacctttattggattccccttgacatgttttttagttgattctcttgggtttgcctggggtcatcagcagagagattagtcaaatgcgttgtgacatgtacacgttatctctacagatagtatgtgaagaaaataagattgtgaattaccaggtttgttttaaattttgctctgccatcttacatgctagtggtggatgataaacaaccaaatagtgcattaaatatatacagcagtgacgagatgtgccctgacatcagaaatatacaatctggggtgtgtttctctgtggatgaggacatgcaataaagcagcttggagtgagccggcctctcccgggggctgagatcctgggggaagaagggctttttgagtttgacctgacaccctgcgagcagcttttgaaccagctgaagctaatgggaaggtgctattgccaccttgcctccgcctcccgactcctttttcccccagaaggtaatgtcttagcaccggggcttctctctgcaaaatgggtgcagccctctcagtgttcgtggctcctcccagagaatgaaggaggccagagcgggtcagcactctctctgccttggagcagagcttctgaaatggactgcacagcagaatagcccaagaagtttgtcagaatccagacttccagagccctgcctaaaaccaagtcagaaaccccgagtgacacctgggagtctgcgttaactggctccctgaatgaagcacctgcagcccgccctgcaccaggtgtctttgaggacatgagctgaggaaaccccgaccacttgcaaagggggaaaagtccgatggcagctggacctagaaagagtctcatatggcccagtgcctgtcctggtattttcaacagaggctgtggccacagtcaatctgcatggtcagattcattgttaggactaaatgctttaagcctcctataaactttttttttttttttttgatgcccagcctttgtgtaagtctacttgaaagggtttcagggttccatggatacttctttgctataaagaggatgacacatgtaaaatcacctttatggttaaattaattggcttttatattagctcctcaaagcaaagcaggagagacagaaatttctgcagttgcttcttggtcctgtccaaagcagacatcagcctctgaaccatcagcagtcttcctagtggcagtgactctcttcctcttctcttctgcagccccgacacgtctctgctactggactgtggtgagggcacatttgggcagctgtgccgtcattacggagaccaggtggacagggtcctgggcaccctggctgctgtgtttgtgtcccacctgcacgcagatcaccacacggtgagtgttgggctggaccacaaagctggagcctggaggaggcactgccacgttgagttggccctttggctgcgtcttttcctccgcttccaaacttgcccagagcttttgttactcatctctggctaggaaatggttttttgcaaaactcaacatagtccttctgcgccacaagaatgtcttctcttcctgttcagttcctttcctgcagcaggacaggtttgagtttacccagccttccttgagtcttgaatctcacacggcctgctcagcggaagctttgaccggatgcaggaggtgtggctatgagaccctcaccttggtctcctggggtgccgggccctgggccgttgccctcttcccagcacgggtcgtgtcgctttctgcctgtgacatttcagggccatggcgcagggggctcggcctgtgccacccccactgcggctgtgttagaggctggtgggtgacgtcgggctggcaactcctgcaagagagagggctgcagaccctaacccggaggggatggccctggggcctggctgacgcatgtctcctgtttccttgccagggcttgccaagtatcttgctgcagagagaacgcgccttggtaagtgtggcacttgatgggcgttctgagtttcagcggtttacacatcatccgccatgcctcttggcactccagtttttattgagatgttctgtcgtcgagtcggcacttgcattttttgttccaggcatctttgggaaagccgcttcaccctttgctggtggttgcccccaaccagctcaaagcctggctccagcagtaccacaaccagtgccaggaggtcctgcaccacatcaggtgagcatccagggcagcctggcccgctgggctgttgcttgctgccgtctccttcagaagctcaaggtggacactggggtagttaccaatatcccccagcagccttgcccttgacatggtcccagatggcagaagcaggggagaagtgcattggctgaaggacagaaaccattagatagttcccatgtaatgcttattttcttagaagcatttcttcccagtcctcatttgagttctgagctgctttctaaacttcgagcagcttttcttgatgagacagttccagagccaagcacccaaatagtggctagcacagagaatgtccatagcaggtgtgtggctagctggcaggtggcaccatcctcaccccaaggggaaggagtcccctctgctggagccatccgtggcccgtgctgcctgagccggaggcagcattcacctgctgggtttctcccagtggcctagaggctttggtttggctctttatatttgactgctgtttcctcatcatagtgactatgatttaactcatgttttctcctaagaatgattttggggttctccagccaaagacttaaactttggttccagatgtccaagaaacgtttattatcattttaaatgttttgtctttttacagtatgattcctgccaaatgccttcaggaaggggctgagatctccagtcctgcagtggaaagattgatcagttcgctgttgcgaacatgtgatttggaagaggtaaggggcacagccgcaggcatcatgggggcgaggtggggagcagagctgcagagccctccagccccaccctttcagtttcagacctgtctggtgcggcactgcaagcatgcgtttggctgtgcgctggtgcacacctctggctggaaagtggtctattccggggacaccatgccctgcgaggctctggtccggatgggtgagtagaggaagaagcaagccaccctgaggttgctctggggtttgtgtagctggaggtgaatgcaggtgggcttgcagggaaacgtcagcagaggcaggagactcaggtccccaccctcagagtctctggttgtcatcctagtaggcagacccagggccaggggagctgagtgttgagaccaggaaacagcacgtgactgaggcctgtgtgccgctctcgcagagaactctgccctgatccttgtgctgcttctccagggaaagatgccaccctcctgatacatgaagccaccctggaagatggtttggaagaggaagcagtggaaaagacacacaggtagcaaaggccggtcagtccttgtcgcccacatcctctccctcccccactacgtgacactgagcagccgtcgtttgtctccactgatgtggggctgccctgcttcctatcaagggctatgggggcttccttgacctgtggcagtgctcacaggctcttggcctttatttttgcagaattttctaagcaagattctagagtgaggcacagttttttgaaagcatctagaaatcggctgaataaactataagccatgtcagggaattgccaggggaaggcgggggctgggggactgaatttttggctgctaatttcaacgaaagagtgcattaccccaggtgggccctgtggtttctcttgggtgccctcatggacagatttggcagccagcacagagggtgggcttcatccaggggtgtgtgcgaaggctctggccctcaggggagattgtgctggctacggaggtgcccgttaagaaaacccaccagcttccccgggtgccctggcagttgatggccagggtctgtgccactgtctgctttgcagtcttgcagttgagttcagcttcagtctgctctgtccttcacctgcagcacaacgtcccaagccatcagcgtggggatgcggatgaacgcggagttcattatgctgaaccacttcagccagcgctatgccaaggtccccctcttcagccccaacttcagcgagaaagtgggagttgcctttgaccacatgaaggtctgtatgtcacacggacagcacagggcggggacggggcagggagacaggactctacacactgagtaggacggtcagctggagtttgctttcttatttggggccaccgtgggaaaaggttatctacccatcactaaccaggtcgaaccaccctgggtttgctggtgagacccacctcctgcaggggccaactagtcttcagtctcagttcactggaaatttctgagaatccttttaggcctggactgctcacacagtcatggcatttgagcctcagcacagacctgtgagacaggtggttgcctcttgtgagtgggaaagccaggcctgacccttggccttccggaatgaaggggcagagccggagccaggcctcgtttttcaggagcttgattttgagagcatctggactgctctcccttccctctccggaggcccttagccaggcctggggagcctctgcccctttagagggttccctccatgccattcttttttccatttcagctgtggcctgttggcttgtgccaaggaaggggcgttggcgctgctgtgtgagcacatgactgcatcccttccagctcctgtcccccacccctgcccctctgagacatgtccttgtcttctattgtgtcttctaggtctgctttggagactttccaacaatgcccaagctgattcccccactgaaagccctgtttgctggcgacatcgaggagatggaggagcgcagggagaagcgggagctgcggcaggtgcgggcggccctcctgtccagggagctggcaggcggcctggaggatggggagcctcagcagaagcgggcccacacagaggagccacaggccaagaaggtcagagcccagtgaagatctgggagaccctgaactcagaaggctgtgtgtcttctgccccacgcacgcacccgtatctgccctccttgctggtagaagctgaagagcacggtcccccaggaggcagctcaggataggtggtatggagctgtgccgaggcttgggctcccacataagcactagtctatagatgcctcttaggactggtgcctggcacagccgcgggccaggaggctgccacacggaagcaagcagatgaactaatttcatttcaaggcagtttttaaagaagtcttggaaacagacggcggcacctttcctctaatccagcaaagtgattccctgcacaccagagacaagcagagtaacaggatcagtgggtctaagtgtccgagacttaacgaaaatagtatttcagctgcaataaagattgagtttgcaattgtgagttcttttgcttcctcctgctgctgctacagagcagggtctgctgtgcaccaccttggagaaggctctctgtgctgtagtgtggcagctgcctggtacccgggtggcttggaagaagtcagctcccgtcgtagtgagcacctctggaacctgtcctcagagagccacccttattcgccaagtctttttgacaactcgagctgtgccagctcacagcagggcgtgctttctctatcaatcaatcaatcaatcaatcaaatcaatcagtgagagcctggctgggctggtgtcattggtcagggaaatgcaagtcttctggtggttctgggtaaaagtggagacaatagatttgctgtgttgttgcttccatactgagaggagtgaggatcactttgccctcgaaggttttgagaaatggcacacggggctggtttccattgtcctccttgcgggatttacagacgtggattagtgctcgacaaatggagagcattttccaaggaagtaagtaagtaaagtaagtaagtaagtaagtaagttgaatctagtatttattgtgtatattccctacccaggagaatgtaaaaagaagagctttaaaaactcaaaagacaagcaagcgagagatcagccagggacctggctttacacaggtggtgaccttcaggctccatcccggtgtgcatttgagattgacggccatgtccccgcaggtttattaaagcaagaacagatgccaagctcagggataataaatctattttaataacgtta

SEQ ID NO: 1176 - DNA, 66608 bp, Homo sapiens
gcactcccagtgctgcggctgcctagttgacgcacccattgagtcgctggcttctttgcagcgcttcagcgttttcccctggagggcgcctccatccttggaggcctagtgccgtcggagagagagcgggagccgcggacagagacgcgtgcgcaattcggagccgactctgggtgcggactgtgggagctgactctgggtagccggctgcgcgtggctggggaggcgaggccggacgcacctctgtttgggggtcctcaggtaagcgatccatccagggtaggggcacgggagtggacctctccgccggcggtgtccgggtgaaggagacccggagcctcctctgcctgctgcgggccggggactggagtgcgggctgcaccacctctttcctagagccttaaattctttttgcagccttgccacctgctccatcgggggcgctgggaggcgcgacagcccagggatgcctgctgcccctccagccggacttaacccagcctcttgattgcttgcagggggttgataataacgctgaaagcgagagtattaattcacgatggaaggcggcggttaatagaggctcgggtgctgtggtgcgggtcctttctcgcgtgtgagactttttcgtggaggtggtgtcctctgtgcttctccatctaacgtggtgttttacgtggctttctctcccgttaacgatgatctccgtggagacagtggctgagtaatcttcagatcccagtacttagcaagtgctcagtcggtgttggatgtaggccacaaaccggatcgtaaagaattcaactgtatattgacagccacggaactaatcaatgaatagatccgtatgaagagtaagcaaaaaggcagcaaagacagtttttcagcttggggacatagagtagaaatggtctgtccccaaatagtgggaactgtcatttgggggaagaatagcaagttctttgctttccaggtcgcatttgatgtgcatgtgagacatgcttgtgattctatcaggaggttgaaaatgtgggtttagtggtaagtttgggctaattcagtcagggctaggcatttaggcctaatcagcgtattggtgatctacctggtatatgtaatcatgcatgtgatgtctagccaagaggtggatagtcgaaggagcaagggaagaaaatgaagcagttatcaggaaattaagagagaatccacgattgacctttggtgtggagggatctttagcacatttaagaactgcgaagagtttgaatcagtggaggcaggaaggttggaggttgcagatgtccaagaaagagtactaataggcctaggtcctgtggcaatatggaggatattcctttcctagcctggaaagaagtggagggaagtcttcctccgagaagataagggaataaggctgatgggtgtgaaatttcagagaaactagttttgaggcgtttttatgatgtttaaagatgaaaaacgcagccaggcacggtggctcaggcctgtaatcccagcactttgggaggcagaggcgggtggatcacttgaggttaggagttcaagaacagcctggccaacatggtgaaaccctgtctctactaaaaatacaaaaattaactgggcatggtgccgggcgcctgtaatcccagctactccggaggctgaggcaggagaatcgcttgaacccgggaggcagatgttgcggtgagccgagatcgcgccattgcaccccagcctgggcaataagagcgaaactccgtctcaaaaaacaaaaaaacctgcatgatatgttagaggttcaagtaatttctagcagttcttgaatataattgtcaccaaaacttactaaaatcattgtcttcctcacttccatcatatataaacttacctttctcttatcccacattatatattatataattcctatgacacttgacattatcttctgtgtactattaggattgattcatctttattctttctatgtcatacatatgtggggtgccaagatgagagaagtctccttggattaaagtgacaataagaccggtgtggtccttgtaattgctacccctaacataagttagggacttacaatcataagccttaaagggatctgaatataaataactagcacagtaacatttttttcccctacttaggtaatgttatgcatttaagcaagcctgattttgccagaccaaagtagatgtcttgtttagcactcttttctcacgttttatattgtcctgggaaaagcctggccagaagaacaaagttactggaagtagttatgtcaggtcatcagggtccttgaaatgttggtcatcattttgaagtaaattgttgtcatgtcccagtattttctcttcccctttagaacagtaaatgcttttctatctttgatttcagtttttttatgaatgtataaaaccagtttataaatgaatagacctggtgaatattaaagtcatttcagattctcttcaactgccagtatataaaaatggattttcaaatagtgctaatcagtgggatacccttttgtttttcctcatgattttataaagatgtcctaatatgcaaaaataaaatgtttccccattcatttgttctttcaactttcccaaaggaataactgatattacatcttttttgaagaaaacattctaaagttgagaatcttgcctctcctaaaaagaacataaaataggtttcagaattcctaatttgtagaccataactgtatagagtgggtcaggttgctgctataatccatacatgggtgtgtactcagagaggtaagttttttcttttcttggttattctgattctgactaccacttcttcaccccctgaatcatttcatttaaataaatatggtcatttatcactattaagctatttatttttctcttagagattaatgattcatcaagggatagttgtacttgtctcgtgggaatcacttcatcatgcgaaatctgaaattatttcggaccctggagttcagggatattcaaggtccagggaatcctcagtgcttctctctccgaactgaacaggggacggtgctcattggttcagaacatggcctgatagaagtagaccctgtctcaagagaagtaagttactgatgtagaatgccagcatgtgggtatgacccttgatttctcttcttccaaatttctttccccacatggtctttctttatatcttattgaatttatatcctcccaaataaacatcttttgcttcatatatatgccatgttagacatagcttaaatcgtaatccttctttaactctgctgctattttaacctaagtcagtagaactctgaccttactttttgagtgtgtgccgtactttttaccctctttgtcatgcaaattctgtttataagagtggttttttttttttttttttttgagacggagtctcgctctgtcacccaggctggagtgcagtggtgtgatcgtggctcactgcaagctccgcctccccgggttcacaccattctcctgcctcagcctcccgagaagctgggactacaggcgcccgccaccgcgcccggctaattttttgtatttttagtagatgtgcggtttcaccgtgttagccaggatggtcttgatctcctgacctcgtgatccgcctgcctcagcgcccggccaagagtggtttttaattgggaatgaacacgaaagttgcccatggagctttctaaaagtttgagcccacatctcatgtcaactaaatcagaatctttagtgttggctcctaactatatgtactttaaaaacctctgtgggttggttttgatatggtcccttgattatgttcttctactaatacattttaggcagttacatcctttagtgccttttccccatactatagaaatcttagaaaagcatagctattagcatcatattttagtggacaattttaaagagaccaggcttattgtttttgtttttgtgtttgtttggcaaaaaggtcacattacctatttttcttgttagagatgacagagtagtgatatttctcaaatgaaagtttggattttcatctagaaaaaatatttttgaaagcttttatgtaataaaagaagcattaaaaagtatttctggaaatgttatcaattattcttgaaagtagactgggttaatttgcttgtgtttactttggtgaaaggtgaaaaatgaagtttctttggtggcagaaggctttctcccagaggatggaagtggccgcattgttggtgttcaggacttgctggatcaggagtctgtgtgtgtggccacagcctctggagacgtcatactctgcagtctcagcacacaacaggtaagtggaagactccagtgaggggggagtctcaagcatcctcaaataggttacttgctatttgtggaagttttcaaatcagtagccataatagttacacttttgctaattaatttttgcattatatatttctttatttaaaaaattgttaacatggctttatctatatgttaagattcttctaaaactgagttttgtctgctgcatctattaatcagagtgatcagaatgttccaaatgagaatatatttttttaaaagttaaaactggctattcttatgtggtgtagatcacctcttatcagaccctcatcttgagttgcaacctttgtttctcaatttaggaagtctttgtttatctgacttagattttctgttatgaatgttgattggctaaatttagagtccctgaagtctaggcactaaagtaaatacattgtcattacctgcacatgtgatgactgccagtagagctagacttcaagcaattgcttctttctctactttagtgtatagttgagtttctgatttctatcctcaccttcttaacagcaagggtttcaaattacacttggctgattctttaaatcttcttccattacttcattagttgtgatctccttaacattgattatgtcacagaagttagagtattactaatagtaggataatgatagcagcttacatttattaactatcatgtgcctggcactttttaaagtgcttttcatgcaaatttatttaatcttcaccatgaccttatgcagtaggttgttgtttcctattcttcagaagaggcagttaaggcacagagtgcttaagtaattagaccagggtcacacagtaatcaaatggggtttgaccctagcagtctaaatctggcacctctgctcttaaccattccatttagtacaatcataaacctttacttgcagttcatggtgggaaatatcaaacttgtcatatacagcttgtttttttttcgtatttgaaagatagatgcttttactttccaaacattttgtagcattgtttcctggttactgagctcttccagtctatttatcttcatttaatggtgctgattctgccctttagtggcttctcaattgtctgaaaggtagagcccactattgtgccttataagcccctttcactatctgttccccacattcctttttagcctcatccccccattgttcctgtgtgtacgtaaaccttatgttttagttgcagctgatttttaactgctcttttttctggctttgtgcctctacactgtgttttcttcctggtctctctttcctgtccttattaccactctttgaaacacgtcagaaaaactttttctggactttgggccacttgtcattccctgtgctgagacgcattttgctttccagagatcttggtcattgctgttatcctctgtagggtcttcttttatctccctcgtgagacagctctgggaagaaaaagatatttatttctaatccctgtgcctaataacaggtctattctcttgatatccattactgaagaaatgtttgttgagtaagttcttgttttaatttttaaatataaatttttaatttttatgagtacatagtaggtacatatatttatgggctacatgagatgttctgatacaggcatgcagtgcaaaataaccacatcatggagaataggatatccatcccatcaagcgtttatcctttgtgttacaaacaatccaattacagtcttttagttattttaaaatgtgcaattactgttgactgtagttaccttgttgtgctatcaaatagcaggtcttatttattctatttttttttgtacctattaaccatcccaacttccctcagcccctcactacccttcccagcctctggtaaccatccttgtactctctgtgtccgtgagttcaattgttttgatttttagatcgcacaaataagtgagaacatgtgatgtttgtctttttgtgtctggtttatttcacttaatgtaatcatctccagttccatctatgttgttgcagatgacaggatcttattctttttttatggctgaatagtactccattgtgtatagtaccacaatttctttatccagtcatccattgatggacacttaggttgcttccaaatcttagctattgtgaacagagctgcaacaaacatgagagtgcagatatctcttccatatactgatgtcttttcgttttgtttttttaattgttttgattgaagttgcagtcagtttttactgagatgctagtgtttgaatctctcttttcaattttctctgtctcagctggagtgtgttgggagtgtagccagtggtatctctgttatgagttggagtcctgaccaagagctggtgcttcttgccacaggtaagcttgttactggtgcctcactggcttttttaaaacattattccagatgtcttacaggcttcatcagctttaggctgcttgaatttcaaaaaatttctttgaaccagtataataccaattatgaaccagtataataccaattatgtatgtgtgtgtgtatatatatataaaacgtagagtgatttttttttggtgactgaagttttgcctcttagtctatcattataaaaagttgtttcatgtaactttttaagtctttgggagtaagaaacaaagtcataaaacttggggaggctgctaagtccccagttagagttaaaaatgtcagcaatatgtattttaacttattctaagagttgctgtatggacacattctaaaagcccttcttgggttctgttgctgtttttcccctttaagtctcatcattccagatgagtttagtaaaccagctccactgatgacatttatatttagaggtatcttggggacaaggagtgttgaagttagtggaggagggctttgtggacttttaagttcaactgtacacacattaatagctgagcataagcaccaggtgacttatctagggaaagctttttggggttttttgtcattgttgtttttttaagtcaaagcattttggatgaattctgtctgctctgttcagactaactccagctccttagcttacagtgccataggtacttaggaatggcaaatttgttacatgaaaacaaaatcatttttgtttgtgtttctctaaggtcaacagaccctgattatgatgacaaaagattttgagccaatcctggagcagcagatccatcaggatgattttggtgaaagtaagtatagctttgtgcaatattttgtgacctacgtttcttcccatttttgaccatttccttgtgcactaatagccatgtcattaggccaaagaactgtgaaagttaaacccccagctattaaatgtctattagcccagttccttcagcccatcccaaatcttaaaaggcctactgatgcctctccaggtctgagggtttaaggtcacttagatagttattacccaaaccctaggaaagtcttaggctgggctttcagtgaaagggactgtacaaggtagtatttctgggatacagttttagggagaagaaaagaagaaagatggaatagaaggctggtttttgttactacgattagatccaatctgcatttccatgggaacaatcagattattttcttgctaaaatctagccaaggtcatctgggcattaaggctgtgggggtattgaagggcagtgcaggagaagagagacgcttattaagcataagctttggccatcttgaagtcacaaagtagctggcctgattgaagagggatggggaagaagatgttccaacttctgttatggtctaacttcctgccttcttgctccatcaactctgagaaatcatttagacaacttctacccatttatttacaaataatgtatttgttcagaaataattttggagggctgggcacagtggctcatgcctgtaatcccagcacttttggaggatgaggcaggaggattgcttgagcccaggagtttgatactagcctaggcaacgtagggagacccagcatctacaaagaatttaaaaattagctgggcttggtggtatcagcacagtaatgacatgatgtgcaggtactggggtagcataagggaaggaaacgagtaactagagagggatgatttatttcccctaggaggccaacttgagctgagtctcagctgaattggtgttgggtaggtgagggataagggtggggagtagtcagctgaattggtattgggcaggtgagggataagggtttggagtagtcagctgaattggtattgggtaggtgagggataagggtggggaacagtccaagcaagtgaatgtgtccatttcaagtgtccatttcaagggagggttatttcatagaaacattgtgggttactcagggaactgtgagtaattcagcattgctgaagtggcagaatgtgagtgtagaatgaaataaatggaacagatttgattgagtttgtagtagggaatatggacattgagttatagttgatcagccattacaagttttgatgataagaggtttaaagagatttatttaatagaaagatggctcgtgatggcatatttttgttgtttttgtgtgtggagagggaagagatgagaggcagggtgatcaggtaggaggttgctacaggaatccagatgaaagataaggaaggtttgtgtggggctagaagcaggaatcattcaggaaaaaacttgattcacaatgaggatgggagtacattttttagaattagctgggaaacttttttagaatatatgtgcatgattccccttctgccctaggccagtttgagaaataccaatttagaaagtgaaataaataggctttgcgtatgtaaggtgaataagaaaaagttgagcaggactccagccagaacctcaggtgttgggaataaagatgccagtaacagggaagatggagaagtgctggtctgtaaggggtgggtggtgagatctgttttggatttgttgaaggaccatatgtgattgccatgtggagtatgcaaatataaggctgaagctcaggagaggccagagctatggactgagagtagtgggtatgtaggaaattctgacagttttgggaacagatggactgtctcagggagcagatgctgtacaggaagagtctagaatccagggtggaactctggggcatccagctttgaggacagtcagagagagagtaacagcacacagtatactttgggatgggaaagtgctctgggcctggtgtttcccactgactttttcacacaaatcctaatgcagtaaatcaaaggaaatgtaggccaagttaagatcttaggtctcagaaatgtgtttctcagtacaaaaaaaaaaaaatcattctatggagtgatgaatatttttcctctatcctggggtcagtagacttgttctgaaaagggctaggtcatgaatatgttcagctttgcaggctgtatgatctgtgttgcagctgctcaattctaatgttgaggtgtgaaagttatacatgatacataagcacatctatgttccagtaaacgtttgtttgtaaaagcagatgtaggctgtagttttgcaaatccctgctgtaaccgcatcatttcttgtcttccattggaaaagttctctttcttcattccttggtccttaatctttctgtggaaacttgcagatagaagcctgggggtttgcaccaggatagtcactaccatttgtacgcagcagcaattgaggtactgtagcacttggatgtgagcagacaggaaatggtcatatggacccataatttataggaattgcaaacagccctgcttcatcagaatcagaatcaatggcaggaggaaagtattgggtcctggattaggtgatgttttcaggaccatctttattgtgcttcttgcaaatggatcctacctccaggaacagaagggttgtgttgtttcagcaactctgcctaatagtttatataagagaagtgttacgatctagaaagaaccccagtcagcctggaaggcagaagacctgtgttctaacttttggctccaccattagggagggtctcaatctctaagtctatgtgaggagctgttttgtgacctgcagcccctctatcaccagtgagagcttgcaatcagaattttattcccagttctcatcttggggttttatgttccggacatattttgtaaactctttatgtttcattcttcttacttataaggtgagggtgagatcgctgacttgtgtcatcaaagaaacttggaatatgtaagatggcagtaaaatgctttccaaaataaggaagggcatttcaaattcttcaaagtcactgctgcatataatatgaaatgggttttgtttgtttgttttgagatgggggtctcgctgtgttacccaggctagagagtgcagtagtacaatcagggctcactgcagccttgaactcctgggttcaagtgatcctcctactttagtctcttgagtagctgggaccacaggtgtgtgccatcatgtccagcttattttgtatactttttgtagagatgggtgtctccctatgttgcccaggctggtctcgaactcctggactcaagtgatcctcctgcctcagcctcccaaagtgttgggactataggcatgagccaccatgcccagcctgaaacataggtttctcaaatattgactgctggtcaatttattgagaggcgttagaggacctgagtaattgccaatgactaacttcatgaagaatagcagtgaaactgtttttgtttcatttcatgtggcttattagttgtcttgccaattgttctgtaggcaagtttatcactgttggatggggtaggaaggagacacagttccatggatcagaaggcagacaagcagcttttcagatgcaaatggtaagtttggtttgatggataaaaagccttgactggaacaaatgtaagtttgccacccaccaggaactctttggtgtccacttagatgccagtaatgaacagttctcttctgctttagtaaaactgcctagaaccttcaggaaatgaatccctctagaaagatcctttttttccttgttattgccaagttgctttgtgatttattttcatagtagcaaataattataaccaatattcatcacccagtttaaaaaataaaacatcacagacaaaggaaaccccctgtgtatcccgtcccgatgtccctccccttcctctccagagagagctgccatccttcattcacatgcatgttctcatacttttcccatatatgtgtatattagatatttttctttttctgttggatgaaactctttgttttccttacttctggattggaaaattctgaagaccatataatgatgtcttgatgactcaaggcaggactttttaatcttctaatgtaggcggggcggcccctgaaggcagaggtgtgtggacacaagaagagtgcagactcttggggcacctggggaagtagtgtccgtgtcacattaaattcatttaaactcttatattttattttaatttatacaatatgaatattttttaaaactatgaattgaaaagtattacccttgagtaaaattaatgccccaagaagatgtgccatatttaccctctggcacactaccaagtacccccaggggcattacagatctctgttagaaaagtacagattacattatcctcataacatttagaagctatgagaccttggcagggaagtttcctaatgtttctgagcctcagtattctctgtaaagtggacaacataatgtctccttacaagggttgagatgggcaggtaatagcatatataaaacagctatcatagcatcagcacagtgtaggcactcaaatggtagttgctgcttttgttttagtagacaaataatttttgaaactttttaaagcgtagtttttatttcaaaacaactttattgtgagtaaaatatgcatagtgggtctaatttaacattctgaaagctattgacttattagaacagtaaaggattattagagggcagaaacatggagtaagtactctgagacacaaccttgcttctttgggggtgatccactacaactgcccagctttggacaagtggttttcatgtccccctgatttttaagtgattttttttttttttggcaggacttaaaaggtatccttgactaaacaggaacttgaccaagtaaatagttggtgcaatttgaatattctttcttgctataagcaacaagtaaattatggtacagctttctaagaccatatcttttcgatttaaaaatagcactttactcatacatgttatgacatgggtaaacctcataaagattatgctaagtgaaagaagccagtcataaaagatcacatataatatgatcccatttgtatgaagtgcccagaaggggcaaatccacagaggcagaaagtagagtagtggttgggtagggctgtggggtggggtggggaaggggtgactgctaatggatatggggtttcttttggggatgatgaaaatgctcaaaatttagattatggtgatggctattcaactttgtaaatatactttaaaaacattgattcttaccactgagtttaaacaaccaaaaaaaaatcccaaggtgcattgaattgtgtacttcaaatgggtgaaccttaataatatgtaaattatatcccagtaaaggtgttaaaaaatagtactttaaaggaatctatggtagttttgaaaataaggcagttttccatactttgttaaactctggagaagatgacactttactactggtacctgctagagtaagacttatctagtattaacaaaattagggtttattaatggtataggatgatccaggtaatgggggaaaaaaaccgagcatcctgttatctaatgtactatccagtaaactactctagctttttttcatgaactttttctaaaggctttctagggcctcgtcttggtttgaaagttcacagctacccttcagaaaagaaaacaaaaatccatggagtaggcagatacaagtactcatgtgagcataatttactttgattttttaagttgtgttattctagccctcagcctgttccctgcctgggctctcctagtgcccagtaacactgattcaagaggttgcatttagctgggcacagtggctgatgcctgcaatcccagcactttgggaggccaagttgggcagatcacctgaggtcaggagttcaagaccagcatgtccaacatggtgaaatcctatctctactaaaaatacaaaaattagccaggcatggtggcagatgcctgtaatctcagctacttgagaagctaaggtagtagaatcacttgtacctgggaggcagaggttgcggtgagccaagattgtgccactgcactccagcctgggccataaagcaagactccgtctcaaaaaaaaaaaaaaaaaaattgggtgagagggaggaattgaggaggataccaagggttgggcctgaacaaatggaagcataattatatgtagaaatttctatgagctactcttctagaatagatgactcaataataccctgcttgccatctacgttttctgtccttaattatttccagttctatttcatataatgcctatttcaggccttaacccttcagtaaaggaggtttggtttctataccctaggacagtttcattgagaataaattttgttaggctacctatgtattccctactgtgcagactacagtacagtactagcagaattcttaggctgttactagaatatgatgatgaatgcccgggtggtcatctgtctcccacccggtagagttggcttcaggattgagatacacgtggccctggaggagacgtttcttcccgtcatgctgcagaatgagaacatttccatgttttcgtcattgtctgctgctgcctttaccacctctgtggctcctccctattcaccttgttcacatcttaactcatctgtgccctgttgtgaagcttacacaatatgtaaacaaaactctaccctgttggacaaatggaacacttgtttccttgttgtagttacctgataggttccttagctcattatattcaggatctagatctgtagctcttttcctcttttgctgttctcagaggccactttttttttttttaatgccgaaaggaggattttgtttgttttacatttttttcttctttttgatgatttctgcgttctaagaaccaacccttggatggtttctgattctagaggcaggctttcaaagtagcttaaacctcttaaaaaacatctgtatctagtggtctgaggcttgtttgattctgggatacttaaggtcccccagtaatattggtgtttgttcccctttttagcatgagtctgctttgccctgggatgaccatagaccacaagttacctggcggggggatggacagttttttgctgtgagtgttgtttgcccagaaacaggtatggaaatatattgcagttaaacaacaataaaaaatttttatcttattaaaattaaggaaaattttctttcttttgctttgagtagggtattaattatacatatgaggcaaggatgtgctgctttaaatgtgaaatgaggttagagttaagaattagaagagtcctttgaggccatttggtccatcctcctacctggtggacacaaatttgtaacaaaattaatctaattggctatgtaaaaccatggcagtttttatttgtaaggaaggtgtttgaatagttctgaattgacaacttttatcataatgttttaagtgtgtatgtgtgtttgactccactcccgcacaggggctcggaaggtcagagtgtggaaccgagagtttgctttgcagtcaaccagtgagcctgtggcaggactgggaccagccctggcttggaagtgagtgggagaagaaaccttagagaaattcttggaaccagagtagaggtggtggtacacatggatacagatgatacagatgtttgtgtaacacaaaaggatttttacgtttcttcatttggttataaggctgtatctatctttgtttcttcttttttttttttcttattccctgaagtctgaattcaactcgaatagtagattttacgcttcttcacagatttcattgttccaaggccgcatatattttgcattcctaactcttaaaaggctgtggttttaaggcagggtatatatgaagccattgtacagagcagaaaatggtgtttagaagggaaggcccagtttgcaaggctctgtggggcaaatggtgcttttgtggaaattagggaaagagcctccttccttggcacaaaattcctacagcagaggatctgcttgccaaggagcatgcaggctggattcagaccctgctctttccttccattctcctccttggcccagtacccttgtgcaggttacaatttgcctgtcatatgtggctgcctgattttagatagaagatgtatctcctctgtttcggtgatatctgttgtatgtagacctcttgtttcccaccagtatctgaatggtattatatgatagagcagaagagaaatgtatttgaattaaaaccctagagacaaatatgaataagatgaggcaattaagatgttttcaacatttggtgaagtcttaaaaaagacctactggagcatagaatatttgctgaagttgtataatggaaggagaaatagattttgatttttaggacattatacctggaatggtttagataacttattatttttaaagtcatccaaatgcaatgtaaatatgtaaggttttgtgggcaaatggagcctctgtgtaaaacaggaaaaggcactctttcctctgggcaagtacagtcccacagtgggatgaaccgctcgccgagagacaagggacacatgggatttaaaacttccttggataaagatattcattaattcgttcattcattcattcatgtttgctggaaaaaaaactcttctggattttatctattctttagttaggtgagctttcgatattgtaacactctgagtttgctttaagaccctcaggcagtttgattgcatctacacaagataaacccaaccagcaggatattgtgttttttgagaaaaatggactccttcatggacactttacacttcccttccttaaagatgaggttaaggtaagtgcctgagtttgtttcaccctcgaatgtagaggactttccatagctatagagggaattttttttttttttttttgagatggagtttcattcttgttgcccaggttggagtgcgatagtgcaatctcggttcactgcaacctccgcctcctaggttcaagtgattctcctgcctcagcctcccgagtagctgggattacaggcttgcgccaccacagccagctaattttgtatttttagtagagacggggtttctccgtgttggtcaggctggtctcaaacccctgacctcaggtgatccacccgcctctgcctcccaaagtgctgggattacaggcgtgagccaccacgcctggcctatagaggggatttatatttgatatggatatataaatagtagctttagagtaaatagtaataaaaatggtggcttcctagaactgatttttatttaataaaatattgtttttccagtgattttgcaaataatagcatttgtcccccaccttagataaaacagaagtaggaaataaaaatgctagtttttattgtttattttgacaaaagcataatttttccagtaatgaagatgtttttcatttataacatttaaatcttaagtggtttgtataccattaagattcttgctgaagtgagaacacatcaaatggtatctctgtgtaaaattttaaacatcctaagttgagagacgagtttaatgaactcccatgtaactattactcactttcagtagataccaacattttgcaaaactattttcatcggtccgcaactctttggcctatacatatatatacttacatatatttttatttcctggagttttaattctagaaatcatattttcaatatttatttataacagttaaggacatttttctttacataaccataattctattattacatcttatctctgtgttgtctaacacccagtccatattccagtttctctgattgtctaaaaatgtcaccttgtatttggttaagtttcttaagtctcttttaatctttaagcataatgtatttcttttttttaagtcctctacataataatgacatattttacagatttgtttaatgcctctgtaggttagtgatttacagctagggatgagctcaggtagtgggattatttgatttgagagaggaaatacagctattataaagatttggaagtaaatccataactgaaagccaatgacagatcttttttcccttctaggtaaatgacttgctctggaatgcagattcctctgtgcttgcagtctggctggaagaccttcagagagaagaaagctccattccgaaaacctgtggtaagacagctgtagtaccccagccttctgccccataaaacgtagttgaaagtagacaggtatgggatttccttcatcccttctacttagtcccttagtagaatcaaagatgctgaagtgggtaggtggaaatgggggtggttaggttttgattgattgtggatttcagtcatgtattggttggggttctctagagaaacaaataatacatatatataattcgtccctcagtattctcgggggattagttctaggattgcccatggacgccaaaatccacacatggtcaagtcctgcagtcaaccctgcagaacactcagatatgaaaagtcagccttttgtatacttgggttttgcattcctcaagtaccatatttttgatgtgcgtttggttgcgggtatagaatccacaatatgaagggccgactgtattcattgaaaaaaatacgaatataaatggacctgtgtagttcaagcctgtgttgttcaagggtcagctgtacttacatagagagacggtgagagagggaatagggtggggcgggagggagagagagtaatagagtgtggatagatttactttaaaagattagctaatgtaggggatggcaagtttgaaatttgtgggggcaggttggcaggctggaaattcaggtaagaattgatgttgctgtcttgagtatgaaatctgtagggcaggctggaaacttagggaggatttctgttacagccttaaggcagaatttcttcttttctgcgaagcctcagtttttgcttttaaggtcttcagctgaatgaatgggaccttcccacattatggggaataatctgctttccttatagtcagccgattataaatattaatcacatctacagaataccttcacagcaacatctggagtttagcagatagctgggtgccatagcctagccaacttgacacaataaaattaactgttgtaagtcatcacgtgctttccctagtgcatggtattaccacagaaaaaacactaaccaaaggaattctgtggacgtgaaagaagatttagattaagcgtaaaagtaagaatatttttatagcttttaaaatgtataagtgtgtggttttaagtattaaataatacttgaaaatgttagaaaataagatgagaaaaaaatctcatagttctaccacttcgtaataatcactattcaaattttcttgtcttctaggtttttcatgtatatatctcagtatagctatcatcttgtttttgttaaaagtgtagtaggtatgggccaggtgcggtggctcatgcactttgggggcccagcactttgggaggccgaggcgggcggatcacgaggtcaggagatcgagaccatcctggctaacacggtgtaaccccatctctactaaaaatacaaaaaattagctgggcgtggtggcaggcgcctgtagtcccagctactcaggaggctgaggcaggagaatggtgtgaacctggaggaggcggagcttgcagtgaatggagatcgtgccactgcactccagccttggcgacagagtgagactgtctcaaaacaaaacaaaaaaaagtgtaggtgtgatacatctgcatcattttaaattgctgtataatactcgtttattctcgttcattaaatctcatgctgttagacatttacagttttgtcatttctcattattgtaaacagcaatgcatggtacatttttgttcataaatctttttacttgattattttctaagtagctttcaaactctttaatcagtagaaccccccccccctttttttttttttttggagacggagtctctctctttcccccaggctggagtgcagtggcccgatctcggtcactgcaagctctgcctcccgggttcactccattttcctgcctcagcttcccgagtagctgggtctacaggcgcccgccaccaagcctggctaattttttgtatttttggtagaggcagggtttcaccgcgttagccaggatggtctcgatctccatctcgtgatctgcccgtctcggcctcccaaagtgctgggattacaggcgtgagccaccgtgcccggcctcagtagaacccttttaactgcaatgttaagaaactcattattcattcaacacaatagttcttaaccctggccacacctttagaaaaaaaatgatattcaggcttcatctcaagagttcagttcagtgtgttggaatggagattatacgtaagtatttaattaaaaaccaaaagcccccaagtgattttaaacagccgcagttgagaaccaccgattaaccagtgtgtcaagggatggcactgtgatatgctgagcataaaaatattgcacaggatgaaaccctgtctctactaaaaatgcaaaaattagtccggcgtggtggtgcgcgcctgtagtcctagctactcgggaggctgagacaagggaatcgcttgaactgggaggcagaggttgccgtgagccgagattgagccactgcactccagcatgggtgacagagtgagactccatctcaaaaacatgtatatatatatatacacacacacacacattgcacaagaacagccacaacatctgtgctcacagaacatcagcatgtggtctaacttcaaagtgttgtaataatgcggtttgagactaggttatgtttgctgtgatcactaagttaagcattagtgagcaaggagattgagaaaatccttaatataaataatatttcttaatataactataattcctaatataactaaggtcttaatttatatgtcatctgtttagtaaaggttggttttggcatgattaagtcttgcttgcttaatagatgttggaaggataatttcatgcttatcttctttggacagctgaatcaggattaatacccagatagccttgaacataagtgcttgcaaagcacctgaaagaaaataagcatcttaagcccaatacaacacaatgatgctagtctagatcttggattaagtgttttaatacttttactctaattgccaagttatcttcttcctaaatcttcatgagaaaacccactaaaagaatgctttttcctggtagccttccattgtgatcataaagtttggaagtaaagttgaaaataaacatgtgggccaggcacggtggctcaggcctgtaatctcagcactttgggaggccgaggcaggcggatcacaaggtcaggagatcaagaccatcctggctaacacggtgaaaccatgtttctactaaaaatacaaaaaaaaaaaattagccgggtgtggtggtgggcgcctgtagtcctagctactcgagaggctgaggcaggagaatggcatgaacccgggagatggagcttgcagtgagccgagattgcgccactgcactccagcctggccggcagagcgagactctgtgtcaataaaaaaaaaaaaaaaacgaaaataaacatatgaataaaagttaaaaatagaaaaaaaacaagaaaataaacatatatttctgaccttattgattcttgatattttatctgcatggaaagctattttttggcagttattattgttcttattttagagacgaggctgagcaggaagggtcctttgaaaaagaaaagattgcccttgaacccctctggcaagtgggatgaagtctgcttcccagcctctaacggccttcttttcattttcccttgcagttcagctctggactgttggaaactatcactggtatctcaagcaaagtttatccttcagcacctgtgggaagagcaagattgtgtctctgatgtgggaccctgtgaccccataccggctgcatgttctctgtcagggctggcattacctcgcctatgattggcactggacgactgaccggagcgtgggagataattcaagtgacttgtccaatgtggctgtcattgatggaagtaagctcctgggaagtgtgtccatgagcctgcaaggggtcctgagcctagggcctgcagatgtggtggtttgactggaacagtggggaatctttatttgttttggctgtttgggttacttgtttttttattgaatgggatataaggtggggtatgttctctcctgagaaccattgtcccccctcccccaccagtttcctgttatactgcatctgtggccttcacacgtttacttgcctggcctttgaagacactgaaaactttgactctaggtagagaggatgacaacagtacagtcttgtgggattgggtgtgttagctttatctgtttgccctgacacagatttataattgacccttataccaccccacttgtgttgctttgtttcctgatacaaatgcttgctgatatatacctctccagtatgttcagttcatgcataaacgtttgcctaatatgaagattaggtttatattttataatgaggtagaaggtttttttagggggtggggtgggaagggcaagactgaagagtgaagtagtcaccttaatgaatagtttcattgctgatatgaaagggagcactggcttctaagattgtaatgtgaggtggtatattaattcatattctgtgtaatattctacataatactgattttatagtcatgtattctatatagagaacttaatcagatctgcgttattaccaaatccacacataggaaagtgctttaaggattttgaaagtattaattcccttggtttagtgtggcttggttgcaggcccaggtttaaagctagaggtctgacctcttggcctttttgccttagtccctggcacctgaaactccaggtactgagatggactcccctaggcctagaggtgacaatagccaattatggacagaacccatgacatttccccatcccacactgtttttagacttgttcctgagaaaaacattgaaagttatttttttgtgaattgccattattgtttagatatactgtgatgttcagatggcttatcttacaaattgaatatccctaggtctaatcctcttctttctttttcactgcagacagggtgttggtgacagtcttccggcagactgtggttccgcctcccatgtgcacctaccaactgctgttcccacaccctgtgaatcaagtcacattcttagcacaccctcaaaagagtaatgaccttgctgttctagatgccagtaaccagatttctgtttataaatgtggtatgttataaaacttttgccaagatgttctgaatcaagtcccttctactcctacataaaagcaaattatagtttggtgttgccataggtctagtgtttctcaaaatttttaagtctgcagttgatatcattatcattatgatatttaattgccttgggtttttgttttttttttttttaatcctatactggtttgtacgagccattccttttcccttactgacttgaagagtcagttatttaagaataacattggactctggaaataacatagtatgttatacattgttaacatgttttactcttttcatagcctttacacatattttcagttgatctcatccctcctaggagctgtgtcagagatggggttttcctcttttgtagatgagggaacacagtgtcagaggttttgtaatttgtttgaacaagaatggacaaggacctcaacacaggtgttctagctcctaatccacttgtcctgccacagccccattgctgtcagttcttcattactttcctgatgtgctggagaatctgaaatttgtttttacttgtgagttctgtggttatgtcataaattctgctggcatatggcagtgttagccttgttttcaaatatcttttgaattctcagaaaaagcctagatagttgccaagagagaataatcaaaattaattaatttaaatgggaagtccttactttcatatcagcttttctgttaagtcagcagcccactgtgtacatggatcctatctggatgtatcaccagtttctctgattatagtttcagtgtgtaaaatgctgttacagtcctccttaaacttttcaaaatagctttaaaaaaaagtgcaaatatgttcattgtcaaggcaaaaagaatcagatgtaagcttttgtgggacttaactgtatgatgctaatgagtttatatgtcactttatgatgtatggtatgttttgttctgcattcacttaaaaaatagctttatatcattcatctatttaaagtgtacaattcaatggtttatatgtgtgtgtatgaatatatatacatatgtatatgtatatatatgtatattcacagagttgtacagccatcaccacgatcaattttaggacgtttttatctcctcagaatgaaaccctgtaccaccctgcattcattttacttgagagaaaactccctgtgatgagataggacaggttgagagctccacttttgaaagattgttcggcatcaatatgtggggttggccataggtcaggggcacctggaggcagagattctagttaggagaagctgttgtcaagtgtccaggcaggagctagcaagagcttgagccagagcagtgttcatagaaatggaaagaagagaaagatcataacaaatccatgaagtaaaaaccctgagaagttaaagaacccactggggagagtttggatataagagaatctggaaaaagagatcttggactggaacaggtcagggctccgtgcccaagtggaagggaaattaagaacttggagtcaagtggtagacatttgagtggtgtggagacaagttcgttgccaaagttttcaaagatggtgtttgatgcatcctgagtatcactcctttttccccctcattgcttcttgattgtttattatatgccaggcttttttctagtacttggcttgttgtactagaaaactagttgtactttgtctacaacttgttgttctaggtgtagacaaaagatatcaattaaatatgatctatcagatggcaagtgctgtggagaaaaattaagcaaaataaggggtagggagagcttaaggataagggtttacagggggaaggtgtctttcctatttagtgtgatcccaaaggcctctctgtgaaggtgacattgaagcagagacctggtgagaatcacagtgggagccacgcagacatctggggtaagagcgtcccaagcattctatgcttgaaggcaaagaagaaaaaagaaagagcgttccaagcagagtaaaaagcaaccaccgaagtgcctgttgtgtttaggaaatagccaggaggccagggtggctgcagcagagcaaaggaggggaaggtggtgggtgagttcagagtggtgatgggaatctgctcttgtagggccttgcggcttttactccgagtgagataggagccaccagagggcttagaacagaggagtgcagtgttctggctgaattttttaaaggcttgcattggctgctgtgcagtgaataaactggatgaagaatagaaagaaaatgtcttttaagcaggtgcttaggactttggagaatttgaggatattgagaggtggttgaagacagtggaggaaattgtccacagcactgggctgagagggtagccccttcacctggtcttgctgagatgtggcctttgtcagggaagattatgactgatgtgttcttaagaggaaagcagaaattttaaggaggttgagatgtgattattttctagattgctgtttgccttctagaactcattaattgcagacaccatccccttagtattaggtgaaatcttataatttacgatgataatatttgcatttttgttttccaggtgattgtccaagtgctgaccctacagtgaaactgggagctgtgggtggaagtggatttaaagtttgccttagaactcctcatttggaaaagagatacaagtaggttcttaattatcttgggcttctgggaacagaatcagccagcatgcagtcctaaattcagccatctgataacagttctatgcctgttgctgagtggaacaagaaataaagacaacacccaggccctgactttcggatctgattggagaagccagtcatgtagtttgtctgaatgccatataatttgataggtagcaggagagcatgagttgtaagccagcctaggacctactcccaatagcgcttggttctccaggaaaaatcatgtgggaaagatggagatgacaatgataaggcggagctgcattctcttacataaatggggatgtatgggttgttaacatggatgacctaatgcagcctctgtctttgctccatcccagaatctagaacttctgggtgctgtgctttgaggctcctgggatggaaatcagaatgcattcttccattgaaacagtattgtaaacaattggatgttattgaatacctcaggtacactataggcatttgcaaaatgacctagaaaccaaattataatgccacatctgtgagagaacttttttaaaaagtaccacttattgagtacttacagattaaaaaaacaaagtgtagaggttaggtaacttacccaaggtcatggacctggtaactagagaatttagggtttgattctattctgtttgataagtccatgttcttcattactaaactactctgcctccagggaacatttattgttagattaatagaaataattaactgagtacaacaaatagcagaatttaataaataatgtttcttaaatatatgtgatatatttaataaatacagcagaagtgttcaacctctgtatgattttgaggctgcctgtataatgcttagtagtttttaaagagcatttacatgcattatttcacttcatagacttgaaaccactagagtagagatagaggacaaattagaaagtatgaggcagtttagaatatagtttcatttaaaaaaaattgatggggataatgccaattcgtctgagatttcacagaagacatgagtactcatcgtgatcttggggaagggataggtttggggttggcaaagaattgggaacattgggtctggtggggaagaaagtgtcagtgaaaaccagaggtgggactgatcctccatgggatactctatgtgaatgcaatggagagcctgagtccggggagagatgtttgaggaggaagatcaggctagtgaccaacttcttcagtgggagctgcggatttgccacctgatctaaaaggcaggaagtagccattgtcggttcctacgtgaggtgacaagaacagtgcgctggtcaggtgtataaatgctaccaaagaatgcattagagacatggagaccatctctcaagctagtcagtcagtttaatgtgaggtgcttaggaaaggacccattctactgcaagtgacatacctgccagagcctggtttgaatgctggtaagtcatggcagtggaaaagctctggggttcattagtgtagggactagggctggtaattttcttgtgtagtcagtttcctcaagtgttctcttcaaatttaaagatttcagggtatgagaaatttagggaaaatataaaaacgtattcttaagccagacaaagattaattttagattttgtagtatttggtagtatctcaggttttgtccctccaaataattaggagtggactgtatacaagatgcttcagtcttccttcatccaggaacgtctcagtggtttttaagttttattcatgtcttggatattcttcaatatttacaatagaatccagtttgagaataatgaagatcaagatgtaaacccgctgaaactaggccttctcacttggattgaagaagacgtcttcctggctgtaagccacagtgagttcagcccccggtctgtcattcaccatttgactgcagcttcttctgagatggatgaagagcatggacagctcaatgtcaggtattgcagtttttccctgtactccacatgttaagcaaatggagttaggtttttgtcttttatgagcatacaacttttgacttctattgatcaaggttgaggagcagtagctttcttgttagacacacttaacaagaaggttaagtctagttatgagccatgtcaaaataacagaccaaaaatatatcaaaaagtggtgaaaaataggataaatattagtagatgaagcaactttttaaagatatgttaaatattttaatttagcatctacccacatttttccagcgtgattgttatatgttataattgattttaataactgtcaagcataattagagtggctaattctcatgggctaatgtgatgggaagaaattttgtataaatgcagtcatgcgcatatatgtgtgtgtgtgtgtgtgtgtgtgtgtgtgtatacataccttttctatgtttagatacacaaatacttgacatggtattacaattgcctgtagtattctgtaaagtaacatgctgtccaggtttgtagcctggtagcaataggccataccccataggctaggggtgtagtaggctacaccacctaggtttgtgtaagtactctatgatgtttgcacaatgatgaaatcacctaacaacacatttctcagacgtatccccatcgttaaatgatgcataattgcacatatatgctttgttttgatgtggtgacttcaaaatgcttcttccagcctcctcttctatatatcctattttgtacctgactacatttaccattagaaagtctctattcttctttgctgaaatttcactgttctctgggcctgagttttgttttgattcctgactatatcttcattatgtaacaggtttcagttaatgaatgctcttctgtgtaatgtaagccctgttgtatagttgatagcattttctagccagttcccagaactccttgtttccagtgtcaatacttggcacctttgtccactgacactaatccccagattaatttgtaattaaagccctactggtgagatttctgagaaacgttgttgcaaaattaggaacctttcctttatatatatacattacataaatttatagacataaaacattttaatgcagtcatttgctgctactctttgactcatagtctttcgtgatattttgaaaaagccttttgttaacatgtctaaatgcagaatatgttctagaaatatgtagcacttaaagtaagccattagattaccttttgaaaagcggagcaatttactaagtttctacttcttcagatttgaaattcttcatcattagcttgtagaggcaaaagcttgatgcagtcatctcatttgctgtaaaggaaatgagaagtcatttacagtatatttctactgctttgacttttatttctcaaaaagactgttttgttcatataaaatattaatgcttttgaggactacaaagtccctcgatttagtttacatttactttagcttatactttgtaaaaaatactcttctaaatgctttgtctgttttagcttacttatttctcataatacctctgtaaagtatatgccatttgcaccatcattttacagatgagacaactaagacatggagcagttagataacttgcctgagatcatgcaggtggagccaggatcaaatcccagcgagtctagctccagagtttgttctcttcttgacagataatttatcctcacaaaatttgaagcatttgtagaggaattccctattgttataatgtttagtttttttgtagattggttaaaaactttgaattaaatgttagcattaacatcatttgcttttatcactacttctttgtctcttttttctttttttaatcactacctcttcctcctcttttgagaaattctgcttccgtggctatggtccaagctacttgagaaggtgaggtgggaggatcacttgagcctaggaggttgagattgcggtgagctgtgattgtgtcaactgcatttcaacctgggcaacagagcaagacactgtccaaaaaaaaaaaaaaaaatagtgaaattttacttcgctccattgactcagggaaaaaatgtaatggtgataacaaattcccttcatctcattagtgaaaatccacaattttccatcaatcgatatgatagtgatagagatattgagtgtgctcattttcctacagaccagctgctttaactattttaagcagacagaaatgatattggtaccatccatgtctaatgaaggcaatactttgtaataagttgcagtaagttgtggccagaagaggaatgatgacttcacagtgtaaacaactaccttattgggtttgtggaaaatggtgtcatgtagcagatgtggctttatctgggctttggtttggagtagttttatctattcatctaaccgtctgtctctaagtgtataagtgtgtgtgtgtgtgtgtgtgtgtgtgtatagtattgggtgtgtatatatgtattttgtctacattgtattgaagtaggtagtgcagcatcaaaaggaaattgttgattttcaaaatcagtgaaatgtcactatttttgagaaaaatggtctgtttacactcccttctccttttttttgtcagttcatctgcagcggtggatggggtcataatcagtctatgttgcaattccaagaccaagtcagtagtattacagctggctgatggccagatatttaagtacctttggggtgagtatcaaggtgttaggaaagcatgttatgacttacatagatgcttagttcttaagaacatgtacttgtatcttgtcagttcaatattgattgtcaggtcttttaactaccctggaaaaccctaagctttagagtggaattggcaagtgtattctactcctgtttcctcttttaatgaactaacgtactcttaaaaaagtgattgatgactatcgcagggacaaaaaaccaaacaccgcatgttctcactcataggtgggaactgaacagtgagaacacttggacacaggaaggagaacatcacacacctgggcctgtcgtggggtgggggagggtggagggatagcattaggagatatacctaatgtaaatgacaagttaatgggtgcagcacaccaacatggcacatgtatacatatgtaacaaacctgcacattgtgcacatgtaccctagaacttaaagtataataaaaatatatatataaataaataatgccagcattagagaaaaaaagtgattgaaattgcatgttaagtgttttagcaaatgttgatgttgatggttttttgcaaagagcgcatcagctatttgtgaactagatctgtgaatcttgcagagtcaccttctctggctattaaaccatggaagaactctggtggatttcctgttcggtttccttatccatgcacccagaccgaattggccatgattggagaagaggtaggtgaacacggagcaggaaatttacttaaagtagttacccagggactgatggcattaagtagaaagagcgtgggctttggaggtggacttgggtctccactaaatgcctagacaatagtgggaaatgatctcactttcataagccacaccttattcatctataaaatgggaaaatcagtatctgtctatcagggttcagaagactaaatgagataatatatgtgattagcaaccttttatccctagttgtacaaatcattcaaagttaattttatttaggaggggaaacagaaatgtgatcttgagaatagttttagtagatttttattcaacacatactagaatgcctataattgtggtggatggtagaatgcagtggctggaaaacaaaaccgcttgactaattcctgctcttctggaacttgtgatctattaatttcaatgtaatgattccctttgttgggagtgtgatggaaatggacagagtatactggtagagaatactgagatgtttgaggggtaatttgaggatggtggctatgagaatgggagtcctgcatctggtggtccaggaaggcctctcggaggcagtgatgtgtgtgctgagatgtgaagaaaaagaaggctctgtctccaggcagaaggaacaacaaactccttgagcttagcaagagctcatcttattcaagggactggatggaagtattgtggctggagctcagtgacagtcataggagggaatttgggttctttaattgaacaaagattagaaacttcttgtgatttttaataacagagtaatgtgttctgcttcatggtttggacagtgattctggctgcccagaagagacttgattggagagtgacgagactggaatatgggatcaacaccggttgagtggagttagtgaggggaaaaaggagatgggtttgagatatgtgtaggagatggagatgtcagggctcactgatggattggatggcttcacattccattttgcactggaccagccacgtcttaggtatctatctttagtcctgattacaggaacttaggtgtgaaatcatagggtggtagaactatgtgatagaaaaggtaggtttaactgatttgagatagaattgcttgtgatttcagttttatttctttgcaggaatgtgtccttggtctgactgacaggtgtcgctttttcatcaatgacattgaggtatcaaggcttggtttggtgttggatccttttcacagtgttagctccgagtaatctagctagctttcacccatgcctctctggccttctcttgcaggttgcgtcaaatatcacgtcatttgcagtatatgatgagtttttattgttgacaacccattcccatacctgccagtgtttttgcctgagggatgcttcatttaaaagtaagttttcaatgtataaaacagaaatggtcccttctccaatgtcttttggagtcttgatgactttttgaattcttcatttattttggctttttatcaaggagtcctaggctggagaaaatctttagagttattttacttagaccctaatctcaacataatatctcagttaaatcattctgcactttagtaaagacatccaaggaagggagttccttccttaagcagcacattctaaagttaaaaacttttcaggaaattttattatgtaactgatctaatattttatttggaattactatgtagatccccaatgttttaccttctgtgtagtcttttcccactgtgcccaccctccactgtacatctgcgctccatctagtggtttgtaggatattggctgcattttgtcttctgttccatgccctatctatctctgtgtgtgtggcgtgtatgtgtgtgtggcgtgtatgtgtgtgtggcgtgtatgtgtgtgtggcgtgtatgtgtgtgtggcgtgtatgtgtgtgtggcgtgtatgtgtgtgtggcgtgtatgtgtgtgtggcgtgtatgtgtgtgtggcgtgtatgtgtgtgtggcgtgtatgtgtgtgtggcgtgtatgtgtgtgtggcgtgtatgtgtgtgtggcgtgtatgtgtgtgtgtgttccttattctaaaaagccaacttattttctttgcttccaacttggaaatagggaatctttctttcattgatatgattatagtacactgataatgctaagaaatagagaagttgccccaattcttaactgtgtttctccacatcatttgagaagctgtgtatgtgaatgtgcatgagggctctgtaagagagagggcaagttccagggatgagcgtgttcatcagcagggctgatagtcttgaggttcagtgggagagctaaggcacatggttgttatttgttctcttctatttcacataatgtgtgcggtttcaattgcagttaatggagagtggcttgttgtgataattaaggcttattagttaatggtgtgtttagcattacaggccggcctgagcagcaatcatgtgtcccatggggaagttctgcggaaagtggagaggggttcacggattgtcactgttgtgccccaggacacaaagcttgtattacaggtaagctggtttttcagacaagatagatagtctgattgtcattcagccaagtaccaagcataattcttgcaggttgtattttaggctttcttattctttgtatcgtttattgtaaacctttccttgatagttttctgttagctttattcaaaggagtgttgatacaggctgtgaccataaggctcaaagcgaaacttttcttgaaagtcaagataaatatagagaacaacaagattctgctaaaagtgtgctgattttagagagttgtggtaattctctgtgaagagttaggtaaaatggtgtatcctggctatttaaatgttttctacttaattaaaaatgttactgctttaatttatttaagatgccaaggggaaacttagaagttgttcatcatcgagccctggttttagctcagattcggaagtggttggacaagtaagtgccattgtactgtttgcgactagttagcttgtgatttatgtgtgaagacaataagtattttattacaatttcgagaacttaaaattatgaaaagccctcattacctatatcatcaatcagattcttagaggctcttttttttttttttaacttttttactttaatgcagtattttgtagtggagattcctagcagaaagaatcgtgacactcatcatataaaggagggcttctcttaacctgagggaacacatgtgggttttaggtggcctgtgaacccagggagattgtacacaccaaaccttgtctttgtgtatttattcaagtagaaagcccacagctttcaatagatttacagcggggcctatgacccagaaaagcctgagctactcttgtgaaggaaatgactgattttctgaacctatttggaggaaactttgtattggaaagatctatactaatgttttgtttaaaaagtagacctgaattccatgatgattttctttgttttttttttgagacagagtcttgctctgtcacccaggctggagtacagtggcgcaatctcggcttactgcaacctctgccttctgggttcaagcaatcctcccacttcagcctcccgcatagctaggattacaggtgtgcaccacgcctggctaatttttttttttgtattttcagtagagacagggtttcaccatgttggccaggctggtctcaaactcctgacctcaagtgttctgcccacctcggcctcccaaagtgctaggattacaggtgtgaaccaccgtgcccgggcttctgtaatgattttctgttgtatgtatgtgaagatgtagttctcagacagtcatgatgactaaattacaccttttaagaaggtaaatgaatgtggtacctgatttttttattctgtaatttcagagtagaaatccagtgatagcagcttggcattggggctgtaatctgattataactggtttgtatcataatgaaaatatgctgggcccatggagctcagtttttgtgaatatcttttctattctttctctgtcttctcacagacttatgtttaaagaggcatttgaatgcatgagaaagctgagaatcaatctcaatctgatttatgatcataaccctaaggtaactttctaagctgtcatttactctagcttactttgtacttaaactaatatgatctgaacgaagatgttttgtcctttttttggtaggtgtttcttggaaatgtggaaaccttcattaaacagatagattctgtgaatcatattaacttgttttttacagaattgaagtaagtattttgaataattcatgtgtatcttttccatagttttctctcttcttgttaaggaaatcaagcataaatagctagagaagaaaaattccttactgttcatttttaaaaattgctataactcttagatgccagttggttttttgctcttttccgttctttttaaaacagcctgtttaaaactatgtccttaaaacatgtcattcagaattattatttcacttgatttttaggtatacatataaaactacttgtttttcctaggagactgaaatcaaatggcatctttctctctgatgatctttcccctcaactttttaatgaaacactttcaaaatagagaaaagttgagagaattgtccagtaagcaacctatatataccccacctggattcgccagtttatatttttctgtatacacattctcattctctataatctgtccatccatcattcatcttgtttgtagacaaattgctaagtgagttgtagacatcagtccactctaccacctgtacttctccttgtatatcattaactagagggcattctttgtgtatgggttggttttgttgtgttttttcaggtcatatttatctacagtgaaatgtccaaatcttaagtgtgccacttagtgagttttggcaaatgtacacttcatgtaacctgaacctctgtcaagttagagggcatttactccttttcagaaagctgcttcagattcctttcaatcagtccctgtcccattccccaggcaactactcttctgaattttttaccataaatcagttttgcctgttcaagaacttcacctaaatggaagcatacagtattactcttctgcataaagctgttttcattcagcatattgtcttgagattcatctgtgtttttatatgtatcactagttcattctttttttattggtcagtagtatgccgttgtgtaaatacaccactatttgcttattcattcccctgttgctggacatgtggattgtactaccctgtttggggctaatgtgactaaaacatctacaaacatttgtataagtcttttgtggacatgttttatttctcaatatttttataattcaactcttttccaaaagtcatttttatttatcatcatcagcatgccaggtgtatgttagtaatttgatcgctgggctacatgttctgttgatgaccattccatacacacctgttcttagagaagaagatgtcacgaagaccatgtaccctgcaccagttaccagcagtgtctacctgtccagggatcctgacgggaataaaatagaccttgtctgcgatgctatgagagcagtcatggagagcataaatcctcataagtatgtatgctgtcaccaggtggcatcctttgaaaaaccgaagtgtgtagttgtccttgtccagcctacttacctttctcattctggtgttcttcacttattacctcagatactgcctatccatacttacatctcatgtaaagaagacaaccccagaactggaaattgtactgcaaaaagtacacgagcttcaaggtagagatccgctcacagagaaagtgcttaaggtggccgtgactgctactagtcttctgcaggtgacaatcaccatgtcattgccacaccacagatttaacatgtgactttttagttgccattttaagacccttgtcagtttttttcagtgctgccctctaaagcatatataaaagtatcagaagtatatattcttctgatgtccagttctattgagaaaaatttattgtctttttggttatgttgttaggtctgtggattttttccccaaatgattgtgttctgttttgttttctaaacactgttaggaaatgctccctctgatcctgatgctgtgagtgctgaagaggccttgaaatatttgctgcatctggtagatgttaatgaattatatgatcattctcttggcacctatgactttgatttggtcctcatggtagctgagaagtcacagaaggtatgtggagttcttacttttatgccatttggttcttgtttatataatgatagtgtgaaaccctgcttctggtagtgcagtagcttttctgctatcactctgtgagtgcagggctggagacagatctgtgagtttctagggcccacattcctaagcccctgtgcttatgaaagtgttttgattgtgaggttgaagaagtgaagtaaaattgcatggcttttttttgtttctttttttttgagacggagtctcactcagtcgcccaggctggagtgcagtggtgcgatctcggcttactgcaagttccacctcccgtgttcacgccattctcctgcctcagcctctctagtagctgggactacaggtgcccatcaccacgcccggctaattttttgtatttttagtagagacagggtttcactgtgttagccaggatggtctccatctcctgacctcgtgatccgcctacctcagtctcccaaagtgctggaattacaggtgtgggccaccatgtgcggcctaaaattacatggttatttttaagatgatgggcatatgtgtgagctaatttcttctcttataaaggaaatgtaacaagtggttcatgttccactccggttctttctcacatggctcttttttctagtggagggtgggcacatggagcacagaaggctcatggcctcctttcctatgttggtacatttgctatgatcaaaaactttgaacaccactggtatgcatattttttatttatttttttgcagcctcagtctcttccccatgacctctccaaaaatgaaaatcggatccttcatctctctgcttaaaatacttcatgagctcccattgttccgaggatataattcagaagccataatactgcttaaaaacccttccttgacctggcctctgtgtatctttccattctcacttcttggtattgtctttttttcctctgcccatggaggaaagacaatgcttttgtcccccttcccttgcccctcaccaccacatgccttggtgggcagcattacttctgccatccatgggctttgactgcttccaccctcaccattcccctggctaattctcactaatctaggttaaaggatgccaaggtggcctcttcccagtaagccattcatgcttccctccagggactgggtgaggtgaccctcctatatgcttctgttgcacacagtgcctacccctgcagactacagtgtgtctttatctagagtgcggtatttatttatttatttttgagacaaggtcgggctctatcacccgggctggagtgcagtggcaccatcttggctcactgcaacctacgcctcctaggctcaagcaatctcacctcagcttacaggcgtgcaccaccatgcccggctaagttttgaattttttttgttgagacggggtttcgccatgttgcccaggctggtctcaaacttgtgagctgaagcaatccatctgcctcggcctcccagagtgctgggaatgagcacttaattatttgttgtcttgggttttcttcctatgttgttcttacatgtatttatcctgtcagcccagggaaattgcattaaaaacaggaaacacctctccattaggaagaaaaacaatttgcttacagggcatggcatagagctggagatgatagtgccaataaatactaggttggcagggtctcagagttttgtgtccaactcagtataattttatgtttgttttaatgtgatcatttcaggagagcatggaatgtcatgaaaacagcaccaagagcaatgtcttagacttttaggagaaacttagatgcatttgttgaatatcttctagactgaaaccttatttcccttattagcctatgaaataaatgatactgtgagacttagttaaggaagttactattattccaagtgtaacttattaatatccgtatgtgaaagcatttttgccaaagcttgtttgatgttcagctgacccttgcacaacgtgagtttcaactgtgcgagtttgaactgtgtgggtttatctaaatgtggatctctctcaaacacagttggccctttgtgtccacggcttctgcatccacaatcagtgtggatcaaaagtacaatatttgcaggatttgaaacttgcagatacagagggccaacattttgtgtatccaggctccatggggtcaaatgtaggactggggtatgcttggattttggtatccttggggtgtcctggaaccaattccccatagatactgggggacaactgtagtttgattttatatattatataatatgcagttaatatataatacacatttaaaaattatgtagctttgggtttattgctatatgtaaatgctagtttctattcctatatatgaatatcacaagtaataaagttctcattaatcatttttttaggatcccaaagaatatcttccatttcttaatacacttaagaaaatggaaactaattatcagcggtttactatagacaaatacttgaaacgatatgaaaaagccattggccacctcagcaaatgtggtaagtgtggggattagtatgtttatctctacttcagatcttctttggaactaggcaaggtataaattaaactgttagtttagacagtgactgatttcacttcccactcctgaaaactctaacaattatgtatgctcacgttattttgtcctgtgttctgaaaagctgaaggtaatcacttttaatgaactggaggagctccctaggtaagaacgtcaagtagatccttttttggttaagaatgagcacctgtgaagttaacttcagtgtctcagaatcaaaattggttgtcagttcttccttctcatgctgtttgcagacatgtcagggaaactctgcttgtctggagagagtgatgaggccacctccccgtgccctgcaagacgcagttttaattgacagtgatggggtgccagttgttcttcccatgctggaacagttgtgattctttactgaggactgatgggggaaaggaagaatcacctggggtgcatgttaagccttcagctgctggcatccttggagaatctgattcaggtggtctgggataggactgaggcgtgcatgtgtctaataagcttcccaggtgatgtcttttcaaggaggctgagaaaacactgggctggaaagctgggactcttaagtaggatgctgatcccaatcagtgctgctcttgcctcagaatctgcagtggtgctcattaaaaattcaaattccaggatcccattcttcagattctctgattatttaggtcttaaaaagttcctcatttattttgtttggtgaccattggtataaatgaagtccattatgcttcccatgtcttaagcctgtctttgtgtgaatctttttcctgcaggacctgagtacttcccagaatgcttaaacttgataaaagataaaaacttgtataacgaagctctgaagttatattcaccaagctcacaacagtaccaggtatgtggtatgtgaaaatgaggctctcctggttttgctttttgctttagtaggaaaggagtgaggatcctaagttcataacaccatccttggcttcaaaatttatcttaaaactaattagcctcaatttgaacttcttatctgggagaatggtcctgacctgttctctgattcctcatctggaataccacagcaccttcctcgtggggttccctgcttctttcccacccctcctctagcccaaccttactgctgtaagtctgattatcctaacaagtacagatctttcccatatatttcagcataaagggaaatttttgtttgcttgaaaaagcatccctttagctttttttatataccacacactttgcttctaagttaaatgtgttatatgatcctcttaacagcctcatagggtgctgtacacaatttgtagatgaggaagcaacttgcctgaggatccagagctacaaagtgctggacctgggatacagagcccaggctgcctgaccaccctgcccatgccattaaccaccactctaccatgccaccagcatcaccattttcagtttgtcctcagacaatatacacatctttctttgatcaagcccctgccagcttctttagcaccagcttctgccactgtccacattcccagttacttgtaggtagttctacagatgtcacatcgtgtgattcctctgtcatttctctacccaccagccttcctttagccccatttgtccatcagaacccttgggttactcctgaatgccattcctggaccaggcgccaaacactgagcccccagagcagcctgccctcgccttggtgattgcatttgtcaaactgctgattagctggtttgtcgcctccaccaggctgtgggctccttaagggcagggactccatgttgtattcctctctgaatctctggctaacatccagcctggagaatcgaggatttggccagtggctacctctttgcccttgttttctgttctcttccacactctctctgctctagtcacactggccgtcctgttactcctcagacctgctatacacattcctgctgcatggccatggtgccttctctgccctctgcctggtgccccctatctcatcacgtggtttattctcctgacagccattagagctcacactccctgagagctgcaaggagactgtcctctgtccctttactcacgtttgccattatgctatagactatattttgtccctaagtccatcctctgttactataagagcagcaacttggtggtggttcttatatggtttttcatttgtttggttttattttttgccttgctgtagtatccatactgcccagaatggtgcatatgtagttaagagtaattatttgttgagtgaataaatggcacatcctcagtaaggttttgaatgaaaaaatgactgtactaactgatcaactgtaagattttcccaggtaattctttcaagggagttccaagtataggaactaaggcagctacactggagctttagagaaatgattgtcatatttcctcctcagtcctaaatctcctcttgtcacaggatatcagcattgcttatggggagcacctgatgcaggagcacatgtatgagccagcggggctcatgtttgcccgttgcggtgcccacgagaaagctctctcagcctttctgacatgtggcaactggaagcaagccctctgtgtggcagcccagcttaactttaccaaagaccagctggtgggcctcggcagaactctggcaggtaagtacaatcatttatatgtttacatctacaaaggttttaaaaaatttatttcttttgtttggtaattttgcaaataaatttagggcagaatactctgagacagtcttgttctcactgataaaaattaatttagaatgctttaaaggataagctactacagcaagagtcccagaatgcagtggcccaatatggaaagaagtttatttctctctcccatagggatttataggcccttccgttgtgtggctctgcaaccttttaggcagatggttgtagctgggttatctccacagctgtggggaaggaaggagagtggggagaagttagaatcatggtaaaacatttacctttaagttggaaatgacctggatggaagttaaactatcaccttctattccatctcggccacgccatgtagctggatgggctgtgccctgtaagaaggtaaagatgaatttttggatgggtccattctgttatagacagtaggttgttggaatagccaggaatgaggtggggaaaataaaaggccaaatgtcgaagcattctgaaagcaaaggcagtttagctgcgtcagggacaagggttgcccgaaccagaggcgaggctggtaccaggggctctagtaccagagtggaggaaagggtaaggacacctatgaaaagagatgagcagaagctctggtcatctcagcagtgcttgaagtaaagcaatgactggtatatttttttccctaacttgtaaatattgttgagatctcaaagaaaaaaataaaaagcagtcctaaaaaaattccaaactctatcctgttaaattttgttaaatttatgtaccagtccttctttgtcatttgcagtattctttttttcttgggattataccagtgtatgggattatcacttttctttttctggttattagcctttcccaaatccctccgtttccatgctggcctctttttacaaatgtcgagaattccttatttcaggccttttagttattcgttcggtctccattgttcctttctgctttagaaatttatgatattggttgtttataccttctatctctgttcttggatctcttctattctttacagctcttagcttgctatttcccatgtcttatgagggagtatttctagtttttctcagatgtttagcaaaagtaggtggggagggcagtggtcaaagatgtttgagaaatgttacacactggagtcactctgtgtgtacatttaacgtaggcagtttacacaagagagcaaaagaaaggtaactatttaaatagtggaggtgattttacctactttttttagtgatatatgcactggagtgagcatgcaatgagagaccggaatctaccagctccttcgaaagccttgggttctctgtgcctctcattgtggtttatctcaattgggctgagagtgattctaggatctaaagacactgcatgactcaaacataagtcagctacctccatctagtgctcaaccaaagaaatagtggtctcttactgttaagggacgaagtggtttagtgagagataccaggtcattttcccatatacatgctttggaagcatctttcaaggctaattttggctgtatatgattttcaattcctgtgctaaatttagattctagctgccatttaagataggactctgtggtgtatatacctattccctcacagaaattcagaaagtacatagtttcatacataataaagacatattaaagaagcacttgagctaaagtatctgtttaactttgtagtcaactgctgcttattgtctctacaggaaagctggttgagcagaggaagcacattgatgcggccatggttttggaagagtgtgcccaggtaaactcaattcctcccttctaaaccccccagtcagcaagaaaggtcttctcaattgtatcttagtgatcatgaaagttaaaggaactgtgcataattgttaagtccagagatagtgtttgccccagaggtcttatcttgctggcttgacttggaaatctaaatttagtacatctctaagtttggtgaggtagaatatgaaggtgctctactttaacataccactggtttgaccttggtagaaagtacttaattacatctcaaggtagctgtgctttttaaaattgagtttgccaaagtagaaacaatgagaaaggaccattataaaacaggatcattgaaggctacatactcttggcttttactctcattctccctattggaaatgtctcttttacctcagggacctggaggtacagcagattataaggataagtacccatatgagcatttggtagtattataggatttattatgaaaataataaaactgcagtaacactggccacagactaacagtacacaggtgcacagttgacaccagggattattgccttgtagagttttgacctttgatgagagagtgttttttacagttgttactgatagcacatttatgtaacttaattgtgctttaaaaatatttaattgtctcttgtgtaataacagtaagtgaaagacgataactaaaattttatataattagatcctggagagaatatttgttgggtgattgaattgaaaataccagtgaatgaaacatacctaaaagggtagataggttgggttggaaagatataccacatcgagggttaattaaatggataagatgtcattatctttttttctttgtaaaggaagattaatgcataaaattattttgtgtaatttacatacaataaaattatgtgttgtacagttgtataatttacatataataaagctaattcaccaattttagatgaagaattcagtacatttggacatatgtttgtagctgtgtaaccaccattgcactcatgatctagaacatttctaacacccccaaaagttccctacttccccttttgcagtcagccttctccctccactgccagcctttggcaaactgatcagtcagtaaagtttcacattatctagaatttcatataaacagaaccatatggtatgtagtctttttaatctggctcctttcactcacatagtgcattggagatgcatccatgttgtagtttattcctttgtattgctgaatagtatcccattatatgtatatgtcagaatttgttgatttaccagttgatgtacatttggattgttttcagtttggggttattatgaataacgcagccatgaacattctagtgcaggtctttatggggacaggagtaggaatgccacatcccgtggtaagtggatgtttaactttttaggaagctgcagaactaatctgcagtggccgtatcattttgcattcccctcagtgatatgtgagagtgcttcagtgactcctatactcaccaacactgggtgtattactgtgacactagatgtattatctattgctacgtaacaacttaccttaaaagctggcagcttaaaacaacagaccctattatcccactttttcaatgggccaagaatcttggctgggcttagctggggcctctggctcagggtcctttacaaggctgcaattaaggtattggccagggctagagtcatctcaaggcttgactagtttttaatttcattttctaatgttttattactagtatatagaaatatagctgaagtgttttgcagggaggctgtataattgaccttgtatcctgcaaccttgctaaactcatttattagttctagaagctcttgggtgtattctctaggattttctacatcaacaaacatggtttctataaatatagttttatgtctttcttacaatcaatacttttttctatctgtattgcattttctagggcttccagtgtggtgttgaatagaagtgttaagagtgaacatccttgcctttttcctgatattggagaaaattcacttgtcttttagcattaagtgtcatgtttgcttttttaaaattttattctatattattttatttttgagacagagtcttgctctgtcacccaggctggagtgcagtggtgtgatctcagctcactacaaccttgacctcctaggctcaagcgatcctcccacctcagcctcctgagtagctgggactgcaggaacatgccaccatgcctggctaatttttgtattttttgtagggatggggttttgccatgttgcccaggctggtcttgaactgttggattcaagcaattcgcctgtctcagcctcccaaagtgctgggattacaggcatgagcctccgtgcctggcctgatatttgcttttttttttttttttaatgctctctattgcagagttggcaaactacaacctgtgacaaatccagcatgccacctgtttttgtaaataaagctttattggagcatagccatgctcattagtttacatcttgtgtatggctgctttaacactacagcagcagagttagagttgtgacacagatagtttggcccataaggcctatatttactgtctaatcttttacaggaaaaatttgccaattcctgccctcttggtttgaggaaattcccttctgttccttgttctgagagtttgtatcatgaatgggtgttaaattttgtcaaatgcattttcaactatgaagggttttgtttttagacgagtgatatgggggactaggtgattgattttctactgttaaaccaaccttgcatctctgggttcaaccccacttggtattatagatttattaccctttttctcttgtggcagattagatctactaaaattttcttgaggatttttgtgtttgtgttcatgagggatattgtagttttttcgtgtctttgccatgttttgggtatcaggataatgctgctgtcattgaggggtgacaaaaatgaggggtggtgtcctttacacttctgttttctggaggatttcatgtagaattggtatgagagtctagcttatggttaaaaacctatgtgtgatgtttcagacctgaccataaacaattacagactttacctaggaggccacatggggaaaagctgccctccctacaccagacttggcgtactgccaatgcattacagtttctaaagggagttgcagtcaaggactcagggccccctgttagtcatgctcttgtaacagtatttgcattgagagtcctggcactttcattcttaggtctctctatctgaggccatgggccaaggtcttcttcaggcacctctgccaaggcctgtttatgcaagaaggagtggaaaaaccttgacatttttttccactgtgactcactacccagtacttttccacccttagcccccttcctttgcacccatacccccaagatccatcaaactgctaaagcctttttttccaagctccttcaacagtgaaccaaccctcatgtctgtgtggatccagctgactcttgactagtgagttgttccttgggaaaaaatggaacagagagagttggtgctttccctggttttagcctcttgcttataccaatgcaatgcctgaaggcttaattcatttttgacttgttgctttgatcagctactccaacacctgacagctcagctctttctcccagctcttgggagatatttttttctttaaatgtttagtagaatataccagtaaggccatctcggccaggagttttctttaatgaaagcttttccactattagttcagttactttagtagacattagcctattcaagtttatctgtgtcttctggaatgagcattggtagtttatgtctttcaagtaatttgttcatttcatctaaattgtcagatttattggtatgaagtgtttatagtattctcttattttactgtccgtagggtctatggtgatgtcctgtctttcattctagatattgatgtgtcttcttttttctgattattctggccagaggtttatcaattttattgatcttattaaagaatgaactgtttcattgtttttctctatgatttttctgtattctatatcattctttttttattattttattattttatttgctctttatttttctagtttcttaaggtgatggcttacttttatttttttcttatttttttcttttgttgttgttgtttttttaaagaaacagggtcccactcttgctcaggctggagtgcagtggcacgatcatggttcactgcagtctcaaactcctacattcaagctgtcctcccccctcagcctccagagtagttgggattacaggtgcatgccaccatgcctggctaatttttaattttttttgtagagatggggtgttactagttgcccacgctggtctgaaactcctggcctcaagtgatccctccacctctgcctcccaaagtgctgggattccatgtgtaagccactgtgcctgaccaaggtgatggcttaaagctattgatttgagatgattccttactttatagtttaagcatataatgccataattttcctcaagcaccgttttagttatgttatacaaattttgaaatgttttgttttcatttcctaatttcccttgtgatttctttattgaaccttggcttatttagaagtatgtttaacttgcagatattggagatttgccagccatctttttgttattaatttctactttaattttgttgtgattagagaacatacattttattaatttaaatttataatttattttaatttataatatggtctgttttacagaatgttgtgtgtgtatttgaaaataatatgaaagctactattattggatggagtgttctataaatgtcagttagattaggttgatcatgctgttctagctttttatatccttattgatttcctcactacttgctctatcaatgactgggaaagtgttgaagtctcccagtatttgtctatttctcctttgattctaccagtgtttgcttaatgtattttgaagctctgttataggtgcatacatgtttatgagtatgttatagatgtattcattttgatatccttctttctctgttactattcctaattctgaatttgactttaatgttattaatataattcttccagctttctcttggttagtcttttcattgcatatctttttctatccttttacttttaatctagctgaatgtagtctttattttgaaagtgcgttccttgttgatagcattattggttcttttttttttttaaatctaatttgacaatctctgtcttttaattggagggtttagacatttgcattgaatgtgattaccaatatagttagatttaaacctacagtcttgctgtttgctttttgtttgtttcattgatcctttgtttcttgtttttttctttttttgctttcctttggatttagtatttttcataattccattttacctccactgttggcttattagctatacttcttcatttcagtattttagtggttgctgtaggatttataataaatatcattaactgaccatatcttcagataatcgtatactacttcatatatagtgtaaaaaccttacaagagtattcactccataatactttgttattgcttttgctttaagtgatcaatgattgtttaaggaaattttttaatgacctttcatgtttattctttttttttttttccaaaagattcagtattttccgagttttcaaaaactgctggccactcaaagtggatcaacaaaaatttaagagctaaaactgtaaaactcttgaaggctgggcacagaggttcatgcctgtgattccagcactttgagaagctgaggtgggacaatcacttgagcccaggggtttgagaccagcctgggtaacatagaaagaccttgtttctacaaaaaataaaaacacaattagccaggcatggcggtgtgcacctgtagtcccaacttcttgggaggccaaggtggcaggatttcctgagcctgtaagtttgagactgcagtgagctgagttcacgccactgcacttcagcctggacaacagaacaagaccctgtctcaaaaccagaacgaaactataaaactcttagaagaaaacagggctaaatcttcatgactttggatttggcaatggatggttagaattaataccaaaaacacaatcaataaattgataaattggatttaataaaaattaagaacttttgtgtatcaaggacattgtcaagaatgtgaaaagacagcatatagaatggaagaagatatttgcaaatcctatatctgataaaggtttaatatccagaatatgtaaggaactcctgcagctcaacaacagaaagccagttaaatcaattttgaaatgagcaaacgcctgtaaacccagctgcttggcagattgagacaggaggattgcttgaggctaggagttcaagaccaacctggacaacatagtgagaccctgtctaaaaacatttttttaattagctgggtgtggtggcatattcctgtagtcccagctacatgggagaccgaggcaggaggatcacttggggccaggcagtcaaggctgccgtgagctgtgattatgccactgcatcccagcctgggcgacagagtgagaccctgtctgagaaaaaaaaaaaaaaaagaacaaaaaaaaatttagaagattgctattctagtctactattttttcaaagggtggtcttgttaacaattctggagcccacctaaacctgctaaatcaaacttggtagtaaagctggggagatgggcatgtctaacagacgtttctggtggttttgatgtccaggcgtgcagagagatgatgcttaccttgtgttttgtcattattttcaggatttacaccccttccttgtcttttgtatcaatatttatggagtcatgaactctaggataggcatgatgttgagaactaggagttctcccctggccagggagatagaggcaggtctgtggttagttttgtagttggctgtgatgacatctgacatgctctcttcacttgttgtcttcttcctgttcccttgtcaggattatgaagaagctgtgctcttgctgttagaaggagctgcctgggaagaagctttgaggctggtaagaatcttgtaaatcctctggatgttgggtgctaagcagagagagcaagcaagggattccaggtcagttggaatctcttgtcttctgaggttcatgaaataagtagaaataggtcaggttcctggcttaaggaaaagcggtgtttttaaaatcatttttatcattcttgataataatttgaaatattactgtcttttactgaaatgaattgaatttccttggctgccttgtaggaggcctgtttttcaggaaaatattctgattacctctgaaagtaatccatgtctttctaagtatcttaactctccagtgactagaagttttccttcctaaaattattgtgtttttccttctaggtatacaaatataacagactggatattatagaaaccaacgtaaagccttccattttagaaggtgagggttccattttagatagaattcctcatttggaagaaggtgaggagagagagatgagagagtctcctcctatttactgtgttttcttaataatatgtcatgtagactcaatcaaaattaccacctggatataatatttaattctcactagaatttttaaatatgctgaactattaaatggtaacaaaatatttaaatgttagaaacctgtgatcaaatatgattaagaatctttgtatttggaaatagtaaacttgaatatgaactatattagataataatataacactgataaatttctggcatttaataatcatgttgtggttatataagataatatcctattattctcaagagataaatgctgaaatatttaggaatgaaggatcatatctctgccttactcttaaaaggttccacaaaagtattaatgaatgtgtgtatgcatgcagagaaacaggaagcaaaaaaatgtcaaaatgttagtaattggtaaatcaaagtaaagggtatatgtgtgttcattgaactcttacaacttttatgtaggtttcaacgtttcaaagtattttttaaaagttaccttttcaaatgaagtttgtggttcttagagaacatatgaatattaccagttctagaatactcagatggtcactgtgacctcttaaaagcaaagtggagaaggacatcagtttgacttatagaaaccttagggagtggttgattttaagttctgcatttttatgcacatctaccctgtaagtaacgtctggcctttctgacatttacatgtatgcacattcttaccttgtctgcacccccttcctccatcctaattaaaacgttgctggggtactttttatgtcattcactttaggtacctctaactgggtactgaaaacatcattcctcatctataataatctaaccagctcttacttagattttcaccactaatgagaacctttcttagataaatgccgataattcatctacataggcccaaaacctattaataaaatgcatccttggatagtagtattttgcttttttaaaatgtattctactagtgttatttttctcttgtgtatttttccattggacaatatttattagatacattttttccacatccatgggcattttgatggatgtttagccagaaacatttaggtaattttcttcttatttttgttaactgagctcccctcccctaccccccctttttttgtttgtttgttttgtttgtttgtttgttttgccaatcctcccttgctttaggtatcaagtcttcgttcaggtgattttacaagttcagtggtagcgcatattctgggataatgttgatgaactctaagatctggaatctcagtctctaatttgttaatgcttattaaggaaaaagagctcgcttggaaaacctagtaacctctttctttttgctgaattttaaccctccttcactgctccccgcctttagttttttctctttgcttaaacctcatgctcaaactattttccattctgcatctccagcccagaaaaattatatggcatttctggactctcagacagccacattcagtcgccacaagaaacgtttattggtagttcgagagctcaaggagcaagcccagcaggcaggtctgggtgagtatctgcgtgaaggccatcgacgtgcgggggcagtggggttgggtaacgccacacattgtctagattgcttggtgatccgcctgcaatctgattactgtgccatgggcaagtgtgaggcttctgtggagccccttcagggccctctgtgtctgtgtttgtgtgttggtgaagggcaggaccaagcatgaatggggagagctctgccagacattcccacctacccccattcacccagagcagctgaccacttccgtgtctaacaaaatgagtttcctcatttccagaaaaaagttcaggaaactactgatttacattagtaattactgtatttaatattatctcattcattttgagatcaactttgcaatcattttcatccatcctttgatatgcaccagttgactctagttagttcatttaccgccctgaaagtaaacccacacattagcaggcagtgttttcatcggcttctggttcttcttttctagatgatgaggtaccccacgggcaagagtcagacctcttctctgaaactagcagtgtcgtgagtggcagtgagatgagtggcaaatactcccatagtaactccaggatatcagcgtacgtatcacattgattcagcacattgactatatcctgggcatatagggaaagtggaagcaaatagattggttttctactgggacggtgtagtgggagtggggagaatattcttcagcgctgtgtggaagttgttcagacactttcccagcatatctgagacattaaacttggcattggaaggttttcttcctcagccttgtggcttgtgtgttttcccattccccacgaggcagttcctcccctgaatgctcagtttatattaacatctgattttattttttgaacaaatgttgtgactaaattataggcactgaaaaaatgaaaagataagcttcttcaattcaaaatcaggattggaagagaccataaatgtaaaataagtcataacacttttaccaaatatagtaatttgtcagaaatatttattcagcactcatatggtaggtgcagtagatgttaccaaaaacttataaggagatatgagttataagagtttatagtcttgcttgggatgtgtaaagcaatgcaagattatatattcaaactgaattttgctttaggaatttaaaatggagatctgtgaagttgtgtggggtcatcagcaactgcaagaaagtagccaggcaaggtagcacatgcctgtagtcctagctactcaggaggcttaaaaatatctgtgtaatttctaacaggagatcatccaagaatcgccgaaaagcggagcggaagaagcacagcctcaaagaaggcagtccgctggaggacctggccctcctggaggcactgagtgaagtggtgcagaacactgaaaacctgaaaggtatattctcagtcctgatgatgattcctgaccacaaacaatagtgaataggcagtacagacaggcagagttcagtaggtgattaagctaccattttcccaatttgaggaaagatgagaacttttagcaggaagggtcatgtctgcacacattcctgaagcagcccttcttagctggtaactgagaagccttcctccatttggcatccccctaactgaactgggagagatgcttaggccaggataaagaattgtgggacactgctttctgcgtaggccccccagcgtgcttgattttctttttgtagtacatgtgtttaattattccagcatttgggaagaaaaaagataatgtgggagaaaggacctgcagtgggatcatagaaatttttggctttggatagaagctatgtatgattctgtcaatggagctgggaatataacttaccactctttcaaatttcttctctctagatgaagtataccatattttaaaggtactctttctctttgagtttgatgaacaaggaagggaattacagaaggcctttgaagatacgctgcagttgatggaaaggtcacttccagaaatttggactcttacttaccagcagaattcagctaccccggtaagttttctcagagacggtgtgcatttttttcatcattttcatgggttattgtattcacacaatctccaagtcaaaaagttttcctgttcttaaaacataagatgccatagttaaattatcttagatttatgtgtaagctgtcagtaagatttgatatttgcctgtagagtgactagtataccttggcataggttaaatggactgtcattttcctttctggatgaagtagctgtcatggagaaaatgggaaagtcacatgattgctcctggccttcaatgaggttggagtggggagagatgggggaagatggggtcagagacggcctctcactttcctttcagaactcagggatgggatcaggctttaaagggaccccaggcaattgcttttccttttgttttatgaaaaatttgacttgtcacttctatgttgttatgatggactttgcgggttgtgtttaaggctgaatcagctttgtatcgcagaattctagtatattgtcatctgtttattatttatacctctgttcactctcttatacttcaagtctattgttaagagtttttatttggattcaaaaaggctggtgtatcagtcaagatctagaaaggaaaacaaaagcctatctattattttatcacagaatttaatatatggatttgttaaataagtattagaggactaaacaaggcaaaagggaaatacagaggaaggacattgagatagtaactgtaggaagcagctttaccctctagctgagggaacaggaggagttgttgggaattattagaatttagaagcctggaagtggggccctgtagagctggctcttgaacctctgagaggagggtgccagccagctaatcctggcatttctgagggagctggttccaagcgtacagaagtaaatggaaactggaaggaacagctgctgctgggggaaaagccagccggtcgggccaggtgtggtggtggctcacgcctgtaatcccagcactttgggaggccaaggcaggcggatcacctgaagtcaggagttcgtgactaatgtggccaacatggagaagccccgtctctactaaaaatacaaaattacccgggcatggtggcgcatgcctgtaatcccagctactcaggaggctgaggcaagagaatcgcttgaacctgggagacagaggttgtgatgagccaagatcgtgccattgtactccaacctgggcagcaagagcgaatctccgtttaaaaaaaaaaaaaaaaaagccagccaatcacggaagaaatctagaaatcttttgttcatcctccagctttgtactccccctctggtgttcactgtaggcaggacatgatgggaagccagcagcaaggaagaatatctttcaggtgcccagccccagcaccacaagcagtggatagaagggtgggttggagctgagagattacaaatcagctcagtgtttagaaacacatacgcttatcatgtcttgatttcctcatttagaaatgggcataagacttctctgtgtgcttcaatagaatgctttgaaggttaaataagagggtgtgtgtaaaagcactttacaaaccgttgaaataaaagcaactaggaatcagggccccagaacttcttgaatttattataataggtatttcttagaagaaatgtgatcatcatcttcaaaactgtagtacttttgaagataattgtttttgttttttgagacagggtctcactctgttgctcaggctggagtgcagtgatcaccgctcactgcagcatccaccgccccgggctcaggtgatcctcccacctcagcctcttgagtagctgggactacaggcgcatgccacaacacctggttaattttcaaattttctgtagagacagggtgtcaccaagttgtccccgctggtcttgaacaactcctgggctcaagtggtctgcccacctcacctctccaaagtgctgggactataggcatcagccaccatgcccggcttgaagataataatttataataccactcccatgagtgatcttctcttctgatcacatattcacattaaggtctattttattttatttttttcttgctctgtcacccaggctagagtgcagtgacagtatgatcaatcatggcttggtgcagcctcgaatgcctgggctaaagcagtcctcccaccgcagtctcctgagtaattgggaccacaggtgcacaccaccatgcccagctaattttaaaattttttcctagacatggggagagggagtcttgctgtgttgcccaagctggtcttgaactcctggcctcaagtgatcctcctgccttggcctcccaaagtgctgagattacaggtgtaagccaccatgcctcccacattaagttctaagacatcaattttatgattgtggttttgattggtgaagtatggttgtggtatgtgcaggataccgtgagtgacttctcatggcattgctcttgagagtgtgccaccaagggtctgcactaaccaggggtgtgcccagaggctcgctgcaggcttgaaattcctgcggagtcttgtgttttacctggagcacatgtgcacagtttccattctgctccatagtatgcacatgtttgtatttatttcaacctaaaaatgtttgtttcccataactctttgcgtataattgatactctacgtatttgtagcctcttttactcttttccctttcctcagggagtggtttgctcatttagaaaaggccaagatatatcactgtagagtttcgtttcttttcttttcctccaccccccatctttaccttgttctgggagaaaggagaattagaagtctgagttgcagctggagaaactggcaaattaaaatcacattgggaaagagaattactgtgtttcacaccataccagtagaaatgacaggctgttttctgggggtagggatttggcctttggtattggcagtcttgagaagtattagataatctttgctgatacagtctattttctcctcaggttctaggtcccaattctactgcaaatagtatcatggcatcttatcagcaacagaagacttcggttcctgttcttggttagtattttttctcatttaatattacaatactaagcagaaggactatctttctgtaagtattgagaagatcagcagtataaggagagattggatacaatttttcactacaaaaaattgactacaattcttcctcaattctaagaccgcatctttagtatgatcagtttcatgcttctagcggtgggggacctggtgcaggaaaatccagcatgaccattgtatgtgtaatttttaaaaatatttatgtggcatatgcttgttcataaaggcacaccacagttccagtttcagtctaaactgtctacatttacatatacatcaaaagattcttctgaagcatcattactggctattggcagttatgctttgcatcttgggggcattttcataaaccttgcttatgagtgggacctttttattatgtttaggattgacaatataatttgaaggcaaatccaaagaatattagcattttatacatatttcctgtttagttatgcatgaagtgttttatttgttgaggggagatgattctcaattagattacttatatccctaaaaattaaaaaccctaagcgctttcttttgaaagttggttagaaacatttgatgagtcagcttgggactttcagtatttgcccttacttatagttggatcaatgaagcatcttagctttgaaaagtgaatgatagtttctaaaataattggcagttttaactgctattatttgcatttctagcatgtgacaagcaactttctgaaattttttttcaccgaagtgctacactgtaatagcattttgatgacatttgaagtagcctgtggggattcaaattaagtttgactttaacagcttatgttgctaccaggaagaacagctaccttccatcccagctaaactcatacatccagactgtaactactgtattcctagctcctcttctgtctagagaatggcaaggttcttttggtatcagtttcgacatatccacttattcctttttttttcttaagttttttcatttagaaaaaaaaacagatggggtcttaatatgttgcccaggctggtctcagcctcctggtctcaagtgatcctcctgcctcggcctcccaaagtgctgggattacaggcgtctgcccctgtgcccagcccacttatttcccagatgctaggaacttacattagacctgaggccatttggtcattgtttattttgtgctgtagtccaatccagttgtgatttctgcctcctgtgttcctcgttgctggcctgatgctgaccttcaggttaggtcagtcccatcattccccagggtattctagatggctttcccacttcaaagagcactttcttgttttccagctgagccttaaagacactctgtaatatttgagagcccctcattatctgagtgtttattatcattacccttgtggtttcaaggatgtataggaaaaggtaagttcctataattcaaaaattgccactgatgaactaatcacaaaattagtgccactcaaatattactcagctgcccctccccagctaacaatagttaagtatattggcacatccccacaagtgaaatcaatgacttgatgggtcatttctgattgtttcctgctttgatgcaatacaatatcatgcagatcaattgcaagtcttgcaaaaatttagtattacataaaatagattaaaatgatattggaaaagtacttgaatcacagctgggttggacttgttgcaattgatgacaaaataagtgcttcaaatgattttgactatcaaaggattgagagaggtccttagaaaaattgaaaagccctcaagttatttttataaaaatggccttttttgtgtgctgtgaaatccacatatggaaatgtgaaatatgtcatgtcctgctgtcatataatttgtcagaataattactttcttgcccaaaagtctgtactttgtgtttatttcaagttaagtctagaatcaaatatagttgtagttatgcctaattttaaaaaatgagatagagcacattatttttgtaactagtttttttttttttttttttttttttttttttttttcagacagagtcttgctctgtggcccaggcgggagtgcagtggcgcaatctcggctcactgcaagctccgcctcccgggttcacgccattctcctgcctcaccctcctgagtagctgggactacaggcgcccgccatcacgcccggctaatttttttgtatttttagtagagacggggtttcaccgtgttagccaggatggtctcgatctcctgacctcgtgatccacccgcctcggcctcccaaagtgctgggattacaagcgtgagccaccgcgcccggcctgtaactagtttttttaagataaagtcttattccaactttaattggaatttatgaaataccttgttgatagtgaatttatttaagtagccttttttcagtattgatattcttatatctttatggcaccatttagtggagagaaatgtaaacaaacataaagatgtagtattaaatcataactgcataaaattaactgtagtatgtactgcactactgtaataattttgtagctacctcctgttgctattgtggtgagtgagctcaagtgttaccaatatctgcttaaaatgccatgtgccgctaaccatctccacatgagcagcacatgagagtctccattaattgcatatggcagcgaaaagtgatctcttgcattgtcgtgtattttttatcacgtttaatgtaatatcgtaaaccttaaataacaccatgagacctataggaagtaccacaagtgttgctcccaggaagcagagaaaagtcataacattacaagaaaaagttgacttgctcgatatgtactatagattgaggtctgcagctgtagttgcccaccacttcaagataaatgaacccagtgcaaggactattataaaagaaaaggaaatttatgaagctgtcactgcagttatgccagcaggcatgaaaaccttgtactttttgcaaaatacctttttatgttgtattgaagatgcagcttttatgtgggtgcaggattgctatgagaaaggcatacctatacaactattatgatttgagaaaaagcacagtcattgtatgagaacttaaagcaaaaagatgaaggatcaaagctggagaatttaatgccagcaaaggatggtttgataattttagaaagaggtttggctttgtaaatgtctggataataggaaaagcagctcctgccatccaggaggcagcagcaaaggcagtcaggtttatgatcaggactgcccttatctgtaaagctgctaacccccgagcctggaagggaaaagattaacaccagctgccaggcttttggttgtaccatacaacaagaaggcttggacaaggagaacactttttctggattggttccattgtcgatttgtccctgaagttaagtagtatcttgccagtaaggggactgccttttaaagttcttttgatactggagaatgcccgaggccaccccaaactccatgagttcaacaccgaagacattgaagtgatctacttgcccccaaacacacatctctaattcagcctctagatcagggtgtcataaggacctttaaggctcgttacaaacagtactctatagaaaggattgtcaaatgtatggaaaagaaccttgacagaacatgaaagtctgaaagaattacaccatcaatgatgccatcattgttatagaaaaagctgtgaaagccatcaagcccaggacaataaattcctgctagagaaaactgtgtccagatgtgcatgacttcacaggctttacgacagccaatcaaggaaatcatgaaaaagattgtggatctggcacaaaaaaaaaaaaaaaaaaaaaaaatggtgcatgaaggatttcaagataggaatcttggagaaattcaagaggtgatagacatcacaccggaggaattaacagaagatgacttgatggagatgagtacttccaaaccagcgccagacaatgaggaagattacataaaagaagcagtgccagaaaataaattgacatttgttccaaaggttccaattattcaagactgcctttggcttcttttacaacatggatgattctatgttatgggcactgaaactaaaagaaactgtggaaggattggtaccttagagaaatgaaaaagcaaaaacatcagaaattatggtgtatttctgtaaagttagtgacactgagtgtgcccacctctcttgcctcctctttaacctcccctacctgtttcatctctaccacccctgagacagcaagaccaacccctccacttcctcctctacttcagcctactcaacgtggagatgacaaagatgaagacctttatgatgatccacttccatttaatgaatagtaaatattgttttctttatgattttcttaatattttcttttctctagcttactttattgtaggaatgtagtatataatacatataacatacaaaacatttgttaactgactttttatgctgccaatacactgccgaacaacagtaagctattggtacttgagttttggagattcagaagttaaacatggggccaggtgtggtggctcacacctgtaatcccagcactttgggaggctgaggtgggtggaacgagaccaggagttttgagagtagcctgggcagcatggtgaaaccttgtctctacagaaattagccaggtatggtggtgtacacttgtagtcccagctacttgggaggctgaggcaggagaatcgcttgaacccagggggtcgaggctgcagtgagtcatgatcgtgccactgcactccaacctgggcaacaaaatgagaccctgtctcaaaaaaagaaaaaaaaaaggtatatgcagatttttgactgtgcaggggggtccgcacccataaccctacattcaaggatcaactgtaatttttcatgcctgcatggctcatatgtacagatttactgctggaagtttatcataaataatgctgaaaaagaaaatccttatatatacatattttctcctatctctgcttgcagtatatgattcctggttagaaaagaaacttaacaaatctaagtgaaagagtgcctgggagttttaggttacaatgacagaatcttttcctaaccctctctctccattcactttttttaaagcaggggcatctttattgatcaacatgtttgtcgaagtttcatcataaagtagttcctgtccattaacttcacttactgaatatgtgctatcacattttgctattccttaaaaattgagctagactttacatatagtgaaatgcagagatttcaggtgtacaatttgatgagttttaataaatgtatacagccatgtgactgctgccaccacccctcccaccagtttgaaatacagaacattcttccactttgaatcactgggtgagcatgcctgaggttgaaatgcagtccctcctctcagggcggggcctccaggttgtgtttgctctgacctggaggttgcaggggtagcagacacatgaactctggctctgatggtcttattgctgcaaactccacctgcctagtttgtttagtttagagttactgcctcagcgccctccaacaagagtatgtctgtcacaatttcccttcctttcttgcttttagatgctgagctttttataccaccaaagatcaacagaagaacccagtggaagctgagcctgctagactgagtgactgcagttaggagggatccgacagagaagaccatttccactcattcctgttgtcctaccaccccttgctctttgagggctggctattgagaactggaaagagtaaaatgataacttaccttagcattgccaagaacttcagcagacaacaagcaattctatttattttatgttgtgtatacatcttgatcattagcaagacattaagctttaaccattatggcaccattttgtgagaatgattgttctttcacttgggctgtttgagagcataattatggtaatcatgagattaatgtttcatgatttctacctccaaagtgtgaagacaagtaaaacaatgtttctaaattgtcttattttgttggcggagaagattacaatggctattagtgctacatttggtcaaatgtaatcacttaaatagcttcttgtcaccttaaactaaagcagaataaaaagtatcctttgaaattataagccctcctttgctgacagctattattttgtaacatcttaccaggtcatgtgctttcagttataactgggctgagcctcctataattacaatgtctatagggactgttttactgcctgtgtattttctgctagagagttagcaatgttagagctagaacagattagaatttctaaacagtatcatgcacagttggtgtgagtgatcagtgtgcattgtatggcatgcatggttgtgaattattctctgttctccaaatactgtttctttaactcagatatttttgttagtgtctaggccacttcatttatttttcgtcatggtactttactgacttctctttattcaattctccacgccctcaccaaaaaaaactgtctcaaaatgagaatattttattttcatggtgagtctagaaaacgcccacttcattctgattaaaaattcttccatgttttaaatatcagaaccagacctttcttactgtgtatcttagcccatttgtgtctctataacaacaaccagctttcaaaggaactaatagagtgaaaactcactcattaccacgaggatggcacaagcgattcacgtaggatctgcccctgtgaccaaaacacctcccattgggccccacttccaacactggtgatcacatttcaacatgaggtttagggaaacaaatgcctaaactacagcactgtacataaactaacaggaaatgctgcttttgatcctcaaagaagtgatatagccaaaattgtaatttaagaagcctttcccagtatagcaagatgttaactatagaatcaatctaggagtattcactgtaaaattcaacttttctgtatgtttgaacattttcacaatctcataggagtttttaaaaagaagagaaagaagatatactttgctttggagaaatctactttttgacttacatgggtttgctgtaattaagtgcccaatattgaaaggctgcaagtactttgtaatcactctttggcatgggtaaataagcatggtaacttatattgaaatatagtgctcttgctttggataactgtaaagggacccatgctgatagactggaaatagaagtaaatgtgtttattgataa

SEQ ID NO: 1177 - DNA, 71913 bp, Homo sapiens
gcaggcggtgacgtgttgccggcgggggccgggcgggggtgcggctccaggaaaggagcgcggcctccaggaagccggctggccgtgatgctgcccactggtggtcccccgctcccggggtccccggccggccaagcaggtgaggttgccttccgagcgtgggtgaggggagggcgggcggccgaaggggccggcgagtgggttggagtgcgggggccggcggcgcggcgagcgggccgcggacgagcctctctgccccaggcccccacagccgcctgcttagccccgcggaccggttcccgcctcccctgccgcgcggccacatccgagcgccccgggaccaacccctgtgagccctggcggccggcgcgctcccccagcccctggcaggggacacctggcggtcgcgcgcctcgggtgaccgctcgggatccccccctcgaatgggcggagcttgaccgggcagcagggatgctgcacccgggacccagccggccctgcctgccgctttaaatgatgacattcgctcgtcttgtcgttttcgctttgctttgcttttgccagatttcatgttagatttcttcttggaaaaatggagcttattgggcagtaaagtgatgatgcacagcattgtttctgaacttgagtaatgcgcggaccccttttaaaggaacaattctctcatggtctagaatgtgtcccagaacccttagggtgcttcagaccccagttagatgaaccctagtgcagagcgttttcagagaacacttatcacgaaggaaactaaagagatcctttatgattcaggaactttcaggctagaaggtaaactagaggtaatggaagaattctaaattagacactcaaagcccaggctaatttcgcattgcagtctttgttgtctcctttttgtgatgaaaataccaaattatccagctttagagaggcctaaaagagttatattatttgtgttaccatatatttgatgtttttgtatcaggtttgttaattctgtttgacatagtagaattataaaatggaacactaattcgtgtagttgaatcgtttatttctctgtttaccttaacagaggtcttgtagttgttgcatgttgaatctatggcttatattcttctacctctaataggaaatgtgtgactgaggcccttgaggatatagtctaggaaggagacaaaaatgaacatttatctaaggatttatattctctacgtatttactcagcatgtttatttaaaatagactactcatgaataaagagacgattccaattgtaagaaaacatcaggatgtgtaacaggttaaatcttgacaaagaaacatgttgacttgtgccttgaaagaagtgtagtcttgagaggaggacacggtggtggctcggaggaagtgctgttagtaaatgcctgaggcaggcatggagacagcttgtgtgggagagaagagagagacctgctgcactggagctgagagatggtatctgggactgatgagaggataggttggtgagataaggtggaccagttgatggataaaaggtttcaggtgccacacaggaaacttggtgttgatccatggccttccagaaggttcttagctgatcatattttgaaggccgtgttttacaaagagttgcttgtaaagtgtggcgtgcacagtgaaggcagaaggtgggtgagtcgccaagagatctgtcttgaggtagtggtgcctgctgtggtcatcttagatatgagggatatctgaggaagaatcgactggcttggagaatgatagaagattgtcaacaccggatgtgggaatcaaagctgagaaccaggtaatccaggtcaatggggattggtggtacccgtcttagacctggagaatttggagggtggtattagagtttgcattagaagatttcaaccctagagttggactagttgagcttgcagtaacagggcttcaatgagcttggaacgtggaactggaacttgaggaaagtcagagttaattcaggaaaagtgaccagaaaaagactacttaaaatgggaaccagaattttgcaaattaatagagggaggaagaggttaagattttatattgaaaaataaaattaaaatgtgtaagataaatattgaacatacagatcataaatgcaactacatacatatcttcttaaagaatgaatcaagttgtcttcatgtatcttttgtcactactgagtaacggtgccacccggcagcctccacatcagcctctcactctcagaaagacagttgtttcttgcaaaacgctgccggaatggttgagagcatctttaatttttccaggttctcttgaatcctttgatattcaaatcattcttttctgaagtacccttccctgtggtacctttgcttattcagaagctgagctctcccagaggctgacttctctgtgattttgtttgcctgtgatttgagttcactaacatctgtttccttgcatcttgtgtttttccaccagaggaaccatttccctttgtggttgatttgcattgttttcgtcgttatctgtagaactgtcagtgagagactgacaaagacattgacacctgactgtaggctttattccaataatgttcagccaagtagggccccactagctgaaatcatgagaattaatgcatctctctggtgataggtctaacacaatttaggcttttttaaaacatgtcagttttatgtggtattactgaatttgcctcccagtgccctggtgcgaagattcttagctagaaggacaattggagtttacatttgaagatcaaattaccatttaactcttaggcaataatccattgtacttttgtcctgagttaaaattacagtgcttcagcagttataagctgtcctattttctctgcttttaaacacaagctttgtaacttaaaatatctgtttgtccttttgatcaaaatcatcacatatctcaaaaaaaaaaaattcctgagacaaacctcagatgacacaaagtttcctaagtgcgctgtgatcattctctcggtcaccttcctcttcgaagtgtgttctttctcaccccatctagaattgacctcccacctctaggaatcttttcctgctaaagctagccttctctgtgctcttctctgagctcttataacaagaatcccagtaatttaacattgcctttaattagtatcttgactattttctgggcattagtattttctctgtagcaatctgcaaactccatgaaatttggagttgggtttgttactcctcatgtcaccttcgtagtcctgactttcttcctcaaggaccagtttgcctttaaccatgactttaagctgttaaataaaactgtcttttctttggttctcagttcagctatcacacaactatcactgatgttttttttaaatgttcagattggaattcctgtgtcctgataggcttttaagataggctttctcaatatattcggaaaagtatttgatcctggaaacaaggtttcatccgtcaaaggtagcttgttaaaaattgttatttcctctgatgataaaattaatatatgtcctttgaaaaatataggcaagcctagggaagaaaataaagatgatacctgatctcattgcccagaaataactaagcactgttaatattttggtttctttcctaacattttatccccccatgcatggggacattttttcacttaatatatcatgaacttgttttcatgtcaataaatagatctatgtcatcacctttaatagtcacattgtattccattgcataaatgtaccccacagtggacattagtaacagtgttttgctgttccacacaatactatgatgaccatcctatagattttttagtgaattttcctgatgacttcctaaagatgaatttctggaagtgtgatgggtagagcagaggataggcatgcataagtgttcgtgtgtgtcaccccagtacccccagaaggttagtgatgtgcctgtccagagtctcacagcagtactcatcgaccttttccccttcccctgttagccaagtatcaccaggccttcatgtctgtcaatatgatagctgtttttatttctatttatctgaatactgattattttatcagccatttcaatgagatttatttcaataatctcaaattgtctttgctcatttttctgttcagtctttctcttatttctttataataactggctatgtaaaggttatttactctttgtcatgcactttacaagtacttttcccaagttgtgtgtattcatagcagggagggatttttttgtttgttttaagcacacagaagttttaaacttgtgtagctattttataaaaacattaaaatccatttaaacgtctagatcattgatttttttttctttttactttttgtgtaaacttttaaatcacagacattgtttgtcctaaatttggggtacatggtacaatatggacaccatattaaaacttgaactaattaaagtgattttttcccctttgtcaggtaggcattattaatactttttactctctaatatctttgtgtgtatgttttatttcctccactgccttatagattctttaaggtctgggcctatatctaattcatctttgtgtctcccatttccagccatttgtgaaacctgcaatagttactcatgatttgtgtggcaggcactggtcacgggggaaacagaagaataagaggctgtccctgccctagtggggcttgtcatgtaatgaggaagccaaccacacgtataatactttagcccactgctgtgataagcaaatactctggggatatgaggattagggaaactcaccgaggactcatgcttgatttgtgtcagcattgattcttaggaatgcaactgacaacacaaggaagaggttcattctgctaatgccaaggaatgcgaggcatttcagtgatctgtagcttgtgtttcatgtggctggagcctagggtacgtaggaggggtctgtcagggaatgagacagaaagataggccccagatcagtactgtgcaaagagctttctgcgatgatgtcagtgttttatgtgtggactggctaatgcagaagctatatgtggctattaagcacttcaaaggtggctagtacaactgaggaactcaatttttaattttatttaaatttaattactttaaataaccacacatggcaagtggctgcctcattggacagcaccggactaaatcatgagggacctcttttacaccctaaggagttgactgtttcctgagtgagagagaaaagttgggggatggggagttatgattccctgtttgttttggaaatgtcactctagtgtagagttcttaacccttttgggtcccagaactctaaaacttgacttcttgccagtccctttcctagggtctgcaaagctacaactgcagcactcaactgagcagaccaaaacctgggcctgggggagctcccattctgggggaagagacaaaaaagagaaacacaagacacgcattatgttagaggacaaggatgggtggattctcacacttgcatcccacctctccctcccaggagctgtgtgaccttagacaagttacttagcctctctgcctcatccataaagtgttgtgataatagtatctgtcttgtaagttgttaggggaatgaagttagtatttgtacaatgtttggaacaaggcctggtacataatgagcactataaaagcatttaataaataaataaatgctaaggagaaaagatcaatcagggaagggaattgctggggagggggtaggcattgcagttattgatcaggtgaccagggaagtcctccttgagaaggtgacattatttgagtaaagacctgaagggaatgaaaaagtgagccatacagattacttcctagtagagggggcaacaagttgagagaccctgagaccagagagtgcctggcatttttgaagaccactcggaacattggtgtggctggaatgcagtgtaaaggaggagagagcagacgatgaggtcagagccttaacaggtgttagatcctgtagggctttgtagattggagtctttggaggatttctgagtacagaagtaatctgatcggggtcctgagcaaggggtgggagtgtggagctatcaatttccaagaaagtatcattgcccgagggtgataaaggcgaggtcactggttgagactgccggtagaagactagttaggctgctctttagagcaggcaagagataagagcctgatctcaggcaaagatgataaggaaagggattttagataagctgaggttaaagaaattaaaggaatctgtaagaaattacatttggggccaggcacagtggctcacgcctgtaatcccagcactttgggaggctgaggccggcagatcaccgggtcaggggctcgagaccagcctggccaacgtggcgaaaccccgtctctactaaaagtacaaaaattcactgggagtggtgacgggcgcctgtagtcccagctactcgggaggctgaggcaggagaatcgctttaacctgggaggaggttgcagtgagctgagattgtgccattgcactccaccagcctgggcgacaagagcaagactctgtctcaaaaaaaaaaaaaaaagaaaagaaaaaaagaaattacatttggaagatgaaggaagagggatcacacgtgaatctggtttccgatttgtgtagcttggtgggatcaagattgggactgcgggggcagagcagattaggagaaaaaggggagaagattgcagttgttaggggtgcagttttagaattttctcatggttctgtgcaacattcagatagagatggctcataggctgttgaaaaagtgtagaagagaagcctggggtggagaaagaaaaatttgagttacctgatcattgaagcctcagtaatgattgtagttagaagagaatgaggctagacagagagcctggaaacataagagtagtcggggttggcagagaacaacgcttaaaggatcctgagcagcagttattccagagctcagaagcagaccagacgagacagctgtcttgagaggtcaagcagctttgtgagaccgaggaaagatagagaccgcttgtcctttggcttcagcagattggaaggaggccctggctaaaggcatctgtctgctctgcaatttgaggcctggaggctggaggaggagtgataatggtggagtcggagaactgactagggacaaagtgccttgcacagtactttgtacataaaagggcagtctaatagacatttatcaagtgaatggatatttcaggttcacattcagcttattctgcctttctcctacctccaccccaaatctcccttgtaccataaggtatttaaggcctatttgatatcctgatattttggggtcacagacactttaggttagacagcactaactagtaccagacgattatcatctcttttgatttaggtctatattggacagtatgaaattaacttagaagtgtgttgctcagaataaacccttccaacagcttcagtgcaaggatcatgtatagattatatgtggttggatttaagcacacacttaaagaacgtagatgttttctttgatgatgctatctttgtgatttgtctcacttcctggaacaggagggctctaactccgtgaggaccccagcattatttctataattgtttgtgagaaggactgaatcccagagcattgccttgttgctgacctttcagtatggggaggtaagtgatgggcctaatcaccatgaaacatgaaatcttggtgatgcaaaaacaggtcttgagagaaaaaaaatctaaatcgcaagtgaaaaatgtgaagttgtgctgtgcttctgtttaagaccttttttcttccagggcccagtgaggtattttaatgcatgaagcactcttcaaggtgaagagtaaagaaattaactgtaaaataatagaatttatcccaaaggcagtgaaatttttttaaatcctaatcatatttctagaatgagcctctcattcttgacataaactgaggggaaaagttcttgattatttgcagaaatgtcttgtgggaatatttctaaaagtacaggacatagaaaactcatttattgactttgttatggggatgttgttaaaatgctgttttctcccattactcaagtcatctgggagaaatttgccttggacttcagtgttgagaaaatttgttcctcctgagctatttgtatatttctggtgtaatgggcaatgagctcagtcgtatttgcagcaggcccagcttacgacatgcctttctccatactgcattcccgtttggtctcatcatccttacactcgatttcatgatcgatttatatatttatgttattgaagttattctcgtaagcagtctctaattctgtatctatgttggagcaaagcagggtaaaattaaaaatctacataatactgtcaagagaaggggaaaacccagaagtgtcgtaaccttcagggcctgattctcattcagatgattttatgataaggggtttgtagctgttgtgtagcatatgcaagatgccagtatacagatacctacagttagggaaatccaggtagctcaagccaaatatcttattttaggatcactttaggtgaaggaagcctcattggagcagattgctttaaaatctttttccttctaatttcaggattggcatctcctgtctttttcctgcttcttggcattttagcatatctccagtagggtgtcctcgaattctgaataccaatttacgccaaattatggtcattagtgtcctggctgctgctgtttcacttttatatttttctgttgtcataatccgaaataagtatgggcgactaaccagagacaagaaatttcaaaggtaagagataaaaacatttgctttctagaccagaagccttaccttctgtcttacctgttttaggctgctggaacagaattccatagactgggtggcttataaacaacagcaatttgtttctaactgttctagaggttgggaaatccacgatcaaggtgccataggttttgtgtgtggtgagggcctgattcctggttctgagatgaggaggtcttcttgctgtttcctcacatgatggaaagggggtgagggggctccctgaagtttctgccctcatgaactaatcatccccctgaggccccacctcctaatagcatcgcattggtgattaggtctccaacatacgaattttggggggccccagacattcagaccataacaccatcatttcatggcttcacgacgtttggctttagattggaatttaaggaactgtaggaactagattctgtgccatgttcatcatggcatgaacagttaaaccatttgaagctagttaactgctaactaccaaatccatatcataagaggtcctggaataattatttatacataagcgtctcgtgtaatatgttttaagctgatttttgagttggtagtttagaaatagaattttgcattttggaatttgtttgaacttctgtaatggagtgtgtgtctgatttagatgatctttatcatcatcacttgttttgttttcttttgactcttcaattattcaacagttgtattgatgttatagtggtgctgctacatagcttagaaattactgacttggtatttgctgcattttctctgttagacttcaggtgatattctttgtctaaatcaaagcatacgtgtgtttctatacaaggtacctggcacgagttaccgacattgaagctacagacaccaataaccccaatgtgaactatgggatcgtggtggactgtggtagcagtgggtctcgagtatttgtttactgctggccaaggcataatggcaatccacatgatctgttggatatcaggcaaatgagggataaaaaccgaaagccagtggtcatgaagataaaaccgggtatgtaaatgagaacatctgcctggtaaccagggtgtgtaccttcattctctgtggcgtctttcatatcgttccctttctacaccatggccctgagtcaaacctcacaccaggacctgatgggtctccttgtttcactttcttttcccttttctgtccattttgcaaagggtgactaacaccttgataaaacatccaaacagacatgtctttttgtctcccatagcattttaaatagtgccttactcatggtatctacgcagatgttgctggttggcattaattatggagagttttttcctatttagtaaccattggtctctatccttaatgacaaggtaatttcagataactcatgaaaatctgtaatatattggcatatatttgtcacttttaaaaattgctggccacatgtagttctagtcatctagattatttggtgagtgtgaccacagaacttagagctaatcataattatgtatagtttttaaagatactgtaatttctaagccagtgtgacatgtaaaagtttaggtttggcttccttattaggtaatttacatcagtgatgctcttttttctgtatcatcaccatttccatggacagcagcttctgtcaggagcatttagaatgggagataccgggagtgccttgaaacaagttttatgtcttgatagttgatcactgatttcaaacagttgaccacagatcttaatagagatgcagcacttttatgtcatcttactaatgtattaaaatagtaaaatatcaaatgcaaacaatccaagaaatttatctggtaaattattagagaatattgataaataataattattatagcttattatccccatttcagaaataaaatttaaaagaatattcagtttaacatgagaaaaatacatatcctcatagaagagtctccaaccatgtagaatggtgacccctcgagtcctcattctttacggaataattcagaccccacctcctccttcaggcagccctcaacaagttgattatcctttgatgtatgggcagctaggaaccagcatattactcagaaaatctaaagtctgtacctcacttttcaggttaaagagagacaacctactgtgtgtctgtataccagcattattttatcagagtacatttccatgaacaaagattaattttttagtgagtgtcttctaagttttagttttatgtatttctaccccttaaatttttatgtatccctaacctagaaacattttcagttaaagtaatattgatcaaataaaaaacttacgagaagactgaaaaaataaagcattttacatttcatctagcttcacgtaccaggtcccatcagtgactaaacagatctcatggaataagatgaaaacttccatgccttggagttgtccttttagaacaaagggtcaactacattatcatcctagagtatacattagaatctcattaaaatcaggcttaacattggtctgtcttgcactatacaaagtgtatgaaatggaaatcaaaatacctttttattgcactactctgtcctgaagcatggacttccgtgtataacattgcagcaaggctctagaaatttcttaatagggtctggctagtttagggcttcgagtgcattgaaattgaattgtatgtgttgtcaaaaacttacagtttagtcaattttttgctaattcctttgatgaatcacttaatctttttgggtttgtaattttctaatgtgtgaaataaggtatttttagacttctaaagcgcccctcatttttaatattgtaggctaaatgacacctagaaatattcatttgtgtactcattcagcagatacatgctgggcacctgccatttgctaggcactgtgttaggtgctatgaatataagtttgaacagacacattttgtgcccttgagaagcttttagttgtaatgagacaggcaagtaaataggtaattttgatatggtgtaatgaatgtacatctagcaaaaggaagtaagcatggaatttaacaagagttgtcttcagggttctgttagggtgacttccatggaggctggagccaagtgggtgtgcaggaattaaccaggtgaaaaggggtagggaggtggatggagaagactcttcttggtggtggaggagcagggccctaaggccacagtaaggtgcattatggaaatgttagttcagtgtagctgaaggcaatggaaggaacatgggaagagataagggtgggtgagttatgcagagcagggtgttctagagttgagccttacctggaggacattgagccacaaaagaattggaagcctgaagaggcatcctttgggtagggaatggtggggagatggtcaggatcagagggtgggatgtgctgtggcaggctggcagagggcgtgtccaaagggatgaggagtaaagtcatgtgagaggaaccaaggagaggcgatctatgaaacccaggttgtgtgttgggatgagggagagggacttcatctaagaccctggcttgggctgctgggtgcccagcgctgatggcctcggagggaggtaaccagcagtgagagcaggtttgtagtgaaagttgagttcagattttgccatgatgcattgggggtggctgtgaggacaagcaagggcagtgtctggtggacagttaccccacgctcacctggaggctaatgagtgctgcatggctggtggcacagttcggagttcatggcatgctgatggtgatagcagcctcaggagggactgagctcacctgaggagagggggagcacgtttctcgagggcaggcaagagcccatgcgcatggcagtgacacacagcagatgctcagtcaggtctgtgtgctttgatgaagaagaaaaggacatagcactgaatagtgccaccaacatttaagtaaggtctgcagaagaagttgctagaaggataggaaaaactaaggaagtgtaatgtgtagcatgatttccctaaaattagccactctgaagaaacatcacatgttatagctaaaatatctgcttcttaactaaagtatcctgtttctctaggcatttcagaatttgctacctctccagagaaagtcagtgattacatttctccacttttgaactttgctgcagagcatgtgccacgggcaaaacacaaagagacacctctctacattctctgcacggctggaatgagaatcctccccgaaaggtgatcctccacagaagggcaagggtgagggtgggttcctggaggggagagggggtgttcttctcccccttcctccttctcctctccatcatcatcatcatcattgaaaggaaaatattcaaaattctttcttcaagtctgtaacagtaccagaactattcctttagccagaatccaccaaatagcctttaattgacttaggactataggcaacggtaaaggtgtcatttttaaaaacctaatctattttacgtagttaaggaatgcttgcagttgtagttttacatctagaaatcacataattcacacaacttgttcattttgaaaattcattcctaatataatctttccaacgaatttcttttttaaaaaaattaactgtttcatacaagatataccagatccctggttttgttttttgtttgtttatttttttccttttctaaacagaagataccaagctgtaatcttttgatttgtaaatgtttttattactttacagccagcagaaagctattctggaagaccttctgaccgatatccccgtgcactttgactttctgttttctgactctcatgcagaagtaatttctgggaaacaagaaggttggtatattggtcttcagtttaaaatttgggaagctgttcctttaaatcctccccattttcaccaatgtaccctttgttatactcctattgtcttaacatttgggaaataatagccttgaaatattacaatttttaaattactaaatcagtttcttatatgactagtctttgttgccctaacattaagccactgaaagataaccgtttgtcttcaccacatgtagtgacatagcttgatataaactcactttgatagaaaaggcttgtgtgccttgcctaagttgtgtggcttcctgggacgttgatcattattgagctgttggagcttcttctcgactttgatacactgagaaatatcaaatctttgttctattttcaaagaaatgattctccttgagaatgaaatgtcaagtcaatgaaattatttggggtatagcttgctagaaatgtataccaaaaagtatttcaaaagccgtctgtcatttcagcattaatacttcctatgtgaaagagactgtagagaatacagaaatggggtgaaatttacacattgctattcagctgcttacagacaattgagctacacagttagctgttctatgagggttttaggtaccagaaaaaagatgaggaaaaaatatcacaggagttcttaagagggaggcatttttttttttccagctagggccatgatggagaaagtgacatctgaactgcacctcaagggaagggatagttctaaatagaacatgccagagcatgggaagggtggggctctgagggaggggcaggaagcacacaccaggcagaagaaaggacttgactcaggacaggttggaaagagggcactgtggacagagaaacacaaatgttttagtttgactgggtggtggcccttctggaaggagtggcgggaatgttaacagttggctggctcttgaattgtcagtccaggaatttggacttctttctgtagatgagtccaatagcagagagtagagcaggttgcagcagaggaataggggcagggatggattagatggactacccaaggtgacaatgaaacccaggtgtagggaatgtgaaaatagaatcagacttggcagctgagtgaatggagggataaaggaaagagcagaagataccttgaattttttttttttttgagatggagtctcgctctgtcaccaggctggagtgcagtggcacgatcttgactcactgcaacctccacctcccgggttgaagtgattctcctgcctcagcttcccgaatagctgggactacaggcgccgccaccatgcccaactaatttttgtatttttagtagagacggggtttcaccatgttggccaggatggtctcaatctcttgacctcatgatctgcctgcctcggcctcacaaagtgctgggattacaggcatgagccattgcacccagctgataccttgaatttttaaaaccttggatttgacaggtttaacatcataaaagtgaaaattatagtattttgaaacataaatttcaaaagaaaactggcacctagcgtattgtatttccaacctgtgtagatggtataaaactataaacattaaagttgagagttcttggaaagccatttggagtaataaaaacatcagtagcaaggtgttatttcagatgattttacaggttatcagggagtgaaataagtgagacgtttgcacagactgcgcagataggagttacacaaaatgttttaaaactttttcttctcttcaccctgtaaaatgtctataggtgtgtatgcttggattggcattaattttgtccttggacgatttgagcatattgaagatggtaagtgtcatggttccaacaaatgtatctagttggaaattggtgcttttctgtttaatccaaaggctgaaaaaagagctaagctttgtgacactcctaagcgtgtaggagtagaatgagagcagctgcagttgaacgtaattcaacttgattttagttgggaggagtagactgggtttgcctgaatatgcttgaaatagaccatgaaaagaaggtgactcttcagaagagcccagttctctggattagttctgttccagtgaacactttctgttctttctagatgatgaggccgttgtggaagttaacattcctggaagtgaaagcagcgaagccattgtccgtaaaaggacagcgggcattctcgacatgggcggcgtgtcgactcagatagcgtacgaagtccccaaaactgtaagctttgcgtcctcacagcaggtcattatctgtacaaatttccttctgtttggtttggttttcatttaacgtgtgtccatcgttcttgttttgttttctgagtctgaacacatctttactgtgctggctgaggtgccgcctctcaacccaggagaaaggagacaggacgaacaaggcagacctcagctgagccgcttgtgtgtgttcattgaaatcagctggtttgttttctgaacgtagagtttttctttggtatatacgcagtcgcatgcttgagtttcagtttatattttctcttcaatcacgtcttttctcaacaggttttatgaaatgtaaaataataacatctgattttttaagttagaattgggggaaattcttttttttaatggttcagactttgagcttccttggggaagattgaggtttgtatccactgcttccacatctttcaactggtggtttactcgaactgttctccaccctgttctgtgccctctcagttgctgcctgggcagccttgtctagagaaccccggcacggtttccagatgtatttctgaattgctacacgtctttattactccatttgtgttcagctgtagattaacaccaaagcctagctttctggattttcccctcaaaggtgggcggcagcatagcgtggccggcgggggacggttcaaagtgagaccgtggagctagacaggcctgggtttcttcatcatcctcctcctcactagttgtgtgaccttgtgcaagtcatgtaccttctttaagctggtttcttcatctgtaaacgtgaacaaaagtacctacaacatggggttattagaaggtttaaatgagataatgcatccagtatatctaatgcactgccaggcagctagtatgttctcaataaatgttactgacatctttattaagttccttggaaaaatgctttgtaaattcaagtattacaatttgtttttcctacctcccattccagacatgcctctagagactgttacactctttgtaaaaaatcatgtttttccctctcaatataaagtaaaaaatacatagaaataacgtttggaataaatactgaaaaatcaagattaaaaatttcccatggattcatcacctaaaaaagccattgttagccttttagtgaatttctttttttttctactcatagttttaaaaaatatggttgttataatcttagtttatatgatttttgtcctttatttaacagtgcatgagcatgttcctccataagctattgattactgtaactaaccttcccttgctattatatatttagatgacatctagttttttctgtcacagaatgacaaaggacatctttgcatatagaaacatttccatgtttaggtgtatttccacagcataggattccagaaataaattatgtcagagggtatgaactattttgctgactttctctttcaaaaagtcataacagtatcacaaatttgcagcccatctgaaatttcctaaatcagaattgtcatattgaattatgagtgatgcttagaagggtccttgggaagtgcagaagcagacatttttgtcccttttagatgagactatttttagacttttctttttagtaggaggctaaagtagcttaagctattaaggtttgttatgcttatgtctgcaggaagaagtagctaaaaacttgttagctgaatttaacttgggatgtgatgttcaccaaactgagcatgtgtatcgagtctatgtggccacgtttcttgggtttggtggcaatgctgctcgacagagatacgaagacagaatatttgccaacaccattcaaaagaacaggtaaagcacctttcactacttggcagtcatttgcaaacctaggtctctcctcataaaaaacagacccaggcaaagtgggaagaactcaattagcaaaagtgtgttgcactgttagctttttattcccccactagctgagcagggagaagagatgaaagcacaccagggtcctgcctttggccctctgtcccaccgtgccctgaaggaggtgtgtgcgtgcgctctctcacccgcatctcaactgatggattagaaatttcaccatcaagctatagaatagtttggagccctgggtggtgctattcatgattcagagtccttgggaaacccagtatctggagcactcgtggtgtcctggaggcctcaggtagtgtgttctcttgttgctgaggagattgaaatatgtgatgttctggagactctgtggatgaagcagccagtgcagctagttagtggataagaaccatcgtgaagggaattattcaagagaaataaattatctagaagagtcagagttagtggcttttgaatttagcaatgaagctttaaaaaatgagtgtatgaagaattgtggtatagaaaatatataaaacaaaacagcactctattggtttaaattgactgtataagtgtaagtatatagcacttatttatttgaaatttgtaagaacataaaagctatttggataaataaaaaaatctgaatctggggttatgtaagctatcctatttattactgtgttttatttgtttattttgatgaaacaattttgagggaaaaaaatcctagttcatagagctaagagattgtatacttccttgattaatgtaatcttaataaacctgtgaaggcctgaacttgaaaaaagaccaagttggagctattcagtacatttaccacaaagtcatgtgtgtaaataggaaaagcaataaaaaccttttcctgtgtctcttccaaaagttaactgaatagttttaattataagattggtagtcccatgattttgtatttttaattggtatttagcacattttggtataatcatttttatagtagtcttaaactagaaatattttatagacaacatttgtaacatattttttccgaaaccttaatttttactcattggttttaatgtcagaaagctttatataatggatagtttagtggtacttcttaatttagatataggacaactaaaaataatagcatgaaatatatatttgactactcttggacttttatagtaattacaggtgtttcatatgtcatgaattgagcattgaagtacacatttatctcttcgccatttgtagtggtgattaatttttttaaattaagcgaacatttttatggcaaagaccttaatttattacattcaactgcatgatgagtaaccctgatctgaggaatacacaacttgtgagttgagtgaaaagtgaaaacttgactgtcggtgatgaatattgaattctgaccatgcttaaccctttaacagttcaacacctgtcaggcccctgtgatttcacagtatccaacaccaacatcacttgagattttgtgagctcttctctgtttcttgttgcttgaaggcatgcacacacaataggatgacagatgttaactcccagaaatttcattagcaagtaataagcctagtgcctttcagttaacaaaattaatgtttattttctacagggcatctcagagcccattgtacaatggaaactgctgtctgctgcagttgggacccatagctgatcaaggaaagaaataagttgaaacagaatgataaaaatagagccaagccttagacattctgtcttaacttctgtattcatttgctaatcttttcctctgaaccaaggtctgtttttagactccatcctttctttggcatgcactgcacccctcattgagataccagtttgtctttgtttaaagaatactgaggacttaaaagagatttgcaaggcaatttgataccaaatccttctagatgtttgctaatttttcccagttttaaaaatcctacccacacctagtttgataattttctagtaacttttctaaagcatctaacctgctttgcccaggaccggatcttgtcacagtcacgttccttccatctgtattaggtaaaaccacaagcactagtgcaaaaatggggctggtaacacagttgccttgtgcccagcagctgggaacatcaggccttgttgccaggatcgtcggctaatcgggtaggttatccaactggactctggtagcctgtctgctgcaggcaagtttgtatcctgactctccaagaaagtctcaagtgtgtattttcctaactaattatctcggaacccttttctgttccacagacacggtcctgcaggtctcatgtcccacagagcgtattttgagaaacactggtttgcagccacttcctgaaaacacagttttctgtaggactcacgatgaagtttcttgttttgccataggctcctgggtaaacagactggtctgactcctgatatgccgtacttggacccctgcctacccctagacattaaagatgaaatccagcaaaatggacaaaccatatacctacgagggactggagactttgacctgtgtcgagagactatccagcctttcatgaataaaacaaacgagacccagacttccctcaatggggtctaccagcccccaattcacttccagaacagtgaattctatggcttctccgaattctactactgcaccgaggatgtgttacgaatggggggagactacaatgctgctaaatttactaaagctgcaaaggtacccttgagagacgccgtctgctctgcatgcttttgagagaccagtgtggacggtgacgggttatgtcctcctttcacattgacagggaaagacggagtatagaaggctgcactgcagcatgttgggatcctgttccctttgcttggagggaggttgaatagtcacagcagaagtaaaaaatgtactgtacgctgacttctgcaccactccattagctaccctggtcatcagttagctccaaattacagtcttttatgtcatttttgtgctttgctgcatgtgacaattctcctactagccttccccctccctgacctgccaggatactcctgttcttgtgttctctctgccttcctgacaccccttaaacttaggtgatgccagacttccacacttggcccctgatcttcaggttcttggatggtctcatccatattcagggtttgctgctgcctctcaagaagaggctccaatcctgacccctgcccggttgcctgctagattccacaactccagacaaacccaccatcctctctccattctgttcctgttcttctctcggttaatggcatcgccaaccatccagtccccttccctgcagcctaggagtcatggacttctccctctaaccatttcatctctccctatacaccccagtgtaatcagtcacaagtgtggtattttatcttccaagtatttctcaaacccatctcgaagcgcagagcactgtatgctgtaatcatgtcagacagctggcttccctcacgctctccgcgacttctctgtgtccatgtccatgttcctgaagtgcctatgccgagcccgttccccaggccaagtgctttttccttgtgctccctgtcacacacccaggcccatctcccacctctcagcagtgtcttcatcctttaaatagaggtcgggatggtagccacctcgaggagttaagtattacattgagaagacacacttacacaatgctcaataaaagttattataacaaataacttcaagaaaagtgggatctctttcccttctgttaaagacaaaaaccttttgcagttattatcccagtagcttgtactgtgtcctccacagatgtaggacttagtttgaagtagctaaaatactgcttcacttttccaaaaatgtatgcccgtaccatgcagtcatggagggagaaactaaacagttttggagaggttggttgtggacagcaaagctctctttaacaataccctggacagaattttaaggcaaggcattgtgtttgcgaatcagtaagtattccctgagtgtttgtgtgtcttgccatttgttgtataagttaagcttgtgtgtttcctaatgggaaggatatgcttgttacaaatataaatttggtaaaccatttttaaagtgagaattttaataagcctttactagtgatctattttggtgaatttgttttcaggattattgtgcaacaaagtggtccattttgcgggaacgctttgaccgaggactgtacgcctctcatgctgacctccacaggcttaagtaagtactagaaggtcaagcccagggcactcttaagaaccataatgcagtgttggccccactggcttgccacaccctggcctcagtccagcttcttctcactcactgttcttcccatctaccctgggcccctttcaaacgggacaaatacttgtgcccagacatattccgtatcttttttgttttggtcacttttactgtctcttacccctgaaattcccctgttcatacctttgcttgttcaagtcctgcccagacatcagagtccagccagaggctgtccctttccagtcttcctctgtcccctcaatcagacttcatccctttctctgagtctcaagaattcatcctacctcgccaatgcatttatcatgttctgctttttctgttgctttttaaaaatcccctttcattgtaagtcacttaagtgcagacactgtatcttactaattattgtatcttattacttgcttagcacagtgcttggcaaaaaataaacctctaataaatatttagagtcatagaatatcagagctgaagagaaccttcctaccatctcattttataataaactgaggtacaaagaggttggaacctgttcagtattcattcaaggagtacatggtgaaatgccagctggaaaagaaacctatctcagggatatatgacattatgccgagaccgggttcatgcactgattgatttgacaggtgaactgctccatgttgtgggaccagggatgtgaagcaagtacatcaaccttgaaacgcgcgcagttggtttgggagagccggcctgaggaagcccctgccccaaggctgcccacagagggaaggattgtgtgtgtgtgtgtgtgtgtgccatcttgacagagtgagtcagtctgacttgcctttgtgcttgccgtttgtaggtatcagtgcttcaaatcggcctggatgtttgaggtgtttcataggggcttttcgtttcctgtcaactataaaagcttaaagactgccttgcaagtttacgacaaggaggttcagtggacccttggagccatcctctacaggacccgctttctaccattaaggtagggctgtgaatttgggaacgagaatcaaaaagatgcttttctgcagttacagcacctcatggcagctgtggtctgtggctgtttggggcattgctgttagagccggccacggcagaattgtagggacagtgacgtttgcttttggtcttgccccctccccacaagtgcttcctcccttctcaccctaccatcccgtaatacacagcactcctgtcctactgccctgtgtttggttattctcaactgtctgttccccagccccggcaaaagggtcagttccggggttcttaacctttatgactcaggcctcttctccaaatactgtttaaatgcatgtataaatacataggattacagaagaaaccatcatattgaaataataccaaaatattacagaaaacaagtttgtgatactgtaatatgtgttcttctctattaacacattaaataacaggatctggcagcagaattagcactttctgtaatttcagtgtagtcaatgagcgtcaatgatattttgaggcattgatgataccataatgggacatgaaagatctgtgattttcgttagtaacaaagttgcaggtgctgccaacgctaatgatagtttgttgtctgcattcatggtcaaagaaatgctacatctcagtcagcgcttgggtagaacaaagatgtgcgtttttccccattcacgtttgcagatctgctgtcagttgacctgtgctaagaacctgagttacctgatagatgagacatttgctcttccccccaccccctccatttaattgagcatttctcagcaacccttttaactgggttaactgtaaaaatggtgagtcatgggtgttactgatcacaagcatgcagtttgtttacatgttgacttctttgtatcagcgaaaccttcacggctcttctaaattcctctgattttggttgcccaaattataatgaccgacttcagagtatactttcacatgttatctcactgatacttagaagccccctgcattgggctgttccgttctccatttcagaggtagggttgcagttcctaaagtgcagctctggggcctgggtcccgccgtccccctgtgcaccctttccacccctttccttgcttactgtcctgtttgttgtttggtgttcacatgggcagagacatccagcaggaggccttccgagccagtcacacccactggcggggcgtttcctttgtctacaaccactacctgttctctggctgcttcctggtggtgctgctggccatcctgctgtacctgctgcggctgcggcgcatccacaggcgcactccccggagcagctcggccgccgccctctggatggaggagggccttcccgcccagaatgccccggggaccttgtgatccagctcacagctccacgaagactcaaaaggaaaagccatttttgcctcagggtttctcctctttattttcctgtggttttgttttttctttcccttttttgttcctccaaacaaaaacaaaatgcaggccgagcgcggtggctcacgcctgtaatcccagcactttgggaggccgaggcgggcggatcatgaggtcaggagatcgagaccatcctggctaacacggtgaaaccccgtctctactaaaaatacaaaaaattagctgggtgtggtggcgggcgcccgtagtcccagctactcaggaggctgaggcaggagaatggcatgaacctgggaggcagagcttgcagtgagccgagatcacaccactgcactccagcctgggcgacagagtgagactccgtctcaaaaaaaaaaaatgcattgtttataagccctgctgtctagaagtattgcgtttagccattttgagtacagcattaaattgaggagtggggaagagggaaattcacttgatttttgctgcacaggatatctgccaaaaataaatgagatttctggggtttctctaaggaatgttaaatttaaacacatgcactttgatactggagggaggtggaaagatgcattctgtcagtggagaggggactgaatagtgatgctttcatagaaccaaaaaacttactgcctgaaatgataatcctcttttttctctatcttgaaagctctaacctgaagagggtgatttttttttttatttattgttcaggtctgttactgtatatgttttctttgcaaatttaaattttttaaaccatttatatccaaaacagagaaacatgggcaccaggagataaccatttataaaagtgatagtgaactatcgactacagctttgtgcgagtgtgtgaaaaatcccaagaaaccagcgtgaggggaggcaatgctggttctttaaaaacacacacttcagaatttactggtacattttatttagaaaaatcctcgttactgttatcttttcctgaccgcaggtaattacgctccttattccatatttcagtggcattagaacactgtggttttgaaagaattggaaattcctagtttcaccagtttcggttttattggaactagagcacatgcccacttcttgctcagtattcctcagtgtttctgcttaatcgtgcctcagtttcttccagcttccaattggtgtttcccccaccccccttaattaaaagtcatctcagcttttaatcgtactgggagaccccatgcacagcctgccgagtcctcttcctaaccgcattgactgaggctgttgctggcagcaccactgtaaatccagaagggaagagtctgcatccaatacaggaaataaattcacattttgaaggaaaaaattcgacaatttaagccaaaatctaaaaaggacaattggattggcatatgtgagattggtgttttttcacctatttatttagttgagaagtttggggaattctcgtacagtttttttaggtggagtttgttttgtgcgagtgtctgtgtgtgctgttccctaactccagaacagttaaattcctgtagttggtagcagattagtacccagaagtggggttgttgctataacagataactgaggatattataaaagtggctttggaactaggtactgggcagaggctgggagagtttggagaaacaggagagaaaaggcctgtattgccatgaactgagcattaggggcagttctgctgagggatcagaagagaagaccaagggaattctgtcccagttgtggctcaaactgcctcaggtgcagcttaacctgcgtctctggaaggtaaaatgcatctgatccttgaggcaagagctgtgggggcatggctccctcacctggatttcaaagcgtgttaccagcagcctggggacccaggctctgcctctggatttacctgcatcgtatttgcgcttcgtggtcaaagttgttaagaaaggggtgagcttctggctacctaataagttggtcttggccacctgcctgcgacacttcctggaggagccatggattattggtggaggctgcagggagctggcgatggagccactggtgtcagcagcagagagggaagaaaggaaaggaaggggccacaaatggttgaagtgggcaggtgggcacccagggagttaggggaccccgccttccagctctgggcatagaagagttagtcacatacctgaggatcctgaaacaagggctgagaaaacctcattgctccagctgagaggtagtagtggatttgccatttttaaacagttgcctaagaaaaaacgttgaagaatatgcagcagacactatatgtggcctgtaaagcctagaatatttactaaaatatttacagaaaaagtttgctggtccttgtgagaacaatgcagttcaaaaaaggatacagacagaagcatcctcttaaatcaggaatgtagtttccatttgtgggcacgaaaagatggacaagagaagtaaccaaacttcaatcttaaaatatttgttgcaccagaatttcacttcggatttttccgtctagattattttcaagatgagttttgaaacaaaccaagaaacctgcccctcacccaaaattgtttaaaaagagaccactcaagggagttcattatgccgtatggagatgtctgcagtcgcagcaaatcacattccagagaaggtctcgcgtaggtgaagacagccaggtgctttctctaagagatacagggtgggtgagagacaagccagggaggatcttaattcaagagaagaattcataccaagagctgaccaagaaggcagtaaattctgtgtacttgtagcagaagaaattggactaggaacttgcccaaagctttatcaaagaaaagcattgtgttcaatcttggtagaaacatgccagcaataagtgcttatgttccatagccatatcatgggcttctcacttttaaacctcctccaggggatgttctcagacatttcacaatccctctggggacattacagtagaagagaaacacatggaactgtaccagtgctttttgcccatgttcatcctaagctccggctttaggcagtgctttctgacctgggcggagtgaagacgctgctggtggctgaggccagtaacatggggcccctgcccagccaccctgaaggctgggtaggtccctcttttcaccaccagttttccacatctgtgtactctagattaacaaactctggataaacagatatttacattttaaactcaggcctacacagagtagttttccttataaggagcatgtatcacttagcaagaaactaaaaatggcaaatgagtttttcatcctttaagaaaaaaatcagctttagaattctctgcggtcagttgtgtgcaatgcaacaaaactacctttcagtaaattacttagttatttatttcagtgttttgtttcttttgatactaagtttccctttcaataatgaatgatgtgaccaaccaaggagaatttgtttgttctgtactaaaattatattttacagttaggaattataaaaagcaagggagcatctttaaatgttttttgtttaagcgatgtcttccatccaaagtaagaataatactctcggaaggtccttttggtgtcatgtcacttgctgtatgtggcagccttacagtgccacacttgggtactgaaaaatcaataaaacgaaagttcatcatcccatggcccgtagactgtgtgggcttgcttccttgtcatctttgaatcttcttactcattagaatgatgagttgaacttgagtccaaattcagtgaaatacattgtctgagtctgacgcacactctttgcatgtgttgtgttgggtgtgcatacagtgaagcacaattgtgtggggttgtggagagggcgtccacactctctgcagctcagaaagcagatatttcacaagtagtgaccaacccacgacgttaagccattcaccaacaataattgccactctgagatgactgtttataaggtcaccattttaagtacctacttgtatatagacaaggaaaagtaataaaattaaccaatttttatgtatttaatagtaacagcaaatgctgactttatgttacactgttttgcagttcgatctaagcttagaacctttggcttacttccagaaaattatgactgtcattattaatgttacgtgttaccaatatggaggatgacattagacgctcagcatgtttctcagccgttggagaatacatagatgttctcctggagcaggaaggtgggcctgagccataacctgaaaatagatgatagagacagatgggaagggaaggggaccagctgttaggaccaacaaaaataaaggcctgagacatgccggagaggagagggaagcgcaaaaacaaaatgagagaacagagccagcaaagtgagctcaagggaggtcctcaagccattgatcgctaggaaaacaggacacagcattaagatagaactgtcgtaaataatttttgaggcagtgcaatgactatagggctttttgcctgactttaaatacgttaaaatatctaagatgttaaaagacatctaaatttttattccacttggtggaagagaagtcagtgcctatttccaacactaaccatgttgacaggtctgaaaagccatggttctgtgtttttgttttcagtctgtttccatttgtcctatgaattggcatgtgccctgtgggtttttttggtttttttgagatccggaaatgctaatggtttgcacagagggggtcgtgaggtgcaggtcacctctgtcagagtcacagtgtcttcttttggaaacgtcatgaaaagacaaaggagtgcccggctaatcccaaagcacgccttggcagagtggatctgcctggagcatccatccgtggcagcatgaaaggcaatcctgtgagagtcttcctggccccacctcgtctgggagcatgtgggcctgtgatcccacctcctcctaacaaaagaagagtgtgtctgttgatgtgttttattttgcttttagccaggctagtccccctgcccttgcgcagtccagcctctttctattaatagatctattaaggttgactgagacctgctgcaggggacgctaggggcactttggccttcgatctttgcctttcacccttgacactgtttggcaggtgaacgacatccgggctccagacttcatggccacttcaacatttctgtcaacagcctgtgtctgtttcatgtaagaggcccaaacaagaaaatcaaggcttaagaaggatttctgccttgagtaaaggactgaaacctcctcacagaacacgatggtgacaggcacaaaagacagacttcttgtttaagtaggtgaactccaaagacgagagaaaaggagtttttttcctcccgttcaaccagtcatcaaataaacatctcaggcatctggtgttttgtcaagggattgggattccagtggcccctgtgtgactggaaggggaaaggtttgtcggtggcaacgccatcgaaacacaaaggagcagctttagaatccccagtgtgggtcttctcttgtgttatttctacaacatccttgtgccagctgttcttgctgttctctcaggcttctaattgggagtgtgaatactacctttcaccctttttgccttcatgagaatcagagtttgaagtggacagttctgaaaatattaatcatctttttttttttttttttttttttttgagacggagtctcactctgtcgcccaggctggagtgcagtggcgcgatctcggctcactgcaagctccgcctcccgggttcacgccattctcctgcctcagcctccctagtagctgggactacaggcgcctgccaccacacccagctaattttttgtatttttaatagagacggggtttcaccgtgttagccaggatggtctcgatctcctgacctcgtgatccacctgcctcggcctcccaaagtgctaggattacaggcgtgagtcaccgcaccgggcctaatcaccttattcttgcctgtcattacacaagccttaaactccagggaccagacttagcactttcttttcctaagattgctttttctcccacttggcccaagctttaatacccagattttagactcaaaacacttaaaacatttggtgggctctcctcagccttgtaaagttctttgatactggtcatggcagcacaagagaattttctggaagttcctggctgtttaatgttcaaattacacgtttaaattctctcccacctcccgtggccctgttttccatcagtgtatctatttctggcccaaatgtccttgaacatggaccatgacaggtcctgtgtttactttccatgtttctacatttataatccagtaaagaagacaccgagtagtacatagtattttgtaaatatttgtaaactaatgaaaatctggtttctttcacaaatcacctctttaggtttctaaaatttatgaaagaaatcttttaaaatctattctaggccgggtgcagtggcttacgcctgtaatcccagcactttgagaggccaaggcaggcggatcacgaggtcaggagtttgagaccagcctggccaacatagtgaaaccctgtctctactaaaaatacaaaaattagctgggcaaggtggcgggcgcctgtagtcccagctactcaggaggctgaggcaggagaatcacttgaacccaggaggcggagtttgcagtgagccaagattgtgctactgcactccagtctaggcgacagagcaagactctgtctaaaatatatatatattttattctcaatttttgctgttctttccagatgtgcagagttgtgtgtggttttaaaaccatatgcaatgtgccgtgaagggcgggatggaacccaggcctctgagtctcagttctctgttcacttccctccaccagagtttgttaagggagtgttgcattttaaagctttatttagaaaaacttaggaaaaccaagtttacctcaagtggtttccttttttcgcaacctgttcagccttgacagaaaggaaaaagaaatcccagaattaggtagtaataatagaggcaaagtgagattgatattttctgaagccctgcttacagaaaataattcctgcatatttattttattctaaacatagcttcagattgtttttcattctaagttgtccttaaaagtcactttttaaacctcacaagaagcaccaaatgtaagggggaaaggatggatttgactacatctaaagtaagactttctgttcatcaaagctaacagatggcagactaagaaggtatttgcagtgactgaaattgaaaagggattaaaatgtacaaagtttcatgcaaaacaacaagaaaaaggaaatccaaaagaaaaaaccggccatggatattaataggtgattcacagcaggggaaacccaaatggtgaacaagagataaactaagctgaagaaatgcaaatgtaaattaagacccactaccttatgcccctcagaattgccagacttcaagtgctggcagtgatgcggggcctggacttcaatattgctggtggtggtgcaaactgcaatgcgtaccccagaagggaagctggcagcttaaaagttagcagcgtgtgtgccctttgattcagagagccacttgcgcgtggctctccggagagatttctacctgggtccatgaatggacttacggaaggattccttggtaatgattctgagtgactgtgttgatggaggcaagcaaggtcttggacaagtcaaaggcggcaggtgcgtaccatggaatactgtatagccatgagagacagacctagaactatgaacagcaagcgggtggctcttaaaaatagtgttgaatactgaaagcaagacatgagaattgttgtataatgccattatgttaatgtagggcatacggcactgtatgtcctatgaggatgtgcatattttgattcaaatacattaaaatggacgttatggggacacagattatttatgaaaggaggagaaaagataaaactgatttccttgttttagggtgacctcacatcccagtgagcccctcaattcagggccagggaggttgattggttaccccaccccaacccaacccaggctgttttcagcacggcagcctgataagctgtgattcagaccttgaagttgttaggcaaaagctctccactcggctctgtatttgactcaggaagaactgaagtctttataatggcctagacagccctgcaccgtggcctcccactccacacctctctgaccgcagtcctcatttctccgagactccgctccagccaccctggcctcagggccctctcaggactttccatccccctcaccctgcttcactttcccccatgatgcttatgaccttagatctagtacactctgttttcattacgttctatgtacgactctccctattaccctactagaacatgagccagggggcagggggcttttgtctgtgtgttttcatgttgtatccccaggcacaggatctgataggcggtagacattcaataaatatctgtggaatgaatgaacaaggcaggatccttaaagcgagggggaatgaccaggctgagaactgagagagcatgctaaactccacagtctggccccagggatgggggcaggaaagatggcaccacctccttgctttattagagggaaagaaggtgcttcttgtgcagaaccgtcatcataacagaaagatagcttattacacgccaggcactgttctagctctttgttagcttacataatccctgtattagttcgttttcacactgctataaagaacttcccaagacggggtaattgataaaggaaagaggtttaattgactcacagatcagcatggctggggaggcgtcaggaaacttacaatcacggcggaaggtgaagagggggaaccaagacaccttggcaggtggcaggagagagaattaatgcagaaggaactaccaaacacttataaaaccatcagatctcctgagaacactatcacgagaacagcacaggggaaaccactctcatgattcaattacccccacctggtctcccccttgacatgtggggattgtggggattataattcaagatgagatttgggtggggacacaaagcctaaccatgtcagtccccaaaatgacaccatgaggaggtgctttgattaccgtcactttacaggtggagaaacagatgtggaaaaggcacacaacttgcccaaggtaccgaactagccagtggtggggctgggatttgaacgcaggcagcctggctccattctgtactctagagctgcactgtccagtatgacggccactagccacatgaaacaggccaatctaaactgagatgagctgtaagtataaaatatacaccagatttcaggccgggcacagtggctcatgcctgtaatcccagcactttgggaggccaaggcgggcggatcacgaggtcaggagattgagaccatcctggcaaatatggtgaaaccccgtctgtactaaaaatacaaaaattagccaggcatggtggtgggcgcctgtagtcccagctactcgggaggctgaggcaggagaatcgcttgaacccgggaggcagaggttgcagtaagctgagatctccccactgcactgcagcctggcaacagagtgagactctgtctcaaaaaaatatatatctatatctgtctgtctatatatagatatagacacaccagatttcaaagacttcatgtaaaaaaaatatgaaatatctcagtttctttacattgggtacatgagacatgacaatattttaggtatattgagttaaataaaatattattggattaacatcacctgtttccttctacctttttaatgtgtacactagacaactctaaattgcctgtgtggctcacagtatatttccgtcagacggagctgctctcggtacttgcttctcaaagtgtggtccttgaatcagcagcatcaacatcactgaagcctgacggaagtgctggatctcaggcttggtctcagacctcttgaatcaaattcttcattttgccagccttccaggtcactcataatgcatgctcacatttgaaaaatgccgcttcagaccaggcagcaatttttttctctaaagggccagataataaacattttaactttgcaggccacatgacttctgtccaaaactcacctcactgcttctgtagtatgaaatgagccagaatatgcacgtgaatacggattccactgtaacctgcacggacctagggggactgaacaaagcggggcaaacacgggaataaaagacaagagacaaaagagtatattttgaagaaggggtcagggggtaccttgcccctagtggacaagggccctgagctttatacagccctccttatttattaggcaaaagagatagtgagaagcggggtggaagaaggggtcagctgctcagtctagagcaggcttgcaagactgcattcctcgaacaacaggctaaatgttgcagtagataacctcagcgccagggagtgattgcctccagcaaaccttctgtcggcaggagcagtcgtcagttttctcacatcctgcattcatgataaacagtttgctgttggatcatatagcctccagtggaatgctgcgttggtcacatcccatgggccttcggctccctgcatatccccctttctgtttatgaattaattgaaaaaatgtaaggccaggctgggcagctctcattctccgattggcagtccatccgattttacagactataaacagaagacagagacgaaacaacattattccaagaactacatataagatgttaatgtggtgccttagataggtccaagggttgaggctctccaggccttgctggaatttggtcccgtcttctaaagaaggctgaaattcttgagtttgcctatttaaatcaagaattttgttttgtaattcaccaatatcaaaggtgatgttggatgtgaacgctccctgcaaatgggctttcacaaggtcccacggatactcactttggttgtattctaagttggttacacaaatatgagtgtgattaaaatgacagcgcaattactgctgcaactgcaagctttgtacttgtgcccctaaccacagaaccgtggatttcagcattgccacttcagtttgtagctcagtgttaattttattctgaagtcgccacgcttggtcagctgtgcgcgtccagttctccacgtactgagctatttgaatagaattatgcaaagctacagaagatatcacaacagaagttactagcatgaccaagtaaacagtagcaaaaattatcatgcctaaggctctacgggcacgatgagtcagctgagttagaagtttcacaaaatgcaaagcaggtgtggcagcccaaggctcagacagattaacaggaatccctagcccagggataccacctaaaatcatcacagtagagatattatgtgtttgcaatgtgctatgattagtgcagtgatataactggcaagatttacaggtcaattgggtattgtttacctggagctggtccttcttagctgccaaaaagacataaggattaaaaacacaaactgtaaattgagtgatgatattctttacaaatgtaaccttagaactgtgttgtgactccggtcggccttctctccgtctttgcattcaggctcagctgactcatggctcataccgggaccgggtccatggttggccaccctgggttcctccagtctcccattccatggtcgcacgcaccttgagggcacccacacagttcatccatctcctgcaaaaacacaagtataccctcttccccacattagtaaatccactggacctttccattggccttcttccggggatttccgtaacactttcggataaactttcctcttttcctctaacacttgccaatgtctttctgctggagtctttaccttccataccaggagtcagaaaatttaaagtaaggctaaatgtagttttgattgaggtggtagttggtctcctataccccctttttgttttttcaatatgcgttgtaatgtttgatgtgcctgctctataatgccttgtcctctaggattataaggaattcctgttttatgggttatagcccaaagctgtaagaaattttgaaaagcatgactagtataagtgggtccattgtcagtttttaattgtttaggtatccccatgtgagcaaatgatgacagacaatgtggccatacatgaccagctgtctcacctgtttggcatgtagcatgcagcatatgagaataagtgtctatagtcacatgaacgtagctaagcttaccaaaggttgctatgtgtgcaacatccatttgccaaatttcatttggagccaaacttcgtgggttacagccttctacaggtatagttccagggacatgctggcaagtaggacaggcttgtattatagccctagcttggctatgagataaatggaacatgcgagtaagggtggaagtattttggtgcagaagtgcatgagatgcttgagcttgccgaaacacagaaccaatcagtttgtctgctttctcattacctagagataggggtccaggaagttgtgtgtgagagcaaatatgagaaatatgaaaaggagctgcatgagaacgaataacttgttgaagtcttaaaaataaattaagcggctgggcatggtggctcacacctgtaatcccagcactttgggaggccgaggcaggtggatcatgaggtcaggagatcgagaccatcctggctaacatggtgaaaccccttctgtactaaaaatacaaaaaattagccgggcgtggtggcgggcgcctgtagtcccagctactcgggaggttgaggcagaagaattgcgtgaacccgggaggcggagcttgcagtgagctgagattgtgccactgcactatatcctaggcaacagagcaaaactccatctcaaaaataaattaattaattaactaattaagcagttctgggtctagtgtacttttaattgtggcagtttctatgcgactggctacatttacaacataagctgaatcacagacaaagttaataggatctgaggctgtgagctgtaaaacctgaatgactgcaattagctgtaagcgttaagctgaaacaccagaggtatctagcttctcctgtgttaggggcacaactgtgagagcataagtgtctgctattgaggccacccagtttgtggtgctttgtcatgagggccctaggaggcgaatatacttaccaagagcaggggacacttgagctcaataggaaaggctgtggagctttcagaggggaccgtacaggaaaacgcggtgggcagaattaacagcacgaaggcagggcctacaatgtggaaaagcacagacacagttgtgcaggctggaagtcaagttgaggagtccgcagggcgacgctccctctgagaccttgcagaatccttccttgccccttcctggtttctggcggtgaccagcgatcctcaatggtccttggcctgcagctgtgtcacttttatctctgcctcggtcttcacgtggcattttcctcttcttataaggacacctgtcatattggatagggacctgccctgatgacttcatcttaaatttactgcgtttgcaaagactcagtttcaaacaacgtcacattcagagctcccagagttaggacttcaacataacttttgggggaacacacgtcaacccccaactggaagtcttgcttgactgagttcaggtccttctctctgctcgcatggcatctttttatcgaatttgtcattggaagtgtctgtttatatacttgtcaccctgccctctgtcccacctccaagactatgagctttccttttttttctttagaggcagagtcttgctctgtcacccaggctggagtgcagtgatgcaatcatagctcactgcagcctcaaactcccggctcaatcaattctcccgcctaggtctctcaagtggctgggactacaggtgcatgccaccacacccagctaagttcttcattttttgtaaagacagggtctcattatgttgcccaggctggtctctaactcctgggctcaagcagttctcccaccttggcctctcaaagcacagagattataggagtgagccaccgtgcccggcctgctgagttctttaagaacagggaccccacgtaatctttatttccgtgtccccatggcccagcgccctggatcatttgtagtaagcatctgatgaaaggagcttgcactcagaaagccctggctgtggcctggagtcagaaggcccagccaagccctgcctctgtcacttcaaatgtggccttcagcaagccatgtcacttctctggacttcagtttccaatcctataaaatgtgagtaagaactcctgtcatacctgcctcacagagaggtcgaggggctccaagatgatgcgtgtgatgaaagcccttcggagccactgtctgtaaaatggagagagttgtgacattcattcttttccagcccaggactttatctcctgctccatctttcctgactcaggcctcaactgcagcctcggtcatcccgtctggaaggtttgcctcagagcccagccaaggtctgggcaggtctgggcatcccatgattggagttggaggtcacctgcagagaaacaatgtcaccacccagtggctgcgcaacccagtttagttccaacctgaactgccctgctgaaaagacaatgtgacctttgcagcataatcactgccaaaagtagtcattttatagcagaaatacagagatactgggtgaactctacaaagtggaagagacaagaaaggtgaagttttcctccacctctcattgcagctccactgttggaggggccacagggatggggtaatgggaccaatttattcccgtggatagtagttcccctgggtgtctacatccagggctcttcctctggtgtttgtctactctgggtgtttacaccctgccagagcagaggctggcttaagacctgtgggtgggcagatcccagggtccctcactctcacacaggcaggttttagcccatgttggtgaggcgtgagtcacaggctggagaggaattcacttcaagtcagtggtttgggatggcagggatattcatttcctgattctccttgcattgcgcctctcttaataattacacctaataatgacggaacaatgttctcttgttagagaacattcacatttaatttatttggcttccttaacagctttgtgagatatgtaggggatataaaattatatctcaatctatgaaaaagaacaccaagattcagggaaaatgggacaatgccatttttacagtgaggaggaggctttgttatctaagtcaatgccccatttcctgaggggaaatctaagactggaatccaagttgcctgatgtccctggagctctccccaatgataagtcttggtcagtttggaggaagtggctccagctgctcctgacatatcaccagctctaaaaaaatgaaattaaaagggcaaataaggtcttagttttattttaaaaatagtttgatccagtggaccccctgaaagggtcttggtaactcccagtggtccccaaccatacttctagaacaaccgctggcccagagcaggaaggtaaactgtggagggggtgaacagagaagcaaagtctccagtgtcccagtgttggtcacagccagctgtggctggaaggctgggaagggaacaccactcatatgtttgtctcagtcagctcagctgctatgacaaaacaccagactgggtggcataaacaacagacatttctcatggttctggaggctgggaagttcaaggtcaagatgctggccaatttggttcctggttcatagacccatcttttcactggacctttcctggcaaacagaaagagtgatttctctctctgcctcttcatagaaagccactaataaaataaaatcctgagggcccttcctcatgacctcatctaaccctaattacctccccaagacctcatgtccaaataacatctcattgggagttaccgctttaatgcgaattttgaagggacataattcagtccagagacgtgttcgtcctattttgctgctaacgctattgaggtctgggggctctttttcctgaaccatggcttcctctgaacatctcatcctctgcccaccatgggcacctcctggagtgcagggggctggcgggcagagcagaatttgtacctttcccgcctcccctgtggtgcagacctgggtctgggctcacaggaggctcataaataccagtgactggaacagagcagtcaggctgtgtcctcagccaaccctgagcgccctgagcaggcatctcatatgctttctgggagaccagtgaggctgtgctgggctgcagcccggagcgtgggccttgccaagcgccagcccatctctctgcagaaaagctcccatttttgtctggtgctcccccttccctctttcagctgcatctttgagacaaggtggtcagagctggcagaagccaggtgtctgggaatgagatttgaatcagctttttttcccctctgcatgactgtgctaggtgaaagtctcccttttctctcagcaggagactttccatgtggagggggcaaaagggaagttaggagaagcagcaaaatgagaatattggcccagcttgtcttcagaatctgtcaccccatgttccgagcatagttcaaattgccagggtccatccgctgtagcccctccctacctgccccattcccagatgtcctggggctcctgcaggaggaaggattaagctggcctccctggtctgtgactctctcatgccacccagcacctactccagtctggaatgctttgctcttctttccaggtcattcctcctctcacctcaatttcctcctcctgcacatgggcgccccctccagactccatgcagcccctaccaccatctccaatccctcagatctctgcttgctgcagggtgccaggcatttgcaatgaatctcacattgctttttcttgttattgaatatgagatcgtctctctcaaatcagaatataagaagccccttgaagactacatcaagtgttattcattcctagtaccctcccttccttccgaatgttgtccttctttctcctactcccaccccacaaaacacaaacacaaacacacacacacacacacacacacacacacacacactcgtagacagggaggtatgatggcattctagatgcttggtggaaaacaatttggagaatgaaaagacaagccacgaacttggagaaaattttgcaaaacacattatctgataaaagacttctgtccaaaagatacaaagaacttttaaaagtcaacacccaatttttagaaatgaacaaaaatacaaaaaatagccgggtgtggtggtaggcacctgtaatcccagctactcaggaggccaaggcaggagaatcgcttgaacccgggaggcagaggttgcagtgagccaagctcacaccactgcactccagcctgggtgacagagcaagactctgcctcaaaaaaaaagtggggggcaaaagatctgagcagatacctcaccaaagatgtacagatggcaaacacagacatgaaaagatcctccacatcatatgttattagaattgcaaattaaaacaataatgagacaccactgggcatctgttggaatggctaattctaatagatggctaaaatccagaacactgacaacaccaaatgctgacaaagatgtagagtaacagcaactttcattcgctgctagttggaatgcaaaatggtacaggcacttctgaagacaatttggcagtttcttttttttcttcttctttttttttttttttcgagacggagtctcactctgtcgcccaggctggagtgtagtggcgcaatcttggctcactgcaagctctgcctcccaggttcacgccattctcctgcctcagcctcctgagtagctgggactacaggcgcccgccaccacgcccggctaattttttgtatttttagtagagacagggtttcaccatgttagccaggatggcctcgatctcctgaccttgtgatccgcctgactcagcctcccgaagtgctggaattacaggcgtgagccaccacgcccggccagtttggcagtttcttacaaaaccagacgtatttttacaataagatccagcaactggtgtttgtactccttgatatttgcccacaggagttgaaagcttaagtccacacaaaaacttatacatgaatgtttacaatagcttcattcataatagctcaaactcagaaacaaccaagatgtcttttaatagatgaatgggtaaataaactgtggtacatcccaacagtggaatattattcagcaatttgaaaaatgagctctcagccgggcacggtggcttatgcctgtaatccgaggtgaatggatcatttgaggtcaggagttcaagaccagtctggccaacatggtgaaaccccgtttctactaaaaatacaaaaattcgctgggcatggtggtgagcgcctgttatcccagctactcgggaggctgaggcaggagaatcacttgaacccaggaggcagaggttgcagtgagccaagatcgtgccactgctcttgagactctgtctaaaaaaaaaaaaaagaaagaaaaaagaaaagaaaaagaaaaatgagctatcaggccatgagcaggcgtggaatcttaaatgtctatcgctaagtgagaccggttgcagtggctcacgcctgtaatcgaagcacttcagaaggctgaggtgggagcatcactgggcaatatagtgagaccctgtctctaaacataaataaataattatgtacataattaagtgaaagagacccctcttggagagtctacatactgtatgactccaactatgggacactctggagtcggcaaaactatggagacggtgaaaagatccgtggttgccagggattatggggaagggaggggtaaaaaggtggaacacagggaatttttagggcaatgaaaccattctgcatgatgctgcaatgatggatacatttgtgaaaacccattgaatgtacaacacaaagaataagccctaatgtaaactgcggacttcagttaataataatgtgtccatactggctcatcaattgtgataaatgtgccaccgaaatgcaagatgaaaatagtagaggaaactcactgtgtatgaggggcatatgggagctctctacattttctgtttatttttttctgtaaatctaaaactgctcttaaaatttttaaagaatcataactagaaaaaagctgtcaatttgaagctaacaagtcacgtccatgtaaattagtttcaaactgagtggcacttgctgtctgccaggcattgggctctgagcacttcacacgcatacattcatttcagccttacaagaatcctatgaggtccctccctattttacaggtgagaaaactgaggcccagtgaagttaaataacttgctcagttatggttagtaagtggtggagctgcgattcaaacccaggcagtgttgctccagctactatactctaaaccacatattaccccgcattactcttccccaaacttttcattttattttatttctttttttttttttttttttttttgagacagagtctggctctgtcacccaggctggagtgcagtgacgcgatcttggctcactgcaagctccgcctcccgggttcacgcaattctcctgcctcagcctctggagtagctgggtctacaggtgcccgccaacatgcctggctaatgttttgtatttttagtagaaatggggtttcaccgtgttagccaggatggtcttgatctcctgacctcgtgatccgcccatctcggcctcccaaagtgctgggattacaggcgtgagccaccgcacccagcctatttcatttatttatttagagataggatcttgctacgttgcccaggctggagtgcaatggcatcatcatagttcactgcagtcttcacctcctgggatcaagctatcctcccatctcagcctcccaaagtgctgggattacatacaggcatgagccatcaagcctggaccaaacttttcattttgaaagaggatagaaaaggggcacccaagggactaatttttaaaatcaactttattatggagtaatttacctaaaataaagtcacccattttaagtgttcagtttcatgagtttgggacaaacacatatgctaatataaacaccaccacaatcaaggaataggccatttccatcactacagaaagcttcctcatgctccttcccaggccacctcacccacctccagcctcaggccaccagtgatctgctttcagtccctgctgtttagtttagacttttctagagttttctagagttatgactggatcatacagtatgtctcctttttgtggctggcttttttgtgcatgtcagagttgggggcaggcatcctgatatgtttgagattcaaccatactgtttgctatggtttgaatgtgtccgccagagttcatgtgttggaaacttaacccccagtgcatcagagctgggtgttggggtctgataagaggtgactaggtcatgacagctctgtcctcatgaatgaattaatgttatttcaagagtgggctttttgtaaaggggactctggccccctcttgctctcttgcttgctctcccttccaagtgccatgcccttggacttcccagcctccagaaccatgagtcaaatatatttctgttcattttaaattaccaagtctgtggtattctgttatagcaacagaaaatggactaaaacagtgttgcatgtattggtagttcactcaaaggaactaatttctaattgcaagatttcagatatgttaatccccaggagaggaaagcacactttttttattattattatgactaggaccttcccaggctgcttgagttgtactgatcctggtcccacttcaaagcaggggaggcactgagtgacatcaccctgaactggaccccaaatgggctccaagcacaggaagttgttggagggattgagtcactcccaactcaagcgggtgatggaaagggcaagttagtcatgtaacctggtctcatggaatgcttctccctcccagactgaatttccttctttgctgaatacacaggactgccctgcatagccttcttcattagagaaagctatgagaagctttgagctcctccaagtaaactgtttcatactctcaaacaggctgttaatgatgatgattaataataaattaagcaaaagaaggccaggtgcagtggctcatgcttgtaatcccagcactttgggaggccgaggcaggtcaatcacttgaggtcaggagttagagaccagcctgaccaacatggtgaaaccccatgtctactaaaaatacacacacacacacacacacacacacacacacacacacacacacacacaaattagctgagcgtggtgacgcacgcctgtaatcccagctactcaggaagctgaggcaggagaatggcttgaagccaggaggtggaggtttcagtgagccgagattgcatcactgcactccagcctgggcaacaagagtgaaactctgtcttaaaaaatatatgtaataacaataataataataaagtaagcaaaagaaaaggaaagggatgaagttagcacactgtggttgacagaataattttacatcctagaaaatagattaaatgaaattacacttttcaatgtaaaaacgttgtgtttcctgggaaaaaggcagatgcgtcctaaccactcctgattgcatacatatgcaatttacaattgtactttctgagcagatttggaactctcctggggcttagctgacttggtctgggtctggtctcagcacccctgctaaagcctcctagggaaggtgctcgggttgacagctctctgggcctctggttccatgtctgtaaacaagatgcttggagcacaatttctcaagttacctggcggctctttagatcttaaccctttaaatctctagaattttagggtttcaaccccattggtatagcttggccctgaagagagcaagcgcacattgccgtgtgagagacagaccactaaggggcgctgcttcctcggaggaggcgggagttctcctcctcctccgcattctctcctctgatgaaaccacactcatcaaaagtggttgtgacagaatgctcagatttggaatgatgagaaacacggaagccacatcataggacctgatagatatctggccaacacaggaacactggaatatgtgatctatgtgaccatccccttcccaaggccagatcgaacacccaccccttgacatataccaacgttaattgcttaatgacacgaggaaatacattctgaaaaattcgtcattaggcgattttgtcattgtgcaaacatcacagaatgtacttatgcaaccctaggtgatatagcttactacactcctagggtatatgggatagactgttgctcctgcactacagatttgtatagcatatgactgttctgaatactgcaggcatttgtaacacagtggtaagtatttgggtatctaaacatatctaaacatagaaaagatacaatttaaaaaaatgataaggccaggcacggtggctcacgcctgtaatcccagcattttgggaggccgaggtgggcggatcacgaagtcaggagatcgagaccatcctggctaacacggtgaaacctcgtctctactaaaaatactaaaaattagccggacgtggtggcgggcgcctgtagtcccagctactccggaggctgagacaggagaatggggtgaacctgggagatggagcttgcagtgagcgaagatcgcgtcactgcagcctgggcaacagagccagactccgtctcaaaaacaaaaaacaaagaacaaacaaaaaagatagaccggtttagggaaggcatttcccatgaagggagcttgcaggactggaagttgctttggctgagtcagggagtgcgtggtgagtgaatgtacactgtacactgctgtgggctttataaacactgcacacttaggctacactcaatttatacataatacttattttttcaataataaattagcctgagcttactgtaactcttttactttataaactttttagtttttaaaacattttttgactcttgtaataacacttagcttcaaacacaaacactttgtacagctgtaccaaatttttaaatttctttagtattctgtaagctttttttctattttaaaaattatttacttttgtctgtgttgtaaacttttttgttaaagacgaagacacaaacacgcacattagcctaggcccgcacagggtcaggatcatcaatgtcagtcctccacctccacatcttggtccaggaaggtcttcaggggcgttaacagacatggagctgtcatctcctaggataacaatgccttcttctggatacttcctgaagcacctgactgaggatgttttacagttaggcttgtttttttttgttttttttttttttgagatggagtctcactctgtcacccaggctggagtgcagtggcacaatctcgtctcactacaacctccacctcccgggttcaagtgattctcccacctcagcctcccaagtaactgggattacaggcgcccgccaccatgcctgggctaatttttatattttttagtagagacagggtttcaccgtattggccaggctggtctcgaactcctgaccacaggtcatccgcttgccttggcctcccaaagtgatgggataacaggcatgagccactgcacccggacagcttttttttttttttaataagtaaaagtacaccctaaaataacaattaaaagtatagtatagtaaatatataagccagtaccatagtgatttattatcattatcaattattatgtactatacgtagtgacatgtgctagactgtcatatgactggcagcttgtatgttgtttacaccagcatcactacaaacacatgaataatttattgcatgacaatgtcacaacagctatggcgtcaataggagagagaaatttttcagctctattataacattatgagaccaccaagtgatacgggaccaccaacatatacctggaccatcattgactgaaatggcattatgcggcacgtgacaatatttccaaatcaccttcccagatggctggatcaatgtttgtttggttggttgattggttccccatttaattcaacaaatagaccatatggagcctcttctgcagttctataaatttaactactcgtttctgcatttttattcatctaagtaatcattactaatacctactaaaattattcctactttcccacttcatcagacgggccttccctggccacccctactggactagcacctgagcctccttcaccttctgtgctcaccagctttagtcttctctgtagcactctgtcaccaaccgactcccacatttcctcatttctgtgtctttgtgtcttgtcagtctcctactctggcatataagcaccatgaaggcacagaccggctacagcattggctgggcctccctggagcctcaggctatgcctactgggacatgctatgcttctttcaatctaagtcggtccagactggtaggagagtgatttggcaagagagtgcaaaagccaagggaaaaaaaagaaagaatcgcctctagcctttgactcagtaatcacattctgggaatggatcctaatgcagtaattcacatgacccctggggatggggtggacaggaggtgttgccttccctctccctgtgtggggtctgaagccctgagggacaaggagtcactgtgccctcctcaaagatgccctcctcacaacgcaacatttattgtccaagtaccatacgagggactgttctgagtctgagcccattcagtccttttactcctttggagctttttttttttttttaacagataccgctttgtcacccgggctggagtgcagtggcatgatctcagttcaaatgcagccttgacttcctgggctcaagtgatcctcctgcctcagcgccccaagtagctaggactacaagcccataccaccacgcctggctaatttttatattttttgtagagacagggttttgccatgttgcccaggctggtctcaaactcctggactcaagcaacccacccaccttggcctcccacagtgctgagattacaagcttaagccactccactcaacctcttaggagcattttgaggcgcttcttacagatgaagcatgtgaaggaaaagggagttcacatcagttaatggtggagccaagatttgaacccaggccccctgactgcacaagcatgccctgaacctactgtacgactctgcctctgcagcagtgcaggacctgagtggtggaggtggcagggtgggaggtgtatccagacttacagacataaggcatcccgccatcattttgtttcatctgggacaagggtctactgttgtcctgaagtagtctcctaggtcttgatttcaattcaacaaaagggcatcaataaaacactcagtgcaaacttcagatactctactcatttcctcttggaagtgaggacatggtaaggcagagatggacttactgaggcctccagtgtgggccactaatacttgctggacgagtcaagctccttttggttctcccagctcggccattccctgcctctgtgacgctgggaaaatcacttctctgagccagggctttctcatctgtaacaattagcaggaaccacactgtacccaatcaataaatattactttcacaggggtaattgtcatggcgtaatttacactagcaaaaagctgtaaacaactgaatatccaataatggagaaatgactccattgcacaataatttcagaccagaactgtctaaaaccattaaaaattacattgaaaaattaacacaaaatgatatagtaaaaaaaatcagaggccaggtgaagtggctcacgtctgtaatcccagcactttgggaggcagaggtgggtggatcacttgaaaccaggagttcaaggacagcccggccagcatggtgaaaccctgtctctactaaaaatacaaaaattagccacacgtgatggcacatgcctgtaatcccagctactcgggaggctgagacagacttgggaagctgaacctgggagggggaggttgcagtgagccgagactgcgccactgaactccagcttgggagtcagagctagagtctgtctcaaaaaaaaaaaaaaaaaaaaatcaggatacaaaaactgtaactacaatttggttgaacaaatattctgaaggaaagactccaaacagtaggtgtttatgggtgataagacaccagagtgacaatttcttccttacattttacatattttctgaatatttcacaagaagtttgcttttctttataacagacaaaagattatttacaaagttggtctcctttcattttctaccttattagtgaatgctttagcaagagagggtaggactagaagtggaaggatgggagatggggaaaggggagagctcagtttcaccagcatttattgagcatctggtacgtccaggcactgtgtagggtgtgacagctgagtgaaagctcaataaccaggcattactgtgcagagaagccaagggaatgtcacgttcaaaggtcctggggtgtgaaatagaaggcttataggagcacagaaagtaaggcccagggggagaggtgagatgtggttggcagttgggcaggctggaaatgccccagaggccctgtcagcttaatcaagggattcagattacatttttctttttctgagacggagtctcgctctgtccccgaggctggagtgcagtggcgggatctcggctcactgcaagctccgcctcccgggttcaccccattctcctgcctcagcttcccgagtagctgggactacaggcgcccgccaccacgcccggctaattttttgtatttttagtagagacggggtttcaccatgttagccaggatggtctcgatctcctgaccttgtgatccgcctgcctcggcctcccaaagtgctgggattacaggcatgagccaccgcacccagccaggattcagattacattttgaggaccttggagccacggaggatttttttaaatttttaattgaaattttattgggtgtattacgttctatacaattttatcacctgtgtggttttctgtatctcaagacactgaatagttccaccaccacaaagatccctcctcctgcctttgataactacacccccttcctctgacccttgccctctactgcccaccagagtcagggactgatcagtggggagggtaaggaggaggcaacggagaagaccccatatctgcctgggagagctcacaggagtcaaggtggaccgtgagttgcagtgccaagtttggggcttgccaggttagctacggccatgggaatgtccaggtgaaagtctttcggggccaatggatttaaatatccatggcttaggagagaagcctgggctggaggtgagatttgggaggggtttgtctcctcagggagtggagtaagagaggactgaggaaggagccgcctttcaggtgacagtctacttctgcacaggggtcccttgttttgcagctcgctgcctccttgggactggcaaagccctgctcttgcttaaggagccctctctgtgcagagggctctcccagcatgcccatcccccacccggagcctcagagccaggcacaggaggtccttctgcacaatggccacgcattagctgtgtcctgttcagtccccaagcacagggcttgttaatcccagccctaccattccaggaaggaccccagaggtcacggaatccaaagcgttgaatttacaaagaagaaaactagtcctcggagaagaggcttggccaaggccatagacgtgatctgctggccgaaagggggctgtttatttactggttcaggatcggttttccccctacaggaaaagggaggtgaaacccaggcgagatgggtgcaagtttctgaacactttcattcggcagctttaattgagcgtgtattatgtgccaaggagggccagggttttcgggataggaggtggacaaggcacgggccctaaggctggtggataaggacatcgaagggttaaattctgggacggctgcagggaggaaagggtagaggaatctcccgaggaaaggcccccttcccggcatctcaggctccggaaacccgggcgcgaggagcctgggaagggctgccccgcaggccttggcctcccccgcggagctccctctggccctgggagtggccgctctcgaattacaacaaaagaggccggaggccgggcctgctgcggcggccgccttcggggaagggggtgggtccggggaggggtttgccatcctcctctagttaaaagtaagggggaaaagagtaaacgcgcgactccagcgcgcggctacctacgcttggtgcttgctttctccagccatcggagaccagagccgccccctctgctcgagaaaggggctcagcggcggcggaagcggagggggaccaccgtggagagcgcggtcccagcccggccactgcggatccctgaaaccaagtaagagcgcttcccgcgccaccccctccccgaagcggttcgcgagaaagcgggagcgtccctatggggtctccaggcttcgtcctgcgcggggctgcctctcgacagtgcctgggggttcccaaagacttcttgcggggagcgatgcgaggacgtgcaggctaacgggtcctcctgccgccccgggcggccccgcccaaccccacctcgtacgggccgggcgcggcgcggctgctggcgcgcccggggagcgaggcgctgggtccctggatcgtcccgagcgcccgtaatcaggcgggacagagcccgtcaagtctcggtgtgtgctgggcgtcttggagagtgcagcgtggctccagggacagcgtctccggaattctggctttgaggagtggggcacgcgggggacgggtcgggagacagtgactgccctcggggctgtggttttggggatgtagagcgtgctgggctgggacggagtgggggcggggaccccgggggctgcgcccgggagctgtagcgtccactgcttgaacccggttcaacccccagcctgctcgaaaggctgttgggagcgcgggagcgccgtgagtcctgcgggagcagaggcgctctcggcacgccaggtatgcactcccaagtcgccctgcctctccggggaccagggaccctctcccgccttcatcacctagaagccctggagttggaaagaacgggcacgagcgaacccacggctacagctgatcccaatcttgagccgttggtccggtggtctgaagtgcctacaacttttacgcaggcgctttgcccaccgcgccccttctcaccagcccaaatttggaagccctctgggtgtggctgcctgctcgaggtgtcccaggaatcagcgctggaatagagatgattgggagaacaagcgaggttccctcctctccgtgcccgagctaagaccatcaaaaaacagccggagtgcggggcggagcggggcgagggtgtgaggaagagaacaccgcagaacacggcgagggagggggctgaactactcaatatggttaggaaaccccaagtcctgatgaggggagagatgtgcatgacagaaacatgctccaaattagtttcgtccctaagatcttgaaactgcagagatctcaaaaacaatactttttttttttttctcccagaggaagaaaaacgctgaggctcacggtcactgagttagtcaatgtggggactgaaacccatacctcttactccaggcccctcccctacaccactgctagcctgtccgtcctggaaccccaaaacaacatttgtcatctttggtggaatgaattagttattgatggtgtatcatgtacttaatggtcagggttggggtttagggtggaagaggaagagttcatttccctggtcagttcccagataagtgactgactcactggatcctaacttgactaaatttttaatctttctcctcacctttgtcccgttcctcttcctggtccctagtatctgccctggaatggccaccagagccatgacaagatgcgtgctccccatgggccccagtggctaccaaggctctccccaaggaaattgagtctcactaatctgtgtgtgcacgcgcgcacgtttgtgtatgcatgtgtgcacgtgtatgtgtgggcacatgtatgtgtgcatgtgtgtgtctccacacgagtgtgtttgtgtatgtgtgtgcaccggtgtgtgtttatatgcgcacacaggtgtgtgtgcgcgggcacgtgtgtgtgcacgcaatgtgtgtgcatatgtattcctgtgtgcatgtgtgcacacctgtatgtgtatatgtgtatttgtgtttgtgtgcatgtttgcatgtgtatgtgtgtgtgcgcgtttgtgcacttgtgtgtatgtgtgtgcacgcatgtgtgcacgtgtgtatatgtatatgtgtgtttgtgcatgcatgtgcatttgcttccctgtaactttgtgttagaaagtgacttagtctaaggtcacttaggcattgagtggcaaagttgagtatgaaactcaggtctgaaaacaaaacgtacttaacaccacacattggctgacattttaagtatcacagataggagattctgcaaagatgcttccttttattttctttccaactggcctctcctggcctcttcccaagtccttgtcctttgacctctagatggccagtgtggaagggctttgtgaaggaaacagattttctgtgctctagatagacatgaccatcagcgaaggtgttgagtcccagaaaacactacattgtttattttttattctcaaaaaatttcaagtatgcaaaaaaagtagagagaagggtataatgatgcctcataagcttctcactgaatttcaacagttattttgccacatgtacgtcatctgtccctttgtttctgtcattgaagtagtttaaagcaaatcctatacatcatgtcatttcattgctacatatttcagtgtgatttctaaagattttacataactatgatgccatatttagacctaagaaaactaaaaaaaaaatatttggtatcatctaatgccaaatagcagtctatatttaagcatttcccaattttcctcaaaatgtctttttttatagttgatctgagttctgttgatttgtgtaacttgttacattcctattgttatgttcttcctttcaaactacttttctgtccactatgtcatttgattcttacaaggtcccactaaagagttaggtgagtattttcaaattcatttctcagctgaggaaatggataaacagataagctgtccagagggcacagctggtgacccagggagccagggtctaacccagcctcctcatggctgggcttcggtggttctggttctccatgttactcgtggactctcagctgctctctgaagagttcttcttggctcaggcttcatcctgggcttatcacttcctatacacctgctgtcagaaatccctgtgtaaatattagtaattggacatttggtgcttgagataaatgaactgcaaaatcaggaagccagggtttgtttcctagctcattgcaaaactgtaagggctcagagctgccctctctgaactagagagcagtgtacttcctcattatttgactccaaggtgtaaaaataggatgagtgaaatgactgttgctgggattcctggaagaaacaaaggccccagaaagaaatctagtagaggacaatctcccctctctgagcatcacctgagtactctgacagctggtaccttcatgctgaagccctcaaatcctatgacagagaagtaggggtatataggcttcccattgaagcccttagtttatgcatgactttattctgcatttgaccaatgaagatatgcaacacctgatatggcttggctgtgtccccacccaaatctcattgtgaattgtagctgtcataattcccatgtgttgtaggaaagacccgatgaaaggtaattgaatcatgggggtagatctttcccctgagaagtaaatctcgtgagatatggttttataaatgggagtcccctgtacatgctctcttgcctgccaccatgtaagatgttcctttgctcttcctttgtcttctgccatgattgtgaggcctccccagccatgtggcattgtgagtccattaaacctcctccctttacaaagtacccagtctcgggtatgtctttattagcagcatgagaacagactaatacaacaccagagccttctgcttttagcattttcattacttaagtttatttgcttttgaaatggagcgaagaagaaatttctccaccttgttaatgagactcataagttggaattctcctttcttggcagatcatgtgggaaaaaggaatctcttggcacaggactcctagatgttctgctgttacgcttgttgctttgaaacagggaatgaacagaccttccataaaatagccagttagaggcagagaaactggtcaacccgattccatccaacgggaggaactccgaagtggcaagacattaaccttaaatcaccctgccttctgacggccatagattctttttccttagctaataggctgtctccatggaggaagaatttctaggtgattccacaccagcagctgcagttgcacaagcatgactgcttccttcattttaaagtttggggagccttaggaggtgttttagtccattttctgttgcttataacagaatacctgaaactcggtagtttattaaacaaaaggaatttagttcttacagttatggagactgagaagtccaaagtccaggagctgtacctggtgagggccttcttgctggtggggacttggcagtatcccaaggtgatgcaggaccatcgtgagggggctgagcatgataacatgctagctcaagtctcttttcctcttgtaaagccaccaattcccttcccatgataaccgattcatctattaattggtgaatggattcatcagtttatgagggcagagcactcatgattcaaccacttcttaaaggccccacctctcaaaactgccacattggggattaaatttcaacatgaattttttggagggacacctattcaaaccacagcaggagatatgatttcccattcccaggggctgcctggctttaaaagagcagcttgttactgtcatcgtccatttccccctggagaaaggcttttgtggtcggtctgcatggcagtcacaccctgggtggtccatgaggcctcagatgaagtggcccgaggccactctgctctaggcccacagacaaggcgggaatagcagttgcaggctagaaaaggaagggccaaccagacattcacagagatgcaaccagagcaacacacagctgagtctcttaagtcttcagtcctgtgtaagttgaagcaagacatcagaaatctctcacctgagtaattccacacatgcacccactgctgtccaatgcagtgcttgctcagcagggagcacctcttggccaagcgtattggcagcccttctaccgtgaccagcgtcagggacgtctctaggcgccttttcagaatagctggcaacatagggagacccagtctctaccaaaaaaaaaaaattagccaggcatggtatagtcccagctactcaggaggctgaggcaggaagattgcttgagcccaggaggtcaaggctatagtgcattccagcctgggtgacagagtgagaccctgtctcaaaaacaaagaaagaatagccacttggttgatgatgataaaggatgctggggactgtgtagttcagacttctgtccagagttttaacaaatcttttgcactttctgtggcagaaatactattaccaggcaagtagtgtgtgtggcagatgagaacaagaactaactcagcagatgctgaggttgtggttaggaacacagttagtaggttcttcttgtccagggcttttgatcccttcacttgggataccttaagtattatatttaattatagtcttctaagcaaagagtgatgttttctttttagttttttcattcctacgatccacgtcagacaagcagacacagctggccctctggatgtcctgtggcaacagacatatcctccttgatgtgttgccaacaaagtgctgagggtatcttctgcaaaaatgatgccacttgcctataaaacatacacttacgacaagataacttatggtgatgacttgtgaacaacttaatttgcagtttctttataatatctttctggaacttggatccatgaacttcttttgcccccaggcttgtcctgatataccactggggtaccaaggtaaacacagtatagctcttcagagtgcctgcatgactcgaagatgtagtgagaaagatacttttctaaatatctttctaaaacaattacaaatataaaattgagtaaagcacatttctttttttttttttttttttttttttgagacagagtcttactctgtcacccaggctggagtgcagtggtgcaatctcagctcacggcaacctccaccttccaggttcaagagattctcctgcctcagcctcccgagtagctgggattacaggcatgcaccactatgcccacggaaaagcatatttctttcttttttttttttttttttgagacagagtcttgctctgttgcccaggctgggagtgcagtggcgcgatctcggctcactgcaagctccgcctcccaagttcacgccattctcctgcctcagcctcctgagtagctgggaccacaggcgcccgccaccatacccagctaatgttttctatttttagtagatacagggtttcaccgtgttagccaggatggtctcgatctcctgacctcgtgatccacccgcctgggcctcccaaagtgctgggattacaggcgtgagccactgtgcctggccggaaaagcatatttctaaagatgatttcacccaccccaagaatagcatatctaggtaaaatcacatgatcctaagtatatacccacataggctttttgggttgcttttgtgtttattgtggtaaaatatacgtaacataaaactcaccatcttaactattttcaagtgtacagtgcagtggcgttaagtgtgttgacactgctgtgctaccatcaccatcagccatctctggtacttttgcatcttccaaaacagaaactctgtacccattgaacactaactccactctccccctccgaccaatccctggcagcccccattctactttctgtctctgtgactatgactgaactaggtacttcatataagtggaatatattatatttgtcttttcgtgtctggctcattttacttagcatggcttccaggttttttcacgttgtaacctgtgtcagaatttccttccttgttgagcctgaataatatcccactgtatggatagaccacatttgtttatctcctcctccactggtggacatgtgagttgtttccaccttttggtgactgggaataatgctgctgtgaacattggtgtacaaatgcctgttatggatgaacttttacaaagtgaacatgcccttgctactacatcaagaatagaacattagcaagaatgcatgaatttaaaggcaaagcaggagatttcaaatacgtttcatgcccaaacatggctgcttcaattacacctcaagatcttgggactggatattgattttctctaccatgagggggtttggaagagatatttgaaagaacacagttaataatctgtgatttgaaagagtcagtttataatcacagattagttatgagatttaagtagctcctttccttaaaacgtctagggatgggagtacaacctgttgagatttgcaattgtagctgtgttagggtatcaccactaggatcattccaggctgccccttggccattgtagggttcaaatccacctggagaactcctgcctttctggcagcttctgctggagcacaagtctaagcccattctttggccgtatcctgcctgccctcctcatttccttcctccctccttcccttcccacctgatctctctctcgtttttttgtttgtttgtttgtttgtttgtttgtttgtttttgagactgagttttgctcttgttgtccaggctgtaatgcaatggcacgatttggctgaccgcaacctccacctcctgggttcaagcgattctcttgcctcagcctcccgagtagctgggattacaggcatgtgccaccacaccctgctaattttgtatttttagtagagacagggtttctccatgttggtcaggctgctcccgaactcccgacctcaggatcctgccgcagcctcccaaagtgctggaattacaggtgtaagccaccgtgcccagacttctctctcttcttaagtagaacgatttatcagtgactctaagagtttatgtgtgtatttagaaataaggccaggcacagtggctcacacctgtaattctagtactctgggaggccaaggttgggggattgcctgagctcgggagttcgagaccagcctgggcaacagggtaaaaccccatctctactaaaattacaaaaattagccagtcatggtggtgcacgcctgtaatcccagctactcaggaggctgaggcggaggttacggtgagccaggattgtgccactgtgctccagcctgggcgacagagtaagactctgcctccaaaaataataaaataataataataaagtcttcagtcaagagtaatattttgatgcctggcaaccacccccaggctgcctgcatgacactttcaagtgtcatcgaagtagattcttttttaaaagactttattgagatataatttgcatatcatccaattcacccattaaaatgtacaagtcaatggatttcagtatattcacagatatgtgcaaatatcaccccagtcaactttaaaatgttttcatcaacacaaagagaagtccatatccgttagccaccaccgcctatcctcccagccttaaacagccactaatctagtttctgtctctatattgccaattttgtataatttgtgtaaatagaatcatataatatgtggttttttttttttttttttggtctggcttttttcacttcccttaatggtttttttgttgttgtttctttgttttgttttgttttgagacggaatcttgctctgtcaccaggctggagtgcagtggcgccatctcggctcactgcaacctccgtctcccaggttcaagcgattctcctgcctcatcctcccaagtagctggaactacaggcgtgcgccacaatacccagctaatttttgtatttttagtagagacggggtttcaccatgttggccaggatggtctcgatctcttgacctcgtgatccgcccaccttggcctcccaaagtgctgggattacaggcgggagccacggtgctcccctaatgtttttaagcctcaccatgtgtcagtatctcgttactttttatggccgaataatattctattgtatgggcataccgtattttgttaatccatttatagttgacagacatttgggttgtttccaccctttgagtattatgaataatactgctatgaacattcatgtaaaagttttgtttgaacacctgtttcaatgtgtttcaattttgggggggtatatacttaggaggggggttgctgggtcatatagtaattctatgtttagctttttgaggaatcaccaaattgtttttcacagtggctgtagtattttacatttccactagcaacgtatgaggattctaatttctccacatctttggggacactttttattttccccttaagaaaattccagccacctttatgggtatgaagtggtatctcatggtactttgtgtttgcttgatgacgagtgatgtatcacacctttttatgtgcttgtaagccatttgtatatcttctttggggaagtgtctatttaagtttttgcccatttttaattgggttggttgtctttttttttttttttttttctctgagacagagtctcactctgtcacctaggctatagtgcagtggcacgatctcggctcattgcaacctccacctcccgagttcaagcgattctcctgcctcagcctcccgagtagctgggactacaggcacgcgctaccgtatctgactaatttttgtatctttagtagagacaaggtttcaccatgttggccaggctggtcttgaactcctgacctcaggtgatccgcccacctcggcctcccaaagtgctaggattacaggcatgagccaccgtgcctagcctgggtttcttgtctttttattgttaaattataaacaatttttacatattctgaattctagaccattgcagatatatgatttacaaatattttctcccattctgtgggttatcttttccctttcttgacagtgtctgttttctttccagttcaaatcacatttattcaacgtctattctgtgttgagcacaggggatccagaagtgtataagctacagatgcttaccctctagagggatcaccagcttaaaagagaaacagacatgcaaatagacaatgacaaaacagtagaataagtgcgataaatatttggtcatcacccttttttctcaccctcaccactgctgccctggttcataaagcatcttcaaaacatttttttttgatgtgcagaagtttttttattttgataaagtttaatttacgtatattttccttttgtttcttgtgcttttggtgtaatgtctaagaaatcactgccaaatccatgaagacgtactctatgttttattctaagggttttacagttttagcttttacattaaggtctttgatccattttcatttatttttgtaaatgctatgaggtcgggccccaacttcattcttttgcatgtggctattcagttgttccagcactgttttttgaagacaattctttccccattgaatggtcttgggaccttgtccaaaccaattgaccatagatatatgagtttatttctggactctcagttttatctcattgatctatatgtctctccgtatcccagtaccatactgccttgacttttgtagtaagttttgaaaacaggaagtataagtcctcttacttcgttctccttttcagaattgttttggctaatctgggtctcttgcacttccacaggaattttagaatcaatcagcttgtcaatttctgcaaagaagtcagctgggattgtgatagaaattgtgttgaattcgtagatcaatttgaggagtattctcatcttaaccatttaagtcttccagtccatgaacatgggatgttttcccatttatttagatcgtctttaatttcttttaacaatgttttgtagttttcagggtataaagtttatatttcttttgttaaatttactcccaagtattttattatttttgatgctattgtaaatgggattgctttatttcattttgaatttttcattgtgactgtatagaaatacagttaatttttgtatgttgatattgtatcctgtaaccttgctgaactcatttactggttttgatagttttttagcagattccttaggatgttttatacacacacgtgagtcgattcttaaagagtaggtgttcatgaagtggatatgtgatgttctagaacaggaaatggcaagtccaagggcaggggggtgtaaaagcagttggaaccacatgtgcacaggtcagcatggctgaagctcagggtagcaggttgaagctagtttgtgtcatgctaaagaggatggagacatcctgtcactggtagtgggagccatgccagtctggagatggagtaagactattagaatcattctttaaaaagaggcccagaagaggcatgtgatcagcaccaatgaaactgatcagcttcacaagtagctgacaaggtctgtctccctcagtaaaagcgaggacctgcaggtctctctctatatgccactaccctgtggatgacattaccttgatgaatggtccctggtgacccagcaccagctggcattgtagcagccaagcccggccagcttcagtgatgtgacacttgatgcctgctgctattgctccttaggcttctggacaggatccagatcatgggctcttagtgaacttcagaccagcactcctacctgactgccttatggagccagaaatttccagacaagctgaaaatgtggctgtggtctctgtgccagctgcccctgccatcactgggttctctgggtttggctgtcataggacaagcacaggcctaaaggattgattattagcccaggttgcattgcttggatgacagcttggcctggcagcttctggagatgcgaaaggtatacagagccaagggcgaggtctgctgtcatgagcctcacatgaggcatgtgacaagctaagcaggaagggcatagggaggatgtcacttggggactgagctcagaaggtgcctctctggccacttttgatgggtcatctcagaaaaactggttttgtactccctccagcccaggattcccaccatctttcacccagtacactcatcttatttccaaccacccaaacccctcctgacctcagtgtctgtgcctaggccaaatctcagcactccccctccaggaattttcatgccacgggccccatccctataatccctggacttgcttgcagtgatttcatttcctaccaagcttgcatgccattttggatttggcttctgttcaccttccccttgcctgccttttgtggacttcaatatcgccttgaaagtggcacagaaactcagaccgatttggccatagattattagctctgagaaacagtgtgtctgagagagtgtgtgtgtagtgggggaggatgattaaagcctgttacccaagagtgcttgatgggaatgatgatacgcctcctggattttgtccagattgttgctgattttataattgtggtgactgagccagtcactatactgggcactttaacttctgatgtagcccgtgaagaacctaaaactcttccccatttgcagaagccagatttgaatctgagaccactctcagatgctggccatgtttttccaattgttatgtgttatcttatagtcaaaccatgtctcttgttttgttgttgtttgtttgttaaggttgtagggatcgggtaatatgaacccaacaggcattgatatgatttggctgtatccgcacccaaatcttatcttaaattgtagctcccataattcccacatgttgtggaagggacccagtgggagataattgaatcatggggcaacttccctcatactgttcttgtggtagtgaataagtctcacaagagctgatggttttataaggagagacccctttcgcttggctctcatattctctcatgtctgctgccatgtaagacgtgcctttcacctttcacctttcacctttcaccttccaccatgattgtgaggcctccccagcctcatggaactgtcagtccattacacctctttttctttataaattaccccatctcaggtatgtctttatcagtagtgtgaaaacagactaataaggcatccttgtctctatcactttctgaattgcctttaagcaaaatcaccaattttggattttccctgcccctttatgagctgcagagaagagatgtgtcttatagactaatgtatttggcttttgcactctgatccgatctgagagtctctggtaggcacattttaaagtctttgaaactgtaccttcagccttcccaggaaacagcctggtcagaatgagattccacccagagccagcggtgggctgcggggaacccccattggtcacaacaaattatgccaacaaagacctctttttggaggctgggggaaaaaatgcagttttgtatgcttaccttctcaccatctcactgtgccctgaacattcccactttgtggccagaaatagacgagactgaagtagactctttggccaggggccaagtggatcagacagcccggaccaagcctggtgttaaagtctccattcttgtctaaggtggttctaaagggtcccatggcccccgagccacttccctcattctctgagcaaaccccattcagccaagacagcctgtttccacaaaggaatgtgttccccgtggggccagaagcagccccagaccacagctgagatcgccactccacagtgtgctctgggccatgaatgaggaccattcatctctcctgttggtccaagcaggaatcccaggcagggagggtctgatggaggagagagaccccaccctagcccctgaccccaaatgtgaatgcaggcatctggcagaaatgtcaagcggaacattctgtctggaaggaagaaattcagccgagctctgggccacactgttgcaagcaagtgtccttggcagggtagggcactgttcctggctgagaactgccaggttgtttatgagatgcttcaaatccggggcaggcaggactgttgctgggagctccagggcacaagatgtggagccagtgctgggaggaatgaatcacttccctatttactgggggcctgccggaggccaggcaagcaaagtggggtcccattgaagcctgctttgtgagagtcctatgccccacatactcatattagggaaggggacagttatgagcatcacatcaggatcaggttgtgtcagggcacttgaaaatctaaaagcatgatgtccaaacactgtataatttttacaatgtgttttcccctttatctgtgcatgactaggaatttttattgctattggcaataaaaacaattgttgctattgactaggaatcagttagtcacatggggcattattcgactgcgtgccacaaggtcaagtgtcattgatcagaggtcatgttctgggtttctcctgtgtttaagaatgaactaggaagccaattgtccttgattttccagaaggtaccattaagcaggtgaattctataacacagaatgcctttttaggtggatgatgaaatgattcaaaacggattgcttttggaggaagaaaaaaatttcagtagcttcaataaaaatcttgatactggagagttttttggagtaggcctttcacattccttcctaggcagactgactcagctatcaaggtagtagcctaagaaaaggacactaagaaaaggaccctagaaaggccagttttacattttcttcttttcctctgttagctctgctgggtcaaaattaagtgaggcttcatgaaggattttcaaacactcatccattatcaggacaatactactactgggataagaaaaatcagggattctggagtgtagcagaaagttcttagggtgacaggtgcttcaagggctaacaatgtcttccaatgaatgatgcttgttggacaattgtaacagtactgcttatgaccaactcagaaccttgagtaagttcaaggttctgaacctctttctctccctccaacccagccctcttccccagctctcagcaagatcagcaagcactggctgatacaagccctgcttaaaagtctttttttcccctaccctccttaaaagctttacttgcagacttggcacaattttgcacatacctaatgtatacagtatatgagaagacacctttttatttagataattaagctttttgctaatattgtatattctttggagtaaatgtacatttctagtgtgtgtgtgtgtgtgtgtgtgtgtgtgtgtgtgtgtgtgtgtgtgagtatattttttgctttttgtttttgtttttcttggagacaagtcccagctctgtcgcccaggctggactggagtgcagtggcacagtcactgctcactgcagcctcaacctcctgggctcaagtgatcctcttgcctcagcctcccaagtagctggaacaataggcatttgctaccatgcccagccaattaaaaaaaaaaatttttttgtagagacaggatctccctatgttgctcaagctggtctcaaacccctgagctgaagcaatcatcccaccttggcctcccaaagtgccaggattacaggcatgagcacccagcccatttctaaattttaagttgttgcaaggtgcgggatccagaaggaactacctaggctcagccttggcagctcacagttccccaaataacacctggggaagctgaagatcaaaattaaatgtaagcaactgcattatgcagcttagtatcactcagaactgtagttggtgcctgaataacctgactcgaatctagcaggcagcacctgtttgaaccaagatatattagctgctatttttattggccacctgctatggtctaggaacttaagaagcatgatctttgatttttacaacaggcctgaaaagatgtttcatatttttccttaaaaaagtttttttgtttgtttgtttgagacagagtctcgctcttgtcgcccgggctggagtgcaatggcgtgatctcggctcactgaacctctgccttccgggttcaagtgattctcctgcctcagtctcccaagtagctgggattacaggtgcccaccactatgcccagctaatttttgtatttttggtagagatagggtttcaccatgttggccaggctggtctcgaactcctgacctccagtgatccacctgcctcagcctcccaaagtgctgggattacaggcatgagccaccgtgcctggcctaaaaagttgtttttaagtacatattgtttccatttggtagatgaaatcctgagacttagaaaaatctaagtgggcctaggtcacagagctaataagctaagaaataagatttgaaccaaattctgcatgactaagccgctagtccatgccgtttatggtcagtaaagaggtggcagagcatcccgcctgtttttcctggaagggtgtgctgtgggctgtctgagtgggcccctgcattgggaggtgcccgagaccctggggagggtaagctgatcccacctgatgtttataaggaatacctcgatccccgagtccctctaatgtgaaggaattctttcctgatctctctctgataccccccgaggacacagtgcctcttgttggcaaagcttatactagaatcatctgtgtgaatgttgtaaccttgaatggactgcattgaatgtaagagggttctcagccgtgcagtcaaaagcccagtgagaccatattgggggataatttctccctttctgaagagccaggcacaaccaacttttcctggcagtctctggcttttatttgtgtcagtcagagacttcagtccttcggcaccttgccttgtccctttaattacgacccactcctgggctcaactgtgtgaataattaaggccatctgccacggcagctcccagacctcactcaaactaggtttgaacaggatactctccaaggtgggcctctcaccttgacttatgcctgcaatcccagcaccttgggaggccttccccttgcggacccttgcgtgcctgtgaaagccgcatttatttggagcgtgtggagggagctacggagatccttggcctgattctcccatgttctgctgacccagttggcagatgctctctgcttgcattcagcgtagaggagggtcctggaatttccatgatgtggactgaggtgacttcactggagcagatgcttcttagactgtcaatgttgagacacccttggaggtcttccaaggtgaatgctgagaatagatctgcctgttttctaaaaactctccccactgtggtatctccaccaggcttttttatttcttttgtgaaattaagatctctgagcaaggactaatagaacaggtatggagaagagaaatgtgtctgccatattagtctagatgtcctcaaatgtctggaagggtagatggagaacttacatatttgtttattctaagacatcgtaagagacacagagcacttatattttgttctctttctttcttttttggagagggagtcttgctctgtcgcccaggctgtagtgcagtggcatgagctcagctcactgcaacctccacattcagggttcaagcaagtctcctgcctcagcctcctgagcagctgggattacaggtgtgtgctaccacgcccggctaatttttgtattttttagtagagatgggatttcaccatgttagccaggctggtctcgaactcctgacctcaacaattagtgaataagggtgtctgctctggtatctggctggcctggttacaaattccagcttgatcactttttagcagtgtgactataggaaaatcatgtagcctttctgtctctcggtttttccttaggaaaatagggatgctgataataccttgctcagggggttgtccaaagctgtgttgtgcagtatggcagccaccaccatatggggccaccaaacacttgcaatgtgctgcttggaattgagatgcgctgcaaacgcaaagtacgtgctggatttcaaagacttagtacaaaaagaaaaaagaacgcaaaacatctcattaataatttttgtattgattccatattgaaatatattgcatcaaataaaatatatctttaacattga

SEQ ID NO: 1178 - DNA, 11247 bp, Homo sapiens
atgcgcacggccggccccacccccgctgtcagctggaggaagcggagtaggaagcggccgcgatgtccttttgtgtcctacaagcagccggcggcgccgccgagtgaggggacgcggcgcggtggggcggcgcggcccgaggaggcggcggaggaggggccgcccgcggcccccggctcactccggcactccgggccgctcggcccccatgcctgcccgaccgcgctgccggagccccaggtccgggggcggaggggagcgctgccgcgggggtgggcgggcggggcgcgggggccatgtgcgagcgcggcagggaggcgggcggggcgggctgcaggcggggtccgactctggggccagtccgggccacggttgggacccagtcgagggtcggactggtcagggttcaggcgggatccggcgtccgagtcctggtgggccggcctggggcaggatctggctctggctgcgggtcctgactcgggtcagggttgggcctccgatccagcccgctccggggcagggttcaatcccgcatttgccgaagtccctggggctggccggggtggaagacggggagggctctatgtctgggaaggggctctgaagaccacgtgggggcgctcgaaggggcctggggccaccctcctctctgggtcaaaggtcatcgcaccggcaggggagaacttcctcctccttggctctccccacttacttcctgataacctggtagaggtctcccgcgggcggggagggggaggcgtagcaactttaggcaacttcccaaaggtgtgcgcaggttgggggcgggacgcggcgccccgggaggtggcggcctctgcgacagcgggagtataagagtggacctgcaggctggtcgcgaggaggtggagcggcgcccgccgtgtgcctgggaccggcatgctggggcaggagggcagccgcgtgtcaggtgtgaaaagctctggaggtgttttcatgagtccgtgcctgtgcgtgtggatgtggggagacctagtgagagtgtgtgtgatcatgagccttgactgagttcgtggatggggtgtgcgctccaggagaagtgtgtgagcacaagtgtgagcaggagtgagcacgggtttgggaaggccggtgcaagtgtgaaagccctcagcagagagcgagcctgcgtgggcttgtggggctcctgagcaccccggtgagtggagtgtgtgaactcggtgtgagcacgtccactggccttgggtctgctctccaatgcagaatacccagatgagggcagggtctcagaggtccccccaacatctggagaaaactgggaagtatcctgctcctggctagggattccaggtggggttgaaggttgcctgggggctacggttaccctgctccctggcctgggtgggagtaggggctttctaagcctcccccaggttcccaagggggagacctgctgtcagttactggccctgaagactctgtttccatggcaacagctaggagggggcagtgttcctgggcagtccttccttggactctgccccccttcttccccacttgctgggcttggaagcctggccctaggcccgaggttgggcaacccgtgtggcagggtgtctcccatcccccataccagtgctttcctgcgaacctatgggtctctccgtgcaggtgaccagcgccatgtccagccaggtggtgggcattgagcctctctacatcaaggcagagccggccagccctgacagtccaaagggttcctcggagacagagaccgagcctcctgtggccctggcccctggtccagctcccactcgctgcctcccaggccacaaggaagaggaggatggggagggggctgggcctggcgagcagggcggtgggaagctggtgctcagctccctgcccaagcgcctctgcctggtctgtggggacgtggcctccggctaccactatggtgtggcatcctgtgaggcctgcaaagccttcttcaagaggaccatccagggtgagcccccagcccactcccctgtcctttgccctgcaccctctgggtacactgctgggtgcaataggccccctgatggctgtggcaccgcttgaggctaacaatctggtgtttccagtccctctacctcccagagacactctttccctgagaagtatggtaaaagcaccgggtgtgctgatgcattgcagtggatgtgagtgagttcagggtaccacctgggtactctaggcccagcaccttctacagtggctctgaaagagtccaaggcagcctctgtctgttcctaagctttgttcttgtttctggcagcttctgacctctccccagcatagaacatgtcccctttttgttaattttcccaaagcagcaccaacacaaggcagattttaatttttttttttttgagacagagtctcactctgttgttcaggctagagtgcagtggcacaatctctgctcactgcaacctttgcccctgggttcaagagattctcctgcctcagcctcctgagtagctgagactgcaggtgtgcaccaccacgcccagctaatttttgtatttttagtagagacgacgtttcaccatgtcggccaggctggtctggaattcctgaccacaaatgatccacctgcctcggcctcccaaaacaaggcagatttttatcagtacttgagaggggctacatcatagtttagcacccaactttaaaaagactaacaggcaaggccggacacagttgctcacacctgtaatcccagcactttgggaggccaaggtgggcggatcacctgaggtcaggagatcgagaccagcctggccagggtggtgaaaccgcatctctactaaaaatgcaaaaaattagctgggcatggtggctcgcgcctgtaatctcagctacttgctacttgagaggctgaggcaggagaattgcttgaacccaggaggcagaggttgcagtgagccaagatcacaccactgtactccagcctgggtgacagagcgagattccatctcaaaaaaaaaaaaaaaaggccgggcactgtggctcatgtaatcccagcactttgggaggccgaggcgggcggatcatgaggtcaggagattgagaacatcctggctaacacggtgaaacactgtctctactaaaaatacaaaaaattagctgggcatggtggcgggcgcctgtaatcccagctacttgggaggctgaggcaggagaatggcgtgaacccaggaggcggaggttgcagtgagccaagatcacgccactgcactccagcctgggcgacagagtgagactccgtctcaaaaaaaaaaaaaaaaaggctgggcgcggtggctcatgcctgtaatcccagcactttgggaggccgagacgggcggatcacctgaggtcaggagtttgagaccagcctgaccaatgtgatgaaaccccgtctctactgaaaatacaaaaattagccaagcatggtggcatgcgcctgtcatcccactcaagaggctgagacaggagaattgcttgaacctgggaggcagaggttgcaatgagcccagatcgcgccattgcactctagcctgcgcaacaaaagtgaaactccacctcaaaaaacaaaaacaaaaacaaaaacaaaaaaacccaaaaacgctgggcttggtggctcatggcctgtaatcccagcactttgggaggctgaggcagacggatcacgaggtcaggagttcgagaccagcctggccaacatggtaaaaccccgtctctactaaaaatacaaaaattagccgggcgtggtggtgagtgcctgtaatcccactacttgggaggctgaggcaggagaattgcttgaacccgggaggcagaggttgcagtgagctgagatcatgccacagcactctagtctgggcaacagaatgagacactctcatctcaaaaaaaaaaaaaaaaggacttacaggcatgtctgctcttaaaagtcactaatttttttctcactcaggaaagcttatcagaatttgggggaatgagcaagatgctgacattaagcattgcctgggaagggcctattatttccgttatttctgcttttatgtaaccattggttactttgggggctataacacgtataattaaaaaaaaaaaaaaaaaggccaagtgtggtggctcacacctgtaatctcagcactttcggaggctaagatgggaggatcacaaggtcaggagttcgagaccagcctggccaacatggtgaaaccctgtctgtactagaaatacaaaaattagccaggtgtcgtggtgggtgcctgtagtcccagctactcaggaggctgaggcaggagaattgctggaacccaggaggcagaggttggagttagccaagatcgtgccactgcactcccagcctgggtgacagagtgagagttcgtatcaaaaaaaaaaaaaaaaaaaaaatcttgagtgcttaccttgtgctaggcactgtattcttttatgatctcagttagtccccacagcaaccctataaggtgtcagtactgttataactgaaactaagagaggcatttgaaactttgttgaagtctcacaactaggaaatggcagaaccaagatttgaacttgggtcagtataggtccagagctgagctcttcaatgttagactgcttcctctgcttattactaataacaccgaactttggacagacgctgaatgactgattgtgacattccagcacgtttttttttttttttttgagacagtctcgtgtggtcgcccaggctggagtgcagtggcacgatctcggctcactgcaagctccgcctcccgggttcacaccattctcctgcctcagcctcctgagtagctgggactacaggtgcccgccaccacgcctggctaattttttgtacttttagtagagacggggtttcagcgtgttagccaagatggtcttgatttcctgacctcgagatccacctgccttggactcccaaagtgctgggattacaggcgtgagccactgctcctggccaggttttttttttttttttttttttttttgagatggagttttgctcttgttgtccaggctggagtgcaacggcctgcagtcgtggttcactgcaacctctgcctcccgggttcaagccattcacctgcctcagcctcccaagtagctgggattacaggcgcctgccaccatgcccggctaatttttgtgtttttagtagggatggggtttcaccatgttggccaggctggcctcaaactcctgacctcaggcgatctgccctcctcgggcttccaaagtgctgggattataggtgtgagccactgcaccccgccaatccagcaagttttaacttggccaaaatccaccaatcttaaactttgtgcacccttcccactctgaagaacagtgagccagccggccagggtgcgggtatctcctacctaccctggggcccctcactgtatgttgactattgacaaatatttattgtgtgctggctgtgaataggacttgtatattgagcacttaggtgtcatgaaccatgctggatgttttgaccatattatcccctttaattctcacgacccaactctgtggggcacttttacagctgggaaactgagggttcaaggggttaggtatgggacttgcccaaggtcataaaggtatgtggtagccagagtccctgttcggcacagacctgttctttgctgtcctggccagtgttccaggccttggggacatagctggggctgaagcagggctgtttctgccctcaggcagtttacatcctggcagaggggagagctgggcaacagtgagttgcacagacttgtcttattaccgctgtggtatgtgcaggaaggggaggtgctggttctgaggctccagagggcttgtctttttttttttttttttgagacggagtctcgctttgttgcccaggctagagtccagtggcgcgatctcggctcagtgcaagctccgcctcccgggttcaagcgattctcctgcctcagcctccccaatagctgggattacaggcgcatggcaccacgcacggctaattttggtatttttagtagagactgggtttcaccatgttagccaggatggtctcgatctcctgacctcgtgatccacccgcctcggcctcccaaagtgctgggattacgctcccggcctctttttttttttagacagagtctcactctgttgccaggctatagtacagtggcacgatctcagcttactgcaacctccgcctcccaggttcaagcgattgttctccctcagcctcccgagtagctgggactacaggcacacgcccagctaatttttgtatttttagtagagacagggtttcaccgtgttggtcaggctggtctcaaactcctcacctcgtgatctgcctgcctcggcctcccaaagtgctgggattataggcgtgagccactgcgcctggcctttttttttttttggtacagagtttcgctctggttgcccaggctggagtgcaatggcacgatcttggctcactgcagcctctgcctcccgggttcaagcgattctcctgcctcagcctccggagcagctgggattacagacatgcaccaccatgtccggctaatttttttttttcgagatggagtctcactgtgtcacccaggctggagtgcagtggcacaatctcggctcactgcaacctctgcctcccgggttcaagcgattctcctgcctcagcctcctgagtagctgggactacaggtgcctgccaccacacccagctaatttttgtacttttagtagagacggggttttaccatgttggccaggctggtcttgaacttctgacctcaggtgatccacccacctcggtctcccaaagtgctgggattacaggcgtgagccaccgtgcccggccgtggtgtcttgagctgagtgcagaagcgcaaatagggggtaggagaaaatgcaccgcgaggagaaatgtgctgcgggcctgctgtctagctgtgtcatttggtcgttgcggggccctgtgaggccgggagggctgccagcacccaccatgtgccaggcctcgttgctagtgctggggccagttcctgccccggtggagctgccactgaagggggaggcgtaataaacaagataggtgagtgcatatgcagcgtggtctgttgtgctgagggctgaagagaaaccagaagcagggctcagaggccaggaggactctgcaaagggatttggcattatcacagggtggccagggaagatcttcaaggtgacagtgagcagagggaggtgagggagcctgtgtggacttcaggactagagctccaggcagggcctgtttgaggaacatggaggaggcgagagcaaggagtagaggtcaaaaggaggcaagaagcaggggcgtaggcctaggaggacataggttcgctttggcttggactcagagaagggaaatccccagagggttttgagaagaggaggtacaggatgtaatggaggcttaataggaccctcttggctgctgagtcgagaacagactggagcaagcagggacagccaagcgaggggcgaggtgacagtgactatcaggtcaagggtggaagtagttgccaggggcaggaggcggattctggaccttggaggaggtaaagcccaccagaatgtgtcggtggcttggatgtggggtgtgagaggaaccagagattctgcctaggtttcttcttgggcaagtgaacacgtggagtccacgtaggctgtgttcggtccgagatgccttctagacatgcaggatgtcaaggaggcagctggagagatgggtctggagctcacagcaagtccaggctagaggtagaaacgtgagagccccacggctggggaagattgccatgggattggagatgagctccaaggacagccctggcagtctggatggaagagcttgggaagatgctcagaaaccacaaagtggctggtgcggtgggaggaaaaccagagtgtatgctgtcctagaagcaaaagaagaaagtgtttcagtgtttctaggagcaggaagtgatcaacagccttagatcctccttttaggccaagtaacatgaggactaagaattgaccactggatttagcaatgcagaggtccttgtggcccttgatgtcggcagatgagggcagtgtggtccagagatgaggcttggggctgagatgcagccccgctgcctggtccagctcctccctcatccaggcagggctcccccgcccagcagccactcccctccctgcctgctcatggccccctgctctccctttcctccccatacccccagacctgtgcttgcccggggagagtcagggctctcctgtcagctgggtcccctcccagccccgggaggccgccactggagccctgcctcttcctggcagggagcatcgagtacagctgtccggcctccaacgagtgtgagatcaccaagcggagacgcaaggcctgccaggcctgccgcttcaccaagtgcctgcgggtgggcatgctcaaggagggtgagcgctgggcaggggctgggcgagggctgggggagtcggggacccgggccaggtgggggtgaggcctgggagttctggtgagtggactcggggaggacagctctggagagcaagccccaccctgcccacagcaccacagtcacagtcctatctgtcccacaattcaaggagtgcgcctggaccgcgtccggggtgggcggcagaagtacaagcggcggccggaggtggacccactgcccttcccgggccccttccctgctgggcccctggcagtcgctggaggcccccggaagacaggtgagagcactgtgggtacctggggctacgaaaccggaggcctatgtgtggcatcatagttaccttgggcactgggacctgtatttccccttcgtctcttcactcactcatttccccaagacatgtgaaactgccttttcctgcatcaggaaaagtagtagaactgggaacagggacgattttccaacactcacagcctgtccacaaacacacgggctttccctgggagacagttagcgctcttccctggagggaagtcactggacagctgctactgaggaaggccacagggggagccactgtgggaagatgcttgacccctgaggcctgacagattcgagtgctcctgactcttgtcctctaattgtcacagcagccccagtgaatgcactggtgtctcatctgctggtggttgagcctgagaagctctatgccatgcctgaccccgcaggccctgatgggcacctcccagccgtggctaccctctgtgacctctttgaccgagagattgtggtcaccatcagctgggccaagagcatcccaggtaaagggcccaggtgacccggggctgccctgaacgggcccggctctggtgcgcttgctcagccaggcccgctccccgctgccccctaggcttctcatcgctgtcgctgtctgaccagatgtcagtactgcagagcgtgtggatggaggtgctggtgctgggtgtggcccagcgctcactgccactgcaggatgagctggccttcgctgaggacttagtcctggatgaagagggggcacgggcagctggcctgggggaactgggggctgccctgctgcaactagtgcggcggctgcaggccctgcggctggagcgagaggagtatgttctactaaaggccttggcccttgccaattcaggtgagtctggggcaggcactgacaggtgaggtgtctccgtaaggtcttcaggttaactcagtgacggtagcacagccccattttgcagataacgaaaactgaggcttagggaagaacaatgacttgctagaagtcaaaaagcaagccaagtgcaggctccaaactgcacacaggattttgagccctagtgccacactaatgcagaaaggtcatttagtgggagggaaggtggggagggtacaaggtggccacagttgagggagagagggtggggtcctggcccacgagccgcagcaatgagtggtgcctctcagtcagccaatcaacaaatcctcgtttggctcttccttaggccccatccagcagtgctcaagatacggggagtgcccttgccagagatagcccaggccaacaccacattcctctcttcttgcagactctgtgcacatcgaagatgccgaggctgtggagcagctgcgagaagctctgcacgaggccctgctggagtatgaagccggccgggctggccccggagggggtgctgagcggcggcgggcgggcaggctgctgctcacgctaccgctcctccgccagacagcgggcaaagtgctggcccatttctatggggtgaagctggagggcaaggtgcccatgcacaagctgttcttggagatgctcgaggccatgatggactgaggcaaggggtgggactggtgggggttctggcaggacctgcctagcatggggtcagccccaagggctggggcggagctggggtctgggcagtgccacagcctgctggcagggccagggcaatgccatcagcccctgggaacaggccccacgccctctcctccccctcctagggggtgtcagaagctgggaacgtgtgtccaggctctgggcacagtgctgccccttgcaagccataacgtgcccccagagtgtagggggccttgcggaagccatagggggctgcacgggatgcgtgggaggcagaaacctatctcagggagggaaggggatggaggccagagtctcccagtgggtgatgcttttgctgctgcttaatcctaccccctcttcaaagcagagtgggacttggagagcaaaggcccatgcccccttcgctcctcctctcatcatttgcattgggcattagtgtccccccttgaagcaataactccaagcagactccagcccctggacccctggggtggccagggcttccccatcagctcccaacgagcctcctcagggggtaggagagcactgcctctatgccctgcagagcaataacactatatttatttttgggtttggccagggaggcgcagggacatggggcaagccagggcccagagcccttggctgtacagagactctattttaatgtatatttgctgcaaagagaaaccgcttttggttttaaacctttaatgagaaaaaaatatataataccgagctcaaaaa

SEQ ID NO: 1179 - DNA, 14406 bp, Homo sapiens
cctgtgacgcgcctgctgggcccgagctttttcctgggatagcgatggagacgccgggcgcatcagcgtcgtccttgttgcttcccgccgcgtccaggcccccgaggaagcgcgaggcgggagaggctggggctgcgacgagcaagcagcgggtcctggacgaggaagagtatatcgaggtacgacctcggtgcggacgccggcgacttctgggcccatcctctgcttcaagctcctctcaggttccctctctcgggtgttgacactccgtctcctcgtggaagtggaggagccgggtgtggacggtcccacgagtcaagtaaacagggcagaggaagacgtctgtggtggaagaggctgtagtagtgttgtcagggaaaagagagagcggctctctttgtatgggacgggggtcagggaaagaagattttctgttaaagtgtgagtaggagtttgacaaactggaaggatggtggcaaagagggctttctaaagagcggtggcagcaagtgtgaatgctggggttcctggaaagagaccgcagttgtgacagcatctcgagtgagtggacctgcgtcgccccaccacacgcacacagaaggaggagctgaaacggggattggcggaagtcagtttggttttagacctgtttaattcgggacaccttttgggatatgtagatggatggctttaacggacggttgggtgcccagatatgcagctcgggagcaaggtctggctggaggtgcagacttgggaatctcaacttgtggtagtgactggctgaagttactcaggaaaaaggtttatttttattttattttttgagacggagtctcgctcgtcgtccaggctggagtgcagtggcgcgatctcggcttactgtaaccaacctctgcctcctgggttcaagccattctcctgcctcagcctgccgagtagctgtgactacaggtgcccgccaccacgcccggctaatttttgtatttttagtagtggtggggtttcaccatgttggccaggctggtctcgaactcctgacctcaggtgatccgcccgccttggcctctcaaagtgctgggattacaggcgtgagctaccatgccccgccaggagaaaggtttagattggaaatagaaagtcatgtgtggaatgaaagtgacaacacccacattggtctggcttgtggggagccagcaatggagaatgagaatgaccagttagcaagggcgagagagaagggtttcacggacttcagaagagtgtttagtaatgttagaggttgcagcatggctaccatatgggatgctcaaccccactagaaagtgccctcaagctccctcaatccagccccagtcattggggaagtagaatttgaaggaggttcagcaagttccttagcatgtacagcagtggacctgtgaggcaggagcacccagactgcagctccgactttcttttttcttttttttttttttttttgagacggtctcgctctgtcgcccaggctggagtgcaggggtgtgatcttggctcactgcaacctccgcctcccgagtttaagcgattcttctgcttcagcctcccacgtagctggaattacaggtgcctgccaccacgcccggctaatttttgtatttctagtagagactgggtttcaccatgttggccaggctggtcttgaacttctgacctcatgatccacctcccttggcctcccaaagtgttgggattacaggtgtgagccaccgcgcctggcctctgactttcattctgatctctccttgcagggcctccagacggtcatccaaagggatttctttcctgatgtggagaagctccaggcacagaaggagtacctggaagccgaggagaatggagacttggaacggatgcgccagattgccatcaagtttggctctgccttgggcaagatgtcccgggagcccccgccaccctgtatgaggaccctgtgggtggcggagaggggaaagcctgctgaactgtcgcttcaggctcactctaattcttatccccctctcttcccctagatgtgactccagccacatttgaaacccctgaggtgcatgcaggcactggagtggtgggcaacaagcccaggccccgcggccgaggcctggaggatggtgagtgagggtgccctctttaagtcacatggtcaggattgcctgggaatcttagcctgtgaggccctgagggggtggtccagagggctgcaggccacatcttgttcctgaggggtcttgcgtaaatagcagcctgtgaagtcaaaggacattggtctaggtggtagaacatctgggtccagctcccacacatggctcgcctctgtgaaatgggactctcaccagctcttgctggcttttctgctgtgttccagccctgccctgtgggcttcatggatgttggaaggccccttttgttactatcctgaagatgcctcagggcctctccatttgtttccttcatgttggtcacttcccagataactgcatggctcactgtgtttcttcctgtagatctctgcataggtgttacctgttcagagaaacttttcttgacctgccagtgtgaagtcacaacaccactggtgctctgtggcttccagcctggctttggtttttcatcacaagacattttattttatttaatttcattttatttttaattttttgacacagagtctcgctctgtcacccaggctggagtaaaatggtgtgatcccggctcactgcaacctccacctcccaggttcaagcaattctccctgccttagcctcccaaatagctgggattacaggcgcctgccaccactcctggctaatttttgtattttgtagtagagacgaggttttgccatgttgtcccggctagtcttgaactcctgacctcaggtgatctgtctgcctcggccccccaaagtgctggtattacaggtgtgagccaccgcgcctggccaagacataacgttttaaaggcatttctgtttatggtctctttccctaattggcatcccttgcacaagagcagaagctttgttttgctttcatctgtatgctccgtgttgggaacagcacatgtggtgttgtgggccttgcacagatacacatggaacagatgaaagagttgtcatcttcagcatgtttgctgggacacacagctctatatggtaacatcgtgacttgatgggggagtcggtttaggaaagggcactccgagtcctgttgaatgcaagtgttctgcacgccatgggacttctgcgttgtcaggccctcttttcatcagtagtagaatgtcagtgcatgtatagacaaacgagacactctttcttatcagtttgtagactccactgtgctggagtagcacagatgtgttgtgtgtttgcacaaacatgcaaacatgatactttttgctttacaatccagctttttcggccattaacacagtccttgttgtccttgaagcttgattatctgttgaaatgtagcttgtgcatcacagggcaatttgtagatttttttcttctccttttttttttttttcctatagagatgaggtttcattatgttgcccaggctggttttaaacttctgagctcaagtgatcctcccaccttggcctcccgaagtgctaggattacaagtgtgagccatcatgcctagccagtttgcagattttcaatacctgtacacctacatgccagtaaatataggaatccttttcagaacctaagtggtaggaaccatcatcatgtttacaggtgaggaaactgaggctcagaaaggcagtcacttctgcaggtctcagagatggtcagggtttcacttcttatctctctgagatgaatagagtttctgacccctgtcctcatcccgtgggtcttgagcttgtagccactgtgccttgtgcatagcctcacgtgtagcaggtggtcaggactgtcactagacttgaaggcagagctctccaggtggccccaccgaagtttgcaccaccacacgcagcaccagggcaccacctcagtgggagtaccactttccatggtggcagggttggtcggaggggggggtgtttggggttgtggcttagcacctgtgaggccccatccagaggactaagtcatatgagatccctggaattggggctcgctctcaggtcaggatgattaggcgatgaccacccacctgtagtacaggtaccaggaagagaagagtgggtaaggtaaggaaatcctagggagtgagggagagccccagggatttggaggcctggcacccacaggcctggcaccactttggtgggggaggagcctgcctgtgatcacgagctcttgctctaacacctgtattgctttctccagtctgaatcagaccacgtaattcccttggcatccagcacatgagcagagctggccctgaatctgtagggtaccacctgagggctctctgggcagtcagggtgggtggattctgcccccgtggggagtccttggcagtgtgggctttcatgggcagaagccaggaccaggggagaggattccagccctgcatgttgggggctatgattcctgggcctgggtgtcctcctctttcctgactgcaaagggtgctgtgttcctcctcccgcaacccctaagcaggagaggctggagaggaggaggagaaggagccgctgcccagcctagatgtcttcctgagccgctacacgagtgaggacaatgcctccttccaggagatcatggaggtggccaaggagagaagccgggcacgccacgcttggctctaccaggctgaggaagagtttgagaaggtgtctctggggtctggggtgtcacataggcgtaggcaccctctgtggtggttggggagccccagggccatgggtacaatgcccaggggcatctctgaccatcacttttccccatgtgattgcagaggcagaaagataatctcgaactcccgtcagcagagcaccaggccatcgagagcagccaggccagtgtggagacctggaagtacaaggccaagaattccctcatgtactatccagagggtaagtggcgggcctcgcagccaaatggggaggtgttgggtagagctgtgtgtgtctggctgtgtttggagcagccttccaggtgtgtatggccgtgcccccttgcagtttgggcttctgatgggtactggtctgtctaagggtggacaggtctgtgtgaggtcagcagtgagtgagaccctctccagcggcactggggcctgcgttctgctcaatgcttttgttcatctgggagtgacttggccgagaagcgagctcctcatgctccttaggctgctgcccttctgacacctgctgctacctttgcttcgtctgccaggtgtccctgacgaggagcagctgtttaagaagccccggcaggtggtacataagaacacgcgcttccttagggaccccttcagccaagccctgagcaggtgccagctccagcaggcagccgccctcaatgcccaggtgagcaggcgggtcagcagggccgcatgggccaggttggacagggctgcctgggggcaggcatgatctctcccatctctttgagcttggcagagctcagtgagtggaaccatctggggccctgtgcggcaggatcctgagtctttccttggccccagtgggcttccattgaacactgccttggtcacacacgttctgtaggtccagatctgtgccagctcccttgatggcaggggcaggagagaaaagggactgctgggagtgagcccaggctggcagctgcacgcccacacaccgggcagggaagccagagagccgcagagggagcccagccccagggggtggctggggtgggacaggccctgggttggcagagagcagaggctttctgagtctgggagcaagacgagtagatactctctgatggtgactgtggcagtcacagggttgaagtggggaaggcaggaagagactagagcataagcattgcctgtcatcagcattgcctgtcatcagcattgccccctgcaggggcctggcgtcagcatcctctggagttgctgggataggcgcagctcgagtggaggccctggcacctccctggatgggaggagggggctttccttgcttgggtacccactttgacaggccctcaaggtcttttggggggttggggcaggggccctccctctctttctccaagaaggctgccaaccccagagccccagccttgccctgaggagaggaagtgtttccagcatgttcccacgtgtttgcccaccggccagctgtcgagcgtgggctgcggtccccctgatgccagcctctctgcttgttccagcacaaacagggcaaggtgggccccgatggcaaggagctgatcccccaggagtcccctcgagtgggtggatttggatttgttgccactccttcccctgcccctggtgagaaaagtgcccactggcaagtgggtctactgctgggactccctgggggaggtgggcttctcagtcggccctggccactcctggcctctacctggcctgccccacaccttgtgtaactcagggacctggtctcctgtctgtacaaggccctagaggccaggtgtccaggctgcttggggccgtgggtgggctggactctcaggcagacctggcctgagacatcctgggatgacgtgtcctgtcctggtccttactgtgatgtcagtgggtgggggtgtgtgcacagtgcttatgagtctaagtctacctagcactgcagggagggaggcccagcacctcagtggaggtgaaactcaggtggtcttgtggcatgcgtgggtgtccctctgcactctggcctctgtgctcttgggtgctggtgctgtgtcacacgccagggcatgtgaaggcaccacaggtttgcctggggttctaggaggtttgggagccctggaaggcctgagtgtctcctcctgcgtggctgggggagacctcccagaggcttgtaggctaagcacatggctgtagggccttgagcctgcctcgggcctgctgggagcttggcatttccctttcggaggatggaggtgccagggttccagagtcctggggaaggagagagggctagctgcctgccttcgtattagctgggatgcacattgggtgaacaagctgtgactggaggggagggtggtggggagtcctctggcctgaggtggttttgggctctttgtctgcaggtgtgaacgagtccccgatgatgacctggggggaggttgagaacacacccttgagagttgaagggtcggaaacgccctacgtggacaggacacccggcccagcttttaaggtgggttgtggtgatgggggaactgtgtgcgaccggggtggacacctctggagccctgagtgcctgtggctcaggactgagcactgggatcggcccccagctgctgacgggcagagtgctggcttttctgaatgccagggtgctgaaggcaggtgtgggtgggtggacctgtcacagagggatttgggggtgtaagggctgagacaccaaggcagggagtggcttgggccctctggatcctggaggccgggtgctgttcatgaatgaggcaggatggtcacagacacgtgaggagctctgcaggcctgagggccataggacgaggctgtgtgcttgtagagaaggcccctggttacagaacacgattgggacacgctggattacacggctcaagcctggtgttgtaggagtggtcagggtggagtgtgtgaggcccggcacagaccaggggaggctcttcgtgggctgggtcagatacaacaggcctccccataccactgcgggcctttccccagaatacttagtacaggtaacccatgtccagacaaaacatggggagaggttctggttaccttggttctaaattgtctgggacacaaggataaccaaggcaaacgtgcgagagggataatgaagaggatgccgtgctgtccaatgtgagagcgcaaggcaagggctgaggtgcttctgaggtatgcctgccactgcttcccgagtctccaggccaacagtaaacagataaattctgaaacaaaccatgatccaagtcagaatttggggcccgataaagatggcaactcagattgcactgaatagcagagtatttagaaatgaagggagctgggtcctcaggatgtgtagcagcatacattgtggaaaggtgaaaaggttacatgtaaaaacaataaccataaaacaaccagaagaaaatagtggcgaatatttagtttgatttttgggttcaagtgattctcctgcctcaacctcccaagtaactgggactagaaaatagtggcgaatatttagtttgatttttgggttcaagtgattctcctgcctcaacctcccaagtaactgggactacaggcgcgtgccaccacgcccggcttatttttgtatttttagtagagatggggtttcaccatgttggccagactggtctcgaactccttggccagactggtttcgaactcctgacctcgtgatccacccacctcagcctcccaaagtgctgggattacaggcgtgagccactgtgcctcgcctcttttttttttttttttttttttttaacagatagggtttcactctgttgcccaggctggagaacagtggtgcaatcatagctgattgtaacattgagctcctgggctcaaatgaccttccagcctcagcctcctgtgtagctgggactaacagcatacaccaccatgcccagctaattttgtgtgtgtgtgtgtagaaatgaggtcttgtcattttgctcaggctggtctccaatgcctgagctcaagtgatcctcccaccttggcctcccaaagtgctgaggttccaggtgtgagccaccactcccagcctgtagtctaatcttaagttaggagggactttctaaacataaaagcaaaggaagaaatcacaaatgaaaataacaaatacagcagaaaatgttataaatgaaacaaatgtaaatgagtgaaaaaacatgtgcacagcgtagcacagttgacttgacacaaggtcttggcaagggtcttctgagtaacagcagcagaaaaggaaaatgagccccttgagagcaaaataggccacaggcacacggggaagcgcccgaaatacagagcgccgataaagacagagatgttcactctgataatcagggaaacactaaaacagactgctttttcctgagagattgtcagaggtcatggttttgggaggaacacgaagacaggtgaggagtgctgcgccttgggcaggtcaggtggggtttggggctttccaggggcttttagtgggaggtgatgggttgtgggggttttgtaggcaacaaagagaggctggcacccaccacagtggctttctgtgtgaggggctgcctggcgtgtggcaggcctggcgcagctacccacacacctgctaccttgtagatcctggagccaggccgcagggagcggctgggtctgaagatggccaacgaggccgctgccaagaaccgggccaagaagcaggaagccttgcggagagtgacggagaatctggccaggtgaggggccgcctggctggtggggaagtgcgagggtggctctggcctgctcctgttcggcccctgccctgaccgtgtggaggcatggcccacgcggcagagtccagggcaggtccgcggggttctgcagtgggtactgtggcagctcctctatccagagcatggccgcacatggacaggatgagaggccccctccatcttctctttcctccacgtcctctttgacccgtccctaagaggcatctttaggcgtgtggtcctgctgggagctttcatcagccctgtggagagagtcatcgttccccttggagaggggtggggactccaactctcagaggcctgggggtgcaccccagcccccacagccaagggcggtgctgctgtttgacctcaggtttgacctgagcgctgctgtttgacctcagggatcccccgcatttgctgccatgctggcagtaccatcctcctcagctcagagtgactgtgtctctgcccaggctcttcctgggagccaagggaggccctgctgccggcagctctcagcccacctaaccctgcctctctcacccattcctccaccccagcctcacccccaaaggcctgagcccagccatgtcgccagccctacagcgccttgtgagcaggacggccagcaagtacacagaccgggccctgcgggccagctacacaccatccccagcacgctccacccacctcaagaccccggccagtgggctgcagacccccacaagcacaccggcgcctggctctgccacacgcacccctctcacacaggacccggcctccatcacggacaacctgctgcagctccctgcccggcgcaaagcttcggacttcttttagagccaggcctgggctgggctcatagacgcttcacagagcctgcagggcagctgtacacccagcagaggactccagccttctcggggcccaggcctgggccagaagctgttgaccataccaggagtcactggagaaaggggctgtgctggggccagactggcacaaggcactcgtgcccacaccacaccccagggccttgccaagctgtttgctgtttaattggccccttgaactgtcattaaagaacacctaggtacagtctggggggttgcctctccatcttgctccccacacgagccctagccttgccctggggcctgcatcacgtctcaggactgcggggcttgaagcgaggggccccccaggtgaggaagctgcaggtggggcggctgtgggagcaccgggtgactggcgttgctttctgcggcactcggaacctgtgttctgagttgagctcacatcctgcagtgctttctgcttctctggggggatatgaaggagaaacggagcccttggaagttgtacccttaggttcccctgcggttctgggcccaggtctgcagcctccactctgggcttgccggctgtgaggtgcgctggttataggactgtgtgggggctgcatatcaggtgatctcagctatcaccttctcccagcacctggcttccagctcatggggtgggactatcccactcacccctctgctataggcactgcccatcttatgctgctggccctggcctcacctggtcacttccaccaacaggagctcccagataacagtgggttgctggacagatcaggctgggactcttaaggggtgggggacgtggggccttcagtgctttatcccctaggaaagggtgcacgttatcccaagggagcccccaggaagtggggagggaggggggaggagcatgtctaggtgctgaccacctggagcacttggccagcaagtgggccgcatgctttgggagcaatgggtgacccagcaggaagcacaaaagaccggccagtgtgccatcatcaagggctgctgagcagcttgaagagccactgggtggggagggcacacggggaggtctcagctggggctgcccctggaggacagggcagggaacttgagggctgaggacagaaatctcacatgactccaggaaatagaggaagaggaggatgctgagcgagggattgtgagggagtgggggtaggtcagagggggctgaactgcaggaagccagggggagtcgtggaccactggagctggccagccccagggcattggggacaaggccaggtcagagggagacagtgtgggcctggtgggtggaccctggcagaggccctcttgtcccccacaaggccaggccacactgtgattctgcctgtacctgagcatctgtcctgtgctcctaggccggagaccactgtgtgtcaggtggggcggttggctgagtcccagagaaaaacactcctcactgggcactcttgatgcttgcacacaccctgtggtttatttggtggtcagtaaggaacgtctttgctgctaagtggaagaaagctaatggaacgtaatcaaaatagtggtttaattgacgaattttacttgcacctgtgccttcttcagatcctacctgcctacttagtttacgtgaaggccgactgcaccatgccccccaaccccgacccccaccacacacaacggggccattgtcatgctaggtgcttgctttccccacctcagctccggagatgtgatggtctttggccctggaggtctcggccagcctgtcctccatcctgttctcgttctcgggcaccaccagcagccggtgctgggttttggctccaagcttgtggtcgggccggtggtcgggcctcaagcctgtcttggtgtccagtttgcactcagcgcggtacttgccctccccctccctcttgaaggaggcagaagacgtggctttgggcttggggggctgcagccacgagtggctgaggatctcatcgatgtggagccgctggctgacgtcgggctgcagcatgcggtagatgaggtccttgcactcgcaggtcaggttcttggagcgcgggaagtccacacggtgctccttctggatacgcagcatcttcctgatgtcggagtcgtcatagggcatggagccgcagaccatgatgtacaggatcacgcccaggctccagatgtcatacaccttgggctggtaggggatgctctgcagcacctcgggggctgcatatgctgccgacccgcagaaggtcttgctgaggatgatgcgcccattgctgtcccgcaggcagcgcttggagaagccaaagtcagacagcttgatgttgaagtccttgtcgaggagaaggttctcgcacttgaggtcccggtggacgatgtccaggtcgtggcagtacttgacggcggaggagagctgtcggaacatcttgcgtgccacgtcctcatgcagggctccctggcacttgatgaactcgaggaggtcgccctggacgccaagctccatgatgatgtagatccgtccgtcagaggtctcaaagatctcgtaagtcttgatgatggagccgtggttgacagttgccaggatgtccatctcccgaggaaggaatctctccacaaagtcagtaggtgttttcttgcggtcgatgatcttgacagccacattgaacttgaggcgctcagagtaggcagatttgacttttgcgtaggaacccttgccaagattgatgcctacgatgtaacccttcttccttaggactgtggcatcgtccatggtgccaggagcgactggcgccgctgccgtctacatccccccgtcatgtgggccagcaggcattgtcctcatttacactaccggaggcgtctggctgggctgccctgggctgggcttcgactcaggggtggaacactcagcattgtctccgggtgacttcagccaatgaactcataaagccaaggagtgggggcggggactgggctgagggagaacagggtctctggaaccgtggaagccaggctggtctggcaggagcacccactccccgcccgctggaaggaagcctgtccccaggacaggactctggtggccctgctgctgctgcattggtttccctgtcacaagtcaagctggaggggaggcggcccacgtccagcctgtttgcatcacctggctgtggggactgaccctgcattggtctttgtcccactagggtgggtttcctgcagcttctttggctatgaagaaaagcacccccagggctgtgtccttggtgtggtaggacagttgtccctgacagtcacccagacaggcctgcatagcaccccagttacacagacagatttccacagcactgccttaccattgagcacatagttaaatctagggaaatcagtgcccagacatcaaagctagaaatgaaacatggtcagcaggagccttgcatgggcttctcttttgctggagcaagccaaaataataggaacggttttacattcctagtgccaggacccatctcgggtcgacaaaatctgaagacaagttaagggaacaggcagctgtttgaatagatcaattggatagtctaaggcagctctctggaccaagctgtaaaggagatacaatcgaaataatcactccggtaccacagtagacaggccttgaaggcactgggccccttttaatcggacttagcaagcattttttttgcctctgaccttctccttggaacaaaattagttaccagtagacttaggtgattgctgtactgcatgtaggcacataaccccaacctatataaacagtaagaaaattgtagcactttgagttggtctgctggaattatctccagccttctccctgtatccagttacagtgataaactcccttctttccta

SEQ ID NO: 1180 - DNA, 14768 bp, Homo sapiens
gcgcgcgccccaccgaccaaaatggcggctgccgttggtgcggggtgcggtttgtagtgctgttgccctactcatccctttgcaaaatgtgaaagaagaagcggctggtggaggcgggccataggcaatgagtcggcgaaggaaacatgatgacagccctagcccgaagaaaacgccgcacaaaacagtggcggcggaggaatgcggctcggtggtcgagccagggaggaggcggctgagatcggcccgcggttcgtggccctgcggggctagagaggggcctcccgggccagtgcggcagcgagagcagcctccgaccgccgccctgtgcagtaaaagtaaccccgagggtgagacgtcggcagcgcggcctgccttggcttcggcgccgcatccccacatcccagcttgcaacagggaaatctggggtgggggtggagtctggagcgtgtattctgtctctgggattcacccctcgagagtccaaaaataatcctataccactccccgatgggcttttgtccccgaacttcagcactaccccgttaggtttgaccatccatttgcctccgccacaggaataggtaatgtggtttacctgtttgcgggagggcggctgctttccaggctgctcctccagtcagcagcagtggtggagtgagaagaaacagctgataggcccgctaacctcagtttttgcccggagaagttatttctctttaaaccctttttttccctgtgacctgctttagagaagagttcataggaaaagttaaagtttgtctcaaagcctggtagatgtctcacctcattgtgaataaaccggaagttcctgtgtgtaacatccctccaaataagatactaaggatctctttcgtctcgattagttttaggtgttactttttaaaagacttctagtaaatcttagttggaactgaaactcatacaaaagcctttattctggagcatgttcttgaaatagtgcttttttttttttttttttttttataccttacgtgtcttttttcttttgggaaagaatctcgccctgtcgcccaggctgcagtgcagtagcacaatctcggctcactgcaacctccgcctcccgggttcaagcgattctcctgcctcagcctcccaagtagctgggactacaggcgtgtgccacctcgcccggctaattttttgtatttttggtagagacaggggtttcaccgtgttagccaggatggtctcgatttcctgacctcgtgatccacccgcctcggcctcccaaagtgctgggattacagccaccgcgcccggccaccttacatgtctttaataatactcctataaagcaatttgggaatgaacaaaaatctttataaaaatttgaaagtgattctagacaaaaattcccaagcattggatcactaatggtttttgaagaatggcaattaatgtagattagatagagttggtgaaagggggctaaacatatttaggtttctgttgggttactttggatttttgaatgtacctataaattacagatggttccccaaagcctccaagactcaatggtaataaatagaatgacttaggttatacagtattgtattatgcattcataaagcttctggattatctagaagtgtttgctatttacaatgtgaagtttgcgaagtgccgcgtggatttttatgtgaaacaagcatttctgttacggttcaggtaattatctctgggaaaaaaaattatcttggactataaaagttagtctcagctatttgaccttggggtcttacgaagtaaggtaatgctttaaaatgcaacaattgttattttactcatattttatatagaaaggtatgaaacaccaaagagagcgctgaaaatggactcactgtcatcttccttcagttctcctaatgatccagatggacagaatgatatcttttgggatcagaattctccattgacaaagcagttaggtaattaattattaacattttttatgtgagtaaatatttgataaatgattcagatttaactagaattctagtcagataatagcatcgggaacctctgagaatgttatatgattttatctgtataagtatgtgatgtaaacacataatcctctaagctgcactaaataaaattactttctaagaagtgacagctgttttttaaaatggagggttttttgtttaaaatttatagaaatgtctttgtttctttaggtaaaggaagaaaaaaacagatttacaccacagatagtgatgagatttcacatattgttaatcgtattgctcctcaggtaaatatcactagttttacagtttgttttaaaacagtgaagaatgtgccactaagtttttgtagtttctttaaatgaaaagtattgtctattataattcttttttccaaaaataaggcagcaaagattactgttttgccttttctacttttgaaatacatattttgaaaaaaggaatataatataaaatacaagatattttcttaagtatatatcttgttttaattttttagagtaatttttgactagggcattgtgtttatctgtaatgttgtgcttaacaacatacgacatcatttttcaagttgctaaaataatagaataaggcagtgaaaaaagtttatacttctatgattgttttgtgattggtacttcctgtctgtaacatttccccattgaaactattaatactcatttccttataagattatcaagaaacacttacaaaagtggagagcactgaattcaaatttagtcctcattcaacctcctatgctgtgtgacccagtgcaagttatttaaactcccaccacttcagttcattcagccatgaactagaattattgtgttgctcttgctgtcttcattggatcattatgagaattaaactagataaaaattctttgtaaactatagagtgctataattgtaaggttacgttaaggttgttactgtaatagaaccatctccaaagcttttttttcttttcttggacaggcatggtgactcattcctgtaatctcagcattttgggaggaaggctgaggcaggaagattgcttgaggccaggagtttaagaccctgtctcttaaaaaaaatttttttttgagtgtttcgtttctttttttcatttctgttcttttattgtttgagtgaaatagaaatatgttcaagtcaatcatttgacacaaagcaatccagtaactctaatattataattactaagaagcaaaggctcaatacgtgaaactgttctgaacttctttactttttgttctctttttcttatttaacatttaaatccagagaacatttttgcttagtgtcttctctgaaggaagtatgccatttttccttaacctgcgcttgaatagttactatatgttgaccataaacaatagatggcactggcccaaaacatggtttgaagaattactgtcacccaggtggaagagacagaaaatgaagtttttcttagcagctataaaatatccaaaattacacctagcacagtcaaaacaactctgttgctactagctctacattccatttttagcatgtcatagaaattcattttacttacagttaattagttaaatagcatttatgccataatagtacttactctataagttaacaatagatcttcattaattgtgggtttcacatgaaagaagcataataaaatgtgtttgggtgggccagtctaaatagtgataaaaagatagttgtgaataaattattggactctttacctaagtgggctagaaataatagctcatataaagaaatgacaacagtacgcaagtggtaacttgtataaaagaaaaaaatatagtgaaattagtagctttaaaatgttaccctcttaaactgagtacttttaaagcatataaatctttagcagtttcaaggtctgtttgaaagcttgtcatgttctcagaatgacaaatacttatattgtttatttttaggtgagtcattctcaaatcatttagttttaacattttcagagatagcatttttttaaatatgcgcttttattttggttggacagtcagttcactttttgcagggatacttttatacaatgttgtttatttgaagatggtatgtatcttcatttatacagctttgcacagtatactttttataatgaaatgaagtaatgcatttagataccttatacagcacctggattatggttgaaaatcaataaattatgtaattattcatgaagaaatatgtaataacatgtataaatagtatacaaacatacataggacccatgtatatgtaaagttgggtacataaagtcataatttagttctctgaaaattgaatgaatttaaaattacttttgtaaatggcagagttcataattaagactatgattgtctttaaattcaagattgttgaaataaaagggaaaatatattgagtctgaaagtgaaattactgattttcttgagtatttgcaaagctaaaggcaactaggttcaagttgacattaagaaaacttttttgattcattgaggatttgaagtaccaaactgtagggatcttttcacctaaatcttctagtaaataaatgtatactgacactggtatgcccaatattgtgctggatgctgagttattctaagaagagtccttgcctttgagtagcctataatctagtagtaaaattattttttaaattgtgtgatatttatgttcattctaggtactataaaatagagtgaaaatggttacttgatttgatttgttggtttggtttgcaattaatgcctaaagctcattctgtaatttttttgtgtgatcaagtgactgaaaggtacagcaaaagtatccaggtctaaaatgccttttttctgtatattatctgggctaaacttttctgttttctctatttttttattcttattcctgtctcattcttagcatcagttctaaccttgctcttatctcttaattcattcctgatcttaattctgagtgttcttaatttaggtcaacatggattgtccaactttagataaagattataataaggataaagaaaatttggagaaacagatgatacagaaagaattccatatgtatctcctctcaattctgatgatttctgccacacagtttctgacactaatgtttttataagtatcttaggacaattaaaatgtcaattttcttttgataaaaacatgcttctgttattaaatgtacatttgataaatttaattcttaaaacaatatttttttaaaataagcaatttgtaattctgaatgttttcattctctgaaacataagtggatcaattattgtagcttattattgctatctcccaacttcctattgtttttgagtttggtaagtgttacctcaccagaatttaggaaattaattcaaaatcattagtttttattgtcttttttctttcttttgtttttttggaagacgggggatgctacactggtactttatacctctttttttccctatctgccaaaggatgaaaaaccaacaacaaattctatgctggacatgtggattggtgaaactgctattccttgtactcccagtgtagcaaaaggaaaatcaagagcaaaaatcagctgcacaaagtaagttaagacttttcagcttttctgaaattcagtgaagcaaatattttttgataatactccattttggttttgtgaatatatcaaaatttttgttaataaaatttccacagttttgatctatcaaattttggagttaaaataattataactgttaaaatcttagagctttaacatcaaaatatgttaaataacagttggatataatgtttcagaacatttttagttattttttaatcttgtttaataggttaaaaacacaaagtcaagaagaagaacttatgaaactggctaaacaatttgataaaaatatggaagagctagatgtgattcaagagcaaaacaagaggaattatgattttacccagatgatttcagaaacagagattttaagtaattataaagataatatacagatgtggtcattacataatatagttcccgaaatagataatgctacaaaaaagccaatcaaaggaaacaccaagatatctgtggcaaataatcaaaatagcagtcagaagccatttgaccaaattgctgaagcagcctttaatgctatttttgatggttctactcagaaatgtagcggacagttaagccaagaactgccagaggctttttggagcaccagtaatactacctttgtaaagacaaatgctttgaaagaggagaaaatcattactaatgaaactctggtcattgaaaaactgtcaaataaaaccccacgatcactttcttctcaagtagatacacccataatgacaaaatcatgtgtgacttcctgtactaaggagccagaaacttctaataagtacattgatgcatttactacaagtgattttgaggatgattgggaaaacttactaggtagtgaaccttttgctatgcaaaatatcgacatgcctgaactctttccttctaaaacagcccatgttactgatcaaaaggaaatttgtacctttaatagtaaaactgttaaaaatacgtcaagagcaaatacaagtccagatgccaggttaggagattcaaaagtattacaagatctttcttcaaagacatatgacagagaattaatagatgcagaatatagattttcaccaaattcaaataaatcaaacaaattatccactggaaataaaatgaaatttgagaactcttccaataaaattgttattcaagacgaaattcaaaattgtatagttacatctaatctgacaaaaataaaggaagatattcttactaactctactgaagcttctgaaaggaagtcagctttgaacacaaggtattctaatgaacagaaaaataagtgcattttaaatcagtctattaaagcccctgttaatactgatctttttggctctgcaaatctaggcagtaaaaccagtgttagtaacccaaatcagactagtgcatcaaaagtaggttctttctttgatgattggaatgatccctcatttgccaatgaaattattaaagcatgtcatcaattagataatacctgggaagcagatgatgtagatgatgatttgttgtaccaagcatgtgatgatattgaaagactaactcagcaacaagacattagaaaggacagtaagacatcagaaagtatatgtgagatcaataataattccgaacatggagccaaactaactcagcaacaagacattagaaaggacagtaagacatcagaaagtatatgtgagatcaataataattccgaacatggagccaaaaacatgtttgctatatctaaacaaggaagtaatttggtacaatcaaagcatttgaatccaggcagcatttcagtgcagacatctttgacaaatagctcacaaatagataagccaatgaagatggagaaaggggaaatgtatggaaattctccaagatttttaggtgccacaaatttgactatgtattctaagatctcaaactgtcagataaataatctgcatgtgtcttatactaacactgatgttccaatacaagtgaatagttccaaattggttcttccaggaagttcaagtttgaatgtaacttcagatcatatgaatacagaaattactacttataagaagaaattgagtactaatcagccatgccataagactgtaacagatgaagctcagagcaaccttaacacaacagttggattttcaaagtttacatttacaaggatgaaaaattctcagattctttctcagtttaatcaaaattgtataactggaagtatgtctgataccaaaattacacagggtgtggagaaaaagaaaggtgtcaacccattactggaggaagctgttggacagcaatctttggtgaaactttctgaatctttgaaacaatcttcaaaaggtatgtatgaaatatgaaatagttttctttgaaaagcatcttaaaaagtagtaaaataattatttgttgtttttgagtgtgagtaatgtataaggtaaaactattctatgactagttaattttaagaattaactagaattcttaaaatgatacttggaaataattatacggcattatacagagtagttggtttatttttcaaaatattacattgaattctttcccagcacttaatacaatgactggcatatagtaggtactcagtaaatattttttgaataacttattctttcttggaaaatcatacctttagatatatgtattatagtgttcattaagattgtatttactaaattgttttaaaacttgagtaatctgggaagcagatgatgaagcagtgaggtaaataatatttagaaatttagagcattctaattaaacgtctttactagtgtgatatttgatataaacgtgctagcggtgatggttaaaattatgatttacttatttgataacagctatcatttctgattcttccaatttctcttttccccaagtctccattctatcaataagtttcattctttcaaaaaccgtatccccagactccatttttctttctacaacaagttaacatttcttgatgagactactgcagttcttttatctatctcctttcaattcttatctccaaacagtggaatagccttttaaaattggatgggcaaaaatggcgtttctatgcttaaaacaaccttcaatggctgcccgtcatatttcaaataaaatccaaactgtatactgtgaccaacaaagctgtggattatctctctttaacctgcgtctcctcttttttccttacctactaagcttcagctataccagctatcttttagtttttcaaacagtgtatgtttttcttccttgtccaggaacttagaccgtgctcttccctttgactaaaactacttcttttcaacatgtgaccccttccccactcttttgttggtgctttcttacatctcagtataagtactactttctcacagaggccttccttgaagagtctataaatagatctccttgtttattttttatttcctaattgctttcatcacaagttgaaattaaatatttagtgactcttctctgtcttgttggcattactgttccaactttcctatctaagtgactttttttaaaaatttacaatagtaatatgctagttatttaaaaagaaaagtaaaacagtatagaataatttaaaggaaaaagttaagtcttctgtttctcctttctgataaccatcccttacggaaaaccactattaatagttggtatgatgtagcattttctatgaatataaaaagatatgtgtgtgtgtatgtacgtatatatgtgtatgcatatatatatacctatagatctatttaaatattaataaatctgtatacccactatttggcaacttgcttttgccttaatatattatagctgtcttttcctattagtacatataaatttattttagtcctgttaatgactatgtgatatatatggtggatgtatcataatttaactgtttctctgtgatggaagtttgggttggttgcagtcttttgcaattacaaacaatactccagtaaatatccttctgcataaatttccgcatgcttgtataattgtatctgttaattcctaaaaaattgctacaagaggaagttttaaaatttgatggataccaccaaatttctatccgaagcagttataccaatttatcttatcaaaacttacagtaaataattctctacacccaagggtgtccaatcttttggcttccctgggccacattggaagaattatcttggatcacacataagatacactgacactaacaacagctgatgaactaaaaaaaaaaaaaaaaaaaatcacaaaagaatctcataatgttgtaaaaaagtttatgaatttgtgttgggctgcattcaaagccatcctgggctgcgggtagcttgcgggctgcgggttggacaagcttgctttacatgatagcccaaactagatattttgaaatattaaaaattgttctcaatctataataattttaagtatttaaatttgtattaaagtgagcatattgtaactaaatcaagcatgttcctagcatgactttatttacagatagagttgacccttgaacagtgtgggggttagaggcgctgatctgatttgcagtcgaaagtctgtgtataacttttgatcccctaaaaacttaactgctaatagcctgctgttgaccagaaacctttccgataacataattaattaatacatattttgtatgctcttatatgtattatatactgtattcttacaataagctggaaaagtgttattaagaaaataaggaagagaaaataatatttactattcattaagtgaaagtggatcatcataaaggtcttcatcctcatgatcttcatgtctagtaggccgagaaggaagaagagtaggagttggtcttgctgtctcaggggtgtcagatgcagaaaacaacctacaaatgagtggacttgccagttcaagcccatgttgttcaagggtcaactatagttataattctataaaagactaaacctcctggagtatttgagttttcccaaaactcctatctaccaatctatctgcattttttatggataatctgcgttttagcttaccttatcaatattttctttaaacttattgatagtactgaatctcttaattactattaactttgttgatgttttctattgtttctacttccttttactttggtatgtagcaagctgctctccagggaagtatctctgaaacaaaactcacttaactcccacatttatttcaggcaggagttggcaaactatgatctgtccaaatccagcctgcagcttgtttatgtatagccagcacactaaaaatgatttttacattttaaatggttggaaaaaaattaaaaggagaataatatttcatgacatttgaaaattatatgaaatccagatttcattgtccataaacaggttttatttgaatacagctcatcagttatttatacattatccataactatttttgctacagtggtacaggtgagcagttgcaacaagatactcaaaggttaacattcttgctttctgactctttctttacaggaaaaaaaaaaattactgacccttgcactgtaagatcaagattaagaagagcagcttttgcttagtactttacaatattttaagacttcattgtgtatttttattatagattgagttaaaggaaagactgatgggaaaaatggatgagtccctaaatcaaattttcatggtgtgacctgattatcatttgaaattattttctataatattgccaagcaaattgtaagaccaactttaggaagttatgttttctgctgttacagattattaacctgttttctttccacacagtcaaattcagtgtaaagtctttggatgtgtagtctgagtttgttgtgtttctcagctttgagactaaaagtattagataattagtcaagctaattagaaagtatcttctggtgtctctctttaggaaaaaatatctacagtctgttaggtaaatagcttaggaaataaaagccatcaaaatcatctgggaaacttatttaaaatatgtatttcttagcctgaataccccctcccatttctgattataccaagaaaggaaagggaggcagattatatattttgaaaatgcctctgttagttaacaagagaaatgtctcataaattgtgtatctttttctaaatgtcagaataaatgatatacttaaatatgtattagggtgatagtcttaaacttaaaatatcatttaaatgagaaagtgatttctaatacaaagcctcaacttactaagttaattgagattattttaaagtttctccaaaatgcatcctccaaataaaaatataatttctgacagtgaatcacaggtaaccagtttgacatgacagatttcattttatcactctaaaatatatttcctcagtggatgaaatgaaaattttatagctctatagggaaaagtagatgtgaatattaatataacatcttatgtaaatatacactgtttgagattgataactaatttaattccttatattttgactattttccaattaaagtttacataacattttaaatcccaatgtatcctttttaaagatatatttattcgtgggtcatataaattagatgtcattgtccacaagaattatttggtgggtagtcagttttctatcaaactgaattttatcacactgtgaaaagaatgtatcaaatagagacagatccatcagtgcttgattttcttttgaactggagcattatatctgtattatgtacttagaattttatattcagtagtttagtttgatttaatagccaactaatatggcaaatctgggtgattaaaaaaagcaaaaattaaagcacatattgaatgactttataggctataaaagtaaaactcatcttttgttgaatttttagaggaagaagagaaaaatagaaagtgttctcctgaagaaattcagagaaaaagacaagaagcactggttcggagaatggctaaagcacgagcctcatctgtaaatgcagctcccacttcatttctttaatgaaatattagttggaagacttcacgaagactgctgataactatctgtgattgataggaaattttttttcttgatttctctgtgagaaatgtaatgctgacttttataaagcctggacttctactttatttaataaatcaatgtttgcaatggtaaatgaaacatttccttggacatgtatttgaaagtcattaaatacaaaagttttggaaattcaggaaagttagcaattatgtacggatattatacagaggaaagtagttatatttttaaatgctattattgcagaggatcatcaaaaaagaggtaatctacgttatttcctattctaatgtcttttcctaataaaaaacttcaactttctaagttagtagagactgtttttgtagttttactttcattaactgttgcttaaggtttttatacacttccagattttaattaatactttcatatttctaggaacatggttgatatgaaataaaggactttttatttgtaaggaaattatgttcagttcttagaagtggatttgaattttaataattctaaaatgtgacacattttggaaactttccaccatatttaggaaaactttgattttagaagtctaacatagaggaaaagaagtagtggattgtctacaaaagtaatgtggcatcattaacatttagaactggcagaaacttcatatgtcatctggtccagcttccttattgtatcggtgagaaaaagtaatactgttttcaaagtcataggcaagttaatgctgtgctacaattagaatgatttatttggacacctaaacaattatactatttgtttcaaagtatcagtacataaaataacttgagggagtattattttctagtataaaacaaaagatgtaattaaaagcacaataaggactgtttgataataatgctcattgttccttattttgctttaaagaattagtctttccaggatataaaaatgagaatcttttttcttttcagtttttctgtaactgtaattttcccctcaattaatttacttagttgactcatcttttcttctctattactgttttgtttttttctttttttgccattttgcctatttggaatttgctaaaccagtaatagaagtccaactagagggcgtaaggcagggaggatgctttattcctcttaaatggttttaggagatctagagaaagttagagatatgaaacacctgtcatggtgtggcatttatcactatcaagtgtctcaaagctgtgataatatggtagttactgccctatagctatacagatactcctcaacttaccgtgtagttacatcccaataaacccatcatgagttgaaaataccttaagttaaaaatgcatttactacacttaatctaccagacaacatagcttagcttagcctaccttaaacatgctcaaatcacttatattagcctagagttgggcacatcatctggcaatacggcacactgtagagtatcagttgagctgatgcccagcatcgtgagaatgttgtaccacatatctctagcctgggaaagaatcaaactttaaagtatggtttctattggacgcatatcacttttgcatcacgttagagttgaaaaattgtaagtcaaccattttaagttggagactgtacatcaaaaatggtattttcatatctacagtggagtactggagtttagctaacctatattatttttccaggaatatataataacctagataaatgcaagtagtttctatgtacaaaaataaagagctgagaatcttttactaaaagtggcttcactgtgttctgactatgctttggatatctctgtccttgcttaagctcctccctgcttactgcttgcttttttaagagtacttttagcctattctgttcattcatttagactcagcctaataagtctgtttgaacctcgtacctaaccatcttcactggaattgattgcttctctctgatcataatggtactaattattgtgtctttcattgagcaatactataatgcctttatgtgttgttt

SEQ ID NO: 1181 - DNA, 20512 bp, Homo sapiens
cggctcctgcaggcgctcggcctccgctcattcctgaccccgcagtgggcgcgatggcggaggctgtactgagggtcgcccggcggcagctgagccagcgcggcgggtctggagcccccatcctcctgcggcaggtgcgggtggctggacctaggaggggactgctgggcactaggcggcagcaaggacggaactccggggtctcttaatagggagagatccggggggacccacgcctgcatcttgcggaaagcggggtggaggtttagggctggactcttgggtcctttaaaggtgagtggtctgggggcctctgggcttggggccagacccctgggtcctctatgaaagaacgtgctggggaccctgattttgggatgttaggaagttggaactcttttgttctgataggggaaggtagtggggctccggactcccgactcccggggaaagagtgggctggggtttctgcttctggatcttaggaagaggatagggtcagtctggactacttggcctccagtgggtggaagtccggttctgcgccctcacctgggtcccccgttcccagatgttcgagcctgtgagctgcaccttcacgtacctgctgggtgacagagagtcccgggaggccgttctgatcgacccagtcctggaaacagcgcctcgggatgcccagctgatcaaggagctggggctgcggctgctctatgctggtcagtccggggaccaaactcatggatcccagcggggctgggctgcagcgtcagtggaatgggaagctggggcccagaactcctgagtctgagggagaaggatctgggctgggactcccaggtcctttctgtaccctccggacctgtccctcctctctctcccagtgaatacccactgccacgcggaccacattacaggctcggggctgctccgttccctcctccctggctgccagtctgtcatctcccgccttagtggggcccaggctgacttacacattgaggatggagactccatccgcttcgggcgcttcgtgagttgggtgctgggtccccaagagggtggtggcctggacttcttaaacttaagggaagaggggactgggggcctgggatcctgagtccttggggaggagggacctcaggacctgggtttctgacccctgagctcatatttctgggaggggggcaccataaacccaggtggggcactggggcaagaggctctgggcaggtggggcactggcggaactcctaagtcaacagcatttaaggagtttccttcctaaagcttaggggcagccctttggcctggcatgcatctccataaaagttgattaggggctggaattctgagggcagggctgagaaggaaagagacccagtcctgtcttgcggaaacctccgtttgaggaaggagcatctgggtgcttagaacccggagcccaggactaggaaaaggacggtgaggaccctggagtgcaacatttaaggaggcactcgctctcagggtcctgtaagtgcagggtccgcacctgtgagtgagcgcctccttaaatcttgcaccaacagcctcaccctagtcctagccctgccgttgcctcacactgggaagtctaaaggttcctgccttcctcactttatttgccacaggcaccagcgggtttccggccagaattgcaaccaggccgaaggagggagggccaggggagttgccctcagagagagggaaacagctggcagggcattcttctgatcaattgctaaagatgtataataaagtttggctgactttggggacagaatgtcaggtgacagaagacagcctccaggttagagagttttgccaaatagggacagttcatttgagtcagagtgtttagaggaaatgagggctgtgtgtgggaagagagttcagctacaatggttacagaagctttatttcaagcctttctctggaagcaggcaaaaatgcattgtacatgtatgtacattgtacataataggtgctaacaaacatgtcttgaaatgaacgaagggtttagctatggtagatttagcttcagtgttttttttttttctttctttctttctttcttttttttttttatttgagactgggtctctgtcacctaggctggagtgcagtcagccttgacctcccaggctcaggtgatcctcccaccttagcctccctggtagctgggaccacaggcatgcaccagcacgcctggctgatttgtgtatgttcttgtagagacagggttttgttatgttgcccaggctggtcttgaactactgggcacaagtgatcctcctaccttggcctcctaaagtgctaggattacagggcttctgaaagtgctgggattacaggcatgagccactgcacccacccttttttgttgttgttgtttgtttgtttgtttttgagaaaaggtcttgctctgtcacccaggctggagtgcaatggtgggatcatagcttactgcagccttgaccttctgggctcaggtgatcctcatgcctcagcctcctaagtagctgggactacaagcacctgccaccatacctggctaattttttaattttttgttgagctgtaatctcactatgttgcccaggcttaatagctttattgatataacccacataccatataatttatctatttcgagtgcacaattcaatgacttttagtatattcagagttgtacatccattactaccattaattggaaaatgtttccattactccaaaaagaccccacaccccttagccatcacccctatccttcccttttcccccctcagccttaggcaacttttttttttttttttttttaatttgagacagggtctcactttgttgcccaagctagagtgcagtggtgcgatcttggtttactgcaacctccacctcccgggttcaagtgattctcttgtttcagcctcccaaatagcagggattacaggcgtgcgccaccaagcccagcaaatttttttgttttatttatttatttatttatttgagatggagttttgctcttgttgcgcaggctggagtgcaatggcgctatctcagcttagcgcaacctcagcctcccgagtagctgggattacaggcatgcgccaccatgcctagctaattttgtatttttagtagagacggggtttctccgtattggtcaggctggtctccaactccctatctcaggtgatccgcgcgccctggcctcccaaagtgttgggattacaggcatgagccactgcgcccaggcacatttttatttatttttttgagacagtcttgctctgtcacccaggctggagtgcaatggcaagctctcagttcactgcagcctctgcctcctgagcgcaagcgattctgctgtctcagcctcccaaatagctgggattccaggcatgtgccaccatgtctggctaatttttgtatttttagtagagatagggtttcaccatgttggccaggctggtctcaaactcctgacctcaggtgatctgcacaccttgacctccccaaagtgctgggattataggcgtgagccaccatggctggcttgtctgagattttggagatgggggtccatttttctctcctttatttttccttctactttaaaaaaatgaattgttagcctgggtgtggtggctcatgcctgtaattccagtacgttgagaggctgaggtgggcggatcacttgaggtcagaagttcgagatcagcctggccaacatggtgaaaccctgtctctactaaaaatacaaaaattaagcggtatggtggtgaggcacctgtaatcccagctactcaggaggctgaggaggcaggaggagaattgcttgaatccgggaggcagaggttgcagtgagccaagatcgcaccactgcactccagcctgggtgacaaagcgagattccatctcaacaaacaaacaaacaaacaaaaccgagttgttaacattcatggaatgaaaggagtccacatattatacatgtgtatgagtacttacccagatcccgatacagaacttgcccatcaccccagaagtcttccttgcctccctttctggccaatgaccgccctcctaaggcaccattcttctgatgcatttaaccacaggccggttttgcctgttctgacattataaacaggacttatacagtgtactcttttgtgtctggccttttttccactctacatgatgttggtttatacttggagttctttccttcttattgctatagagcagcagttggccacctttttctgtgaaggaccagatagtaaatattttcagtttttacaggtagtagggtctctgtgacagctactcagctctcttattgtggcatgaaagcagccacagacactgcataaatgaataggcatggctgtgttctaataagactttatttgtggcctctacatttggattttaggtcaggctcatgcctgtaatcccagcactttgggaagctgaggtgggtagatcacctgaggtcaggagttcgagaccagcctgaccaacatggtgaaaccccatctctactaaaaatacaaaataagctgggcgtggtggggtgtgcctgtattcccagctactcaggaggctgaggcaggggaatcgcttgaacctcccccgggaggtggaggttgcagtgagcccagatggtgccattgcactccagcatgagtgacaagagcaaaactccatttcaaaaaaaataaataaataaaataaaaaataaaatttggatttcatataggtttttttttaaatttgtttgagacaggctcttgttctattgcccaagctggtatgcactggcgtgagcatagctcattgcagcctccaactcctgggctcaagtgatcctcctaccgcagcctcctgagtagctgggactatgggcatgtgccaccatgcccagctaatttttaaacaattttttgtagagactgagtcttgctgtgttgctcagattggtctcaaactccaggcctcaagcaaccctcctgcctcggcctcccaaagtgttgggattacaggtgtgagccccatctagtttttacatgttactttgatagttttcaatgtgaaaaaaagttaaaatgattcttagcttacaggccttacaaaaactgatggcaggccaaatttggtccactggccataatttttgccctacaaaatgggcaggttgtggtggctcctaggctcaagcgatcctccttgcctcagcctcccaaagtacaaagtgaattacaggcatgagccactacaccctattttccttctgattattcagtttttggctaccacgaataatgctgctatgaagattcttctgctaatatcttagggaacattgtcatgaattctaaggactggattttctgggtcactgagtcgacaaatgtttaattttcatagaaactcccagtttcttgaactggttgttcatcttacataaaagatgggacaaatttaagtggtttcattgtagaatgagttttctttctttcttttttttttttttagagacagagtctcactctgtcccccaggttggagtgcagtggcacaatcttggctcactgcaatctctgcctccctctgggagcctcagttccctgcgctaaaacacagggtttatcacagcaccttcctcttgaggctgtttcaaggattagctggctgccttcaggatctccaacccagaggttccccttctaggtgtgaagcccagagacacccttgctcatgtgcacaaaagacagcaggggtgtagggcaggggacaaagtacacagcaggggactgtttaatacatgatgacgctacaaggcagtggatcgccaaaacaggagtaattcttttttttctgagacagagcctcactctgtcacccaggctagagtgcagtggcgcagtctcggctcactgcaacctccgcctttcggtgatccttctgcctcagcctctccagtagctgggattacaggtgcgcaccaccacatctggctaaattttatgtttttattagagatggggtttcgccatactgccaggctggtcgtgagcacctggcctcaagtgatctgcgtgcctcagcctcccaaaatgcagggattacaggagtgagccaccgcacctggcccaagttttctttttttaataaactgattgagaagtgaacatcttagctgccacagggtggccgaatcagaaagttaggtttgctgttaaatatgctggcttagagaagtactgctgaaaacactgatcccccaggtcccttagaatcagagagtctgatttaattgttctgggtggacacaaggaattggcatgttttaaaagctccaccattgattcttatgtggctcaagtgtgggtttcaatacttcctccttttaacattgtgaaacgagtaatttttcttccaacattttattatgaaaaatttcaagcatagagaaaagctgaaaaaaaatttttttttttttttgagacagggtctcactttgtcatccaggctggagtgcagtggtgcaatcatagctcactgcagcctcaacctcctggctcaagcgatcctcctgcctcaggcttccaaatagctggaactacaggtgtgcaccaccactcctggctagtttttgtgttttttgtaaagacagagttttgccacattgcccaggctggcctcgacctcctgggctcaggcaatcctccctccttggcctcccaaagtgctgggattagagtgagccactgcaccaggcttaaaatttttttttacagtgtacatctctaaccatccatcacttcatctttttttcttttgagatggagtctcactctgttgcccaggctggcgtacagtggcacaatcttggtttactgcaacctctgcctcctgggttcaagcgattctcttgcctcagcctcccgagtagcagtagctggatttacaggcgagtgccaccacacccagctaattgatttttaaaagatttttagtagcgatggggtttcaccatgttggccaggctggtctcgaactcctgacctcaagtgatccacctgccttgacctcccaaagtgctaagattacaggtttgagctgctgtgtccgacctattcttttttttttttttttgggtgggggtctcgctatgttgtccaggctggtattgaaccctggctaaggtgatcctcccgcctcagcctcccaagtagctgggcctacagacgtgcaccatcatgccttgctgtaattgttctattttattattagttattattgatttattaatgtgcctaatttataaattaaactctatcataggtgcgtatgtataggaaaaagcatagtgtgtagggttctgtactatctgcggttttaggcatccactccgggtcttgaaatgtatcccaggcagataagaggtgtttactatagttttgagtaatgaagggaaagaacttgggaaccaaatggaaaagaagctgagagcttacttgccaccagggggcagtgtaggccgtgggaactccaaggccagcaagctgaatgctttacaggattccttctgggttatgtttctttgatgggggtagtttcaggtttagctgctgcaggcaacagatgaaagaaaagctctggggatgtgtcacagacatgatgcatcatggaagggaagaatgaatttgttgaaagaatttggggttaggcaggctgggctgttgcggaaatcactcgacaagtttcagggacaatgaaggctgctttaggtcaagatgttatatgttccccacccacaatttcttattttgaattttttaaaatctacattgaaataatagtacaaaatataacaatacacaagcacaggccgggcgcggtggctcacgcctgtaatcctggcactttgggaagccgaggtgtgcggatcacccgaggtcaggagtttgagatcagcctggccaacatgatgaaaccccgtccctactaaaaatacaaaaattaaccgggcatggtggcacgctcctgtaatcccagctactcaggaggctgaagcatgagaatcacttgaacacccaggaggtagaggttgcagtgagacgagatcgcaccactgcactccagcctgggccacagagcaagactgtctcaaaaaaaaaaaaaaaaaaaaaaaaaaaaaacaagcacaaatttcatcagccatcagagcaattatgtcactataggtcatgaaacttttagaaccgcgcccctctcccccaaatgtttttggggaatgcgagtgaaaatgggcaaaaagtccaaaaatcgttttgattttgcagaatgtcagggttctctaggctatactttgagacttcctcttttacaaaacctttgtcacgtctaacaaaatatgcagtaactttttttttttttttttttttttgagacaagagtctcgctctgtcgcccaggctggagtgcagtggtgcgatctcggctcactgcaagctccgcctcccgggttcatgccattctcctgcctcagcctcccgagtagctgggactacagacgcccaccaccacgcccagctaatttttttttttgtatttttagtagagacggggtttcaccatgttagccaggatggtctcgatctcctgacctcgtgatccgcccgtctcggcctcccaaagtactgggattacaggcgtgagacaccacgcccggccaatatgcagtaactttatatcattattaaatattcagctgtgttcagatgtctccaattacccgaggaataatttttacagctttttttttcttttttctttctttttttggtagagataggatctcaccatgttgcccaggctggtctcaatctcctgggctcaaatgatcttcccctctcggtgactcaaagtgctgtaattataggtgtgagccacggtgcccagcctacggctgtttttaggaaccaggatacaattgagcttagtgtttggccattatgtctatttagtctcttttgtgtgtgtgtttgtgttttctttttccttcttttctttttgttttgttttcttttttattatttatttattattttttatttatcaaaaatctttttggatctagaacagtttcatatccttttgccccaggatattgacttttttttttgagacagtctcgctctgtcacccaagctgaggatattgacttttgttttttgttttttttttttgagacggagtgttgctctgtcactcaggctggaatgcagtggcatgatctctgctcactgtaacctctgcctcccaagttcaagcaattctactgcctcagcctccccagtagctgggactataggcatgtgccaccacgcttggcatgcttggctaattttttttttttttttgaggcggagtctcactctgtcacccagggtggagtgcagtggcgtgatctcagctcactgcagcctccgcttcctgggttcaagcaattctcctgcctcagcctcccgagtagctgggattacagacatcaccaccacgcctgactaatatttgtatgttttgtggagatggggtttcaccatgttggcgaggctgatcttgaactcctgacctcaggtcatccacctgccttggcctcccaaagtgtcgcgattaggcgagccaccgtgcctggcttcggctaatttttgtatttttagtatggatggggtttcaccatgttcaccagtctggtctcaaattcctgacctcaagtaatctacctgcctcggcctcccaaagtgctgggattacaggcgtgagccaccgtgcctggccgcatttaatacatttaacctactgaacattataggttagcctactttaccttaaagtggtcagaacatttacattagcctacagttgggcaaactcatctaacacaaagccttgtattttatacaagagtgttgaatatctcatgtaatttattgaatactgaattgaaagtgaaaaacagaatggctgtatgggtgcatggaatatgatttctattgaaagtgtatcacttttggcttggtgcagtggctcatgcctgtaatcccagcacattgagaggctgagatgggaggattgcttgaggccaggagttcaagaccaggctggtcaacatagtgagagcccatctttactgaagaaaaaaaaagacaaatgaaaaaaagaaataaaatgtatcactttcacattattgtaaagtcaataaattgttagtcatcgggcacatcacacctgtaatcccaacactttgggaggctagtgtgggcagattgcttgatgccaggagttcaagaccagcctggtcaacatgatgaaacctcgtctctactaaataacagtacaaaaattagctagacacagtgatgcgtgcctgttatcccagctactcagaaggctgagacacaagaatcacttcaacccaggaggccgaggttgcagtgagccgagatcatgccactgcactccgcagcctgggcgacagagagagactctatctcaaaaaaaaaaaaaaaaaagaaaaaaagaaagaaaaaaaagccaggcatggtggctgactcacacctgtaatcccagcattttgggaggatgaggcaggcggatcatttgaggtcaggagtttgagaccagcctggccaatgtggtgaaaccccatctctactaaaaagacaaaaattagccaggtgtgatggtgagtgcctgtaatcccagctactcaggaggctgaggcaggagaatcgcttgaacccgggaggcggaggttgcagtgagccgagatcgcaccactgcactccagcctgggtgacagagtgagactctggttaaaaaaaaaaaaatcataagtcagaccatcttaagtcaaggaccacatgtataccaagggttgagccacagggtatgtgtagatttagctttagtagaaactgcccagtaattttgatttgtagatgatctttatatattccggatccaagaactttgttggatccagtacaactcctttacctgtggtttcactttctgtggttttagttatctgtggtcaaccatagcgtgaagatattcaatggaaaattccagagataaacaattagtaagttttaaattgtacatcgttctgagtagcatgataaaatctcacaccatcccactcaggacatgaattatccctacgtccagtgtatctgtgctgtataggagtatgttacccattcgttaatcacttagtagccttcttgattatcagatgaaaaaaaaacatagattggccggtcacggtggctcacgcctgtaatcccagcactttgggagcctgaggcgggtgaatcacctgaggtcaggagcttgagaccagcctgaccaacatggtgaaaccctgtctctactaaaaaatacaaaaattatctgggcatggtggtgggcacctgtaaccctagctacttgagaggctgaggcaggagaatcacttgaacccaggagggggaggttgcagtgagccaggatcatgccattgcactccagtctgggtgacagagccagactccgtccaaaacaaaacaaaacaaaacagtatttatagggtttgtactatctgaggtttcagatatccactgggttcttggaggtatcccctgcggataaggaaggactactgtttatgtttgtaaatatcattttccactctgagggctaccttttcactgtctttttttttttttttttttaaggcggagttttgctcttgtcatccaggctggagtgtgatggtgcaatcttggctcactgcaacctccgcctcccgggttaaagcaattctcctgcctcatcctcccaagtagctgggattacaagcatgtgccaccatgcctggctaatttttgtatttttagtagagatggggtttcaccacattggccggggtggtctcgaactcctgacctcaggtgatttgcccgcctcggcctcccaaagtgctgggattacaggtatgagccacagcgcccagccaccactgcctattttttatttttaaaagtgtaaaacattgaattttatttcaacggtattgcttttaatgactgttgggtattccatttttatattagtgtgcttacctttttaaaattggtttgcaagatctgtttgtatattaagtatattgaccactgtgtggtatgtatatgttacaaatatattttcccagcatattggttctctttagattttgtttatggtgttgctgccattcagaaccttctgactgatcttttccttaatgatttatcactttaggtatcacatttgaatatcccttctgtattagtctgttctcatgctgctaataaagacatacctgaaggctgggtgtggtggctcacgcctgtaatcccagcactttgggaggccaaggcaggtggatcacgtggtcaggagtttgagaccagcctgaccaacatggtgaatccccatctctactaaaaatataaaaattagccaggtgtggtggtacatgcctgtaatcccagctactcaggaggctgaggcaggagaattgcttgaactggggaggcagaggttgcagtgagccaagattgcaccactgcactgcagcctgggtgacagagcaagactgtctcaaaaaaaaaaaaaaaaaaaagacatacccaagactgggtcatttataaagaaaaaggggtttagtgggctcacagttccacctggcttgggaggcctcccaatcatggtggaaggcaaaacaggagtgaaggcatggcttacatggcgacaggcaagaaagtgtgtgcaggggaactgccgtttgtaagatcatcagatcttgtgagacttattcactatcatgagaatagcatgggaaaaacccacccccatgattcaattacctcccaccggctccctcccacaacccatggggattatgggagctataattcaagatgagatttgggtggggacacagccaaaccatatcattccactttggtcgctcccaaatctcatgtcctcacatttcaaaaccaatcataccttcccaacagtcccccaaagtctcaactcatttcactattaactcaaaagtccacagtccaaagtctcatctgaggccgggcatggtggctcacacctgttatctcagcactttgggaggccaaggcaggcagatcagctgaggtcaggagttcaagaccagctttcccaaaataataaaaccctgtctatactaaaaatacaaaaattaggcaggcatggtggcacatgcctgtagtctcaactactcgggaggctgaggcacaagaattggttgaacctgggaagcagaggttgcagtgagccaagattgcaccactccatcccagcctgggtgacagagtgagattctgtctccaaaaaaaaaaaaaaatcaacaacaaaataaagtctcatctgagacaaggcaagtccctcccacctatgggcctgtaaaatcaaaagcaagtttagttatttcatagatacagtgggatccagggattgggtaaatacatccattctaaatggaagaaattggccaaaatgaaggggctgcaggctccgtgcaagtcctaaatccagtggggcagtcaaatcttaaagctccaaaaagatcttttactccatgtctcaaatccaggtcatgctgatgcaagaggtgggttcccatggtcttgggcagctctgcccctctggctttgcagggtacagccccactcctggctgctttcacgggctggtgtggagtatctgtggcttttccaggcacatggtgcaagctctcggtggatctaacactctgggttctggagggcgatggccctcttctcacagctccactaggggcagtgccccagtgggaactctctgtgggggctcccactccacatttcccttctgcactgtcctagcagaggttccctatgaaggcttcacccctgcagcacacctctgcctggacatccaggcatttccatacagcctctcaaatctagctggaggctcccaaacctctgttcttgacttctgttcaccagcaggcccagcaccacgtgtaagccaccaaggcttggggcttgcaccctctgaagcaatggcctgagctgtacttggccccttttagccccgactgggatgcagggcaccaagtcctgagactgcacaaaacagcaaggccatgggccctgcccatgaaaccattttttctcctagtcctttggacctgtgttgggagaggctgctgtgaaaacctctgacatgccctggagacatttttcccattgtcttggtgattaacatttggctcctcgttacttatacaaatttctgcagcaggcttgaatttttcctcagaaaatgggtttttttttctatcacattgtcaggctgcaaattttccaaacatttatgctctatttcccttttaaacataggttccaattccaaaccatatcattgtgaatacataaaactgaagtgaatgcttttaacagcactcaagtcacctcttgaatgcttttaacagcactcaagtcacctcttgaatgctttcctgctgagaaatttcttctactaggtaccctaagtcatctctctcaagttcaaagttccacagatctctagggcaggggcaaaatgctgccagtctctttgctaacacataacaaaagtgacctttaccccagttcccaaaaagttcctcatctccatgtaagaccatgtcagcctggacttcattgttcatatcactctcggcatattggtcaaagccactcaacaagtctctaggaagttccaaactttcccacatttttctgtcttcttctgagccttccaaactgttcaaacctctgcttgttacccagttccaaagtcacattttcacatctccttatagcagcaccccactttactggtaccaatttactgtattagtcttttctcatgctgctaataaagacatccctaagactgggtcatttataaagaaaaagaggtttaatggactcatagttccacatggctggggaggcctcacaatcatggtggaaggcgaaggaggagcaaagacctgtcttacatggcagcaggcaagagagagtgtgcaggggaactgccctttataaaaccatcagatctcgtgagacttattcatcatcacgagacagcatgggaaaaacctgcccccattattcaattacctcctgcctggtccctcccatgacatatgaggattatgggagctacaattcaagatgagatttgggtggggacacagccaaaccatatcaccttcctaaccagaggtcagatattatttgtatttttgttgttgtgtgtcacagctttgcggttttatttttcatgcatttaaatctttaatccacttggagtttactctgataatataagattacagcctgggaatctacattttttaccaaaatgtttatctagataagaccctggggtagggtggggctttgggggccagtttcatctagaaggcttcttggtgactatctctgtactcttccacccctgccaggcgttggagaccagggccagccctggccacaccccaggctgtgtcaccttcgtcctgaatgaccacagcatggccttcactggagatgccctgttgatccgtgggtgtgggcggacagacttccagcaaggtgaccagctcctttatccagcccaagatcttcatatagttacgtgtgtgtcaagtgttgaagtatctgttacaagaatgaatggatggacattagacttttagggggcttcagtattaaattcaaggagtttacctgctagaacagtggtccccaacctttttggcaccagggaccggtttcgtggaagacaatttttccatggaccatggcagggcatagtttcggggattcaaatgcattacatttattgtgcactttattattacattgcaatagataatgaaataattatgtaactcaccatcatgtagaatcagtgggagccctgaacttgttttcctgcaactagatggtcacatctgggagagacggaagatagtgacagatcatcaggcattagattctcataaggagaacgcaacctagatccctcgcatgtgcagttcgcaatagagtttgtgctcctatgagaatctaatgctgctgcggatctgacaggaggcagagctcaggtggtaacgggagtgatggggagtggctgtaactacagatgaagctttgctcactcacccaccgctcaccaccttctgcacagcccagttcctaacagaccacggaccggtacccagggttaaggacccccatgctagagtatgggaagagttagattcaggggcttagctgttgggggacagttagattcaggggtgtgttagttacctatttgagcccagcttgggcaacatagtgagactccctctctaagaaacaaatatagctaaaaaaaaaaaaaaaacaaagggctgggcatggtggctcacgcctataatcccagcactttgggaggccgaggcaggtggatcatgaggtcaggagttcaagaccagcctggccaagatggtgaaaccccgtctctactaaaaatacaaaaattagctggccatggtggtgggtgcctgtagtcccagctactcgggaggctgaggcagagatttacttgaacccaggaggcggaggttgcagtgagccaagattgcgccactgcactccagcctgggtgacagagtgagacttcatctcaaaaaaaaaaaaaaaaaagataaaaaaagaagttgttaaagccagcggtttaattgccagggagcaatgaatgatccatttggagtctagctgctaggggcagttagatttaggagcttccctgtagaaagcgagtatagtttcagaatctcagggttgggccatcctttgagcatgtgtgtgaatgtggggttaacactaggcctggaatttagctgtcttgtggggagaggtgaggctggatgagagggaaagacagaagccatgatgagatggccgtggaagccacatccccaggcctcttcctccctcttccctctctccttatctctgcatctcagtctctgtctttttctctccaaggctcccaatctcccatttatccattcacagtacagtcaggaagctgaaggatttaggccgaaatgcaaggtggaatagaggtttgccccctacttaggactcagagctgcttgtggggaccatggcttcacactctcctcctgggcctcatgtcctcatgtctgcagtttctttcttcttcttcttcttttttttgagacggagtctcgctctgtcgcccaggctggagtgcagtggtgcaatcttggctcactgcaagctctgcctcctgggttcacgccattctcctgcctcagcctcccgagtagctgggactacaggcgcccgccatcacgccaggctaatttttttgtatttttagtagagacagggttttaccatgttagccaggatggtctcgatctcctgactttgtgattcacccacctcggcctcccaaagtgctgggattacaggcgtgagccaccgcgcccagccttttttttttttttcttgagacagagccgcgctctatctcccaggctggagggcagtggtgtgatcttggctcactgcaacctccgcctcctgggttcaagcaattctcctgcctcagcctcccaaatagctgggattacaggcatgggtcaccatgcctggctaatttttgtatttttagtagagacagggttttgtcatgttggccaggctggtctcgaactcctgacctcaggtagtccacccacctcagcctcccaaagtgctaggattacaggcatgagccactgcacctggctttgtcttcagtttcttaccttctagtccaccttccttgttcagaacccttacttgacatcccctgggtgacagccaaggtcacaaatgacactctttggtgcttcacggtgtcattccaaccctatttacagccatgctgaatttcttgacattcctcaattctttgtatatgctgttccatctgcctagaatgcctttccctgttctctacttagacaaagggatattggcaggacacgaaggagagggtttagctatagtgattttatcctcctacccttttcttgaaggaaggggttagagtcttctgtcctgttgatccactgacctctgatctttccttccccaggctgtgccaagaccttgtaccactcggtccatgaaaagatcttcacacttccaggagactgtctgatctaccctgctcacgattaccatggtgagggcttcctggaagaggtgtggggcgtacataactttgaaagtggagtgtaaatctctgtaatccttgtagggcatgaagacgaccagtctcagaaatttctctggccaaaaaaaattaagtgtttgaggctgggcaagggggctcacacttgtaatcctagcactttgggaggccaaggcaggaggctcatttgagcccaggagtgagttcgagaccagctggagtaacatggcaaaaccctgcctctacaaaatacaagaaattagccaggcatggtggcatgctgccagctacttgggaggctgtggtagaaggattgcttgagcctgggaggttgaggctgcagtgagctatgattgtaccactatattccagcctgggtgacacagcaagcccctgtctcaaaaaaaaaaaaaaaaaaagagataaagtgcttgagcctgctgtgtgtggatgtagaaactatgtgactgccagatgcctagaattctgcagggcatgggttttcctgggccttacttgtggagcttagggaactgggggaaaactaaatttcccatagtgtccatggaggagggaaagcaattttaggaatattctgggaagagcccctgccagagaggcacccaaggcctcctggggaatgtagttctgagaggcctgaggcactagactccttgactttccttcccctcccttggcccctagggttcacagtgtccaccgtggaggaggagaggactctgaaccctcggctcaccctcagctgtgaggagtttgtcaaaatcatgggcaacctgaacttgcctaaacctcagcagataggtgagcagctggggacctggacttctgggtctgagagaggaggggctggggtcttggactcctgggtctgagagaggaggggctgggggcctggactcctgggtctgagggaggaggggctgggggcctggactcctgggtctgagggaggagaggctgggggcctggactcctgggtctaagggaggaggggctgggggactggactcctgggtctgaggcagtaggggctgggggcctggactcctggctctgagggagtaggggctgggctgggggcctgggctcctgagtctgagggaggaggggctgggggcctggggtcctgggtctgagggaggaggagctgggggcctggactcctgggtctgaaggaggaggggctgggctgggggcctgggctcctgggtctgagggaggaagaactgggggcctggactcctgggtctgagggaggaggaactgggggcctggactcctggatctgagggaggagggactggggacctgggctcctgggtctgagggaggagggactgggggaggaggagctgggggcctggactcctgggtctgagggaggagggactggggacctgggctcctgggtctgagggaggaggggctgggggcctggactcctgggtctgagggaggaggggctgggggtctgaactcctgagtctgagggaggaggggctgggggactggactcctgggtctgagggaggaggggctgggggactggactcctgggtctgaggaaggaagggctgggggactggactcctgggtctgagggaggaggggctgggggtctgggctcctgggtctgagggaagaggggctgggggtctggactcctgggtctgagggaggaggggctggggtactggactcctgggtctgagggaaggagtgggctcaggaccaaaactctagtttcctgaagaggaaaggttcctaggatttctgggtctccagtggggcctggaactctacctaggccccttagttttaaccttgatttcttcctttcagactttgctgttccagccaacatgcgctgtggggtgcagacacccactgcctgatctcacttctgtcagatgctcccatccactattaatgcactaggtgggaggagagggcggcaatgacactgcacctctcctttcccaccgcattccctggagctccctaaataaaactttttttaacgtga

SEQ ID NO: 1182 - DNA, 79109 bp, Homo sapiens
cgggcgcagggagccgccgccggggctgtaggcgccaaggccatgtccgactcgtgggtcccgaactccgcctcgggccaggacccagggggccgccggagggcctgggccgagctgctgggtaggtgggcgcggcaggccgcgggagtgggcggcgtccggcccgggacggtttcgccggttccccgatcccttcccgccagagcctccgccggtcggatccccggacgccgcgcccggggggctgtgcggggtgggcgcccggctggggcggcgcggctgcctcggacccggcccctcctgcgcctgggcggacgcccccagccgccgcccgcggggcgctcccttctttcccgaacgccgcccccgccggccgccctgtcaggcgggcctggggtgcgcggcctggggctcccctcagcgcagaggccgcccctcgccagccgtccccgggctcccctgcctcgggccctcctgggccgtcttccccggcgtccgcggtggggccgtctccgttagtttcccgagacctgcgccctggggaggagccccggcccctcttcgggagggtgtcgctggtgggtttctccgcggcgtccacctgcgcgtcgggccggggaccccgtgtgtgaattgtgctgtgatggtttcgaaccgacttctctccgtagcgggaagggtcaagagggaaaaatataatcctgaaagggcacagaaattaaaggaatcagctgtgcgcctcctgcgaagccatcaggacctgaatgcccttttgcttgaggtaagaggaagctggtgtccgtctgcgggcagatttaggttcggggtttttgagtccagccaccgcacagctttcctaagaaaacacccgaggcggcgggcgcggtggcctggcccgcagaggggagggtcgcctgagcccgggagttctggaccaacctgggcaacggggtgagaccccgcctcttttattaaaaacaaaacaacaacaacaaaaaaacaggccgggcgccgtggctcagggctgtaatcccagcttttggggaggccaaggcgggtggatcactcagggtcaggagttcgagaccagcctggccaacatagtgaaacccggtctctactgaaaatacaaaaattagctgggtgtggtggcgcacgcctttaatcccagctactcgggagcctgaggcaggagaattgcttgaacctggacccgggaggcagaaattgcagtgagccgagatcacgccccttgcaatccagtctggattacagagtgagactgtctcacaaaaaaaaaaaaaaaaaaaaaaaaaaaaaaagccgggcgtggtggctcacgcctgtaatcctagccctttgggaggccgaagtgggtagatcacttgaggttaggagttcgagaccagcctgaccaacatggtgaaaccccgtcactacttaaaatacaaaaattagccgggtatggtagcaggtgtctgtaatcccagctgctcaggaggctgaggcaggagaatcgcttgaacctgggaggtggaggtcgccgtgagtgagatcccgccattgcactccagcctggacgacagtgagactccctctcaaaaaagaaaaaaaggaaaatagcccagtagggaagcattacttacacacaggttgtgtttatgcacagatcttgaattttttttatttttattttttattttcatttattttttttgagacaaagtctcacactgtagcctgggctggtatgcagtggggtgatctcggctcactgcagcctccacctcccgggtttaagtgattctcccgtctcagcctcccgagtggctgggactacaggcacgcgccaccatgccctcctaatttttgtatttttagtagagacagggtttcactatgttggccaggctggtctcgaactcttgacctcgtgatctgcccatctcggcctcccaaagtactgggattacaggcgtgagccactacgcctggcctggagcttgaattttttaaatggagtttgttgtgttttggattctaggtagaaggtccactgtgtaaaaaattgtctctcagcaaagtgattgactgtgacagttctgaggcctatgctaatcattctagttcatttataggtaagttatagcttcattttctctattttgaattgcagaagggtttttatatagtaaccatagtttgctaaattaagtagaaatgtaaattttctcaggcgatgggtttccactggtgtgtgtagtcgcaaattctatgggatgtttgtgtgacttgctcttgggcttcttacgatgctgtgtttaaaaacagcgtctgattcaacctgcgactcagaagcagtaggacccagagtgtcccttggaaaaacatgggacatagcaacagcagggatgtgccccttgctcatggaagtagtgagacaggctgtggtgtgcccaggagagcagacgggagaacaattttctaggtacctccttctccccccagtttgagagtgggagatagggtaagttctgggtcaacaacagtaagttattttctgatccttcacgtccttatgtgatgacttgtttctgttaaaataaccttcagtaatagcgctcccttgacaactggtcactgaatgtcattggcaaatgatacagattttcactgccatgattgtatttgaatttcacaaattgcatattatcattccaaggaaccaagctcagccacacagataaacctttaattcattaatttttgagtttgtttttttctgctaaagatatagttagtacatgcacgcacgtgcacacggacacacacacacacacacacacacacagtaaaagacttgtagataaaaaaactttcctatggagacacattggaaacaaatgactagaaattggcattgttggcctggcacagtggctcacgcctataatcgcagcactttgggaggctgaggtgtgcggatcacctgaggtcaggattcgagacgagcctggccaacatggtgaaaccctgtctctactaaaaaacacaaaaattagccgggtgtggtggtgggtgcctgtagtcccagctattcaggaggctgaggcaggagaattgcttgaacgtgggaggcagaggttgcattgagccgagacccctccattgcactccagcctgggcaataagagcaaaactctgtctcagaacagaaaatggcattgtctacttttttttttttttttaacagacagggtctcactctgttgcctggactggagagccgtggtgcaatcacggctcactgcagtcttgacctcctggcctcaagtgatcctcccaccccagcatcttgagtagctgggactacaggtgtgcgccaccatgcctggctaattttttcatagagacagggttttgccatattgcccaggctggtctcaaactcctgagctcaagcaatcagtttacctcagccacccaaggtgttgggattgcaggcatgagccactgtgccccatctgtctacttttctaccgagaatttcaccagcagctgatgatttctcgtactataattttaagcttctagaactattgtaaaattttttttttttttttttgagacgaagtgttgctctgtcgcccaggctggagtgcaatggcgccatctcggctcactacaaactctgcctcctgggttcaagcaattctcctgcctcagcctcccgaatagctgggattataggtgcccgccgccgcacccagctaatttttgtatttttagtagaggcggggtttcaccatcttggccaggctggtctcaaactcctgacctcgtgatcgacccgcctcggcctcctgcagtgttgggattacaggcatgagccaccgcaaccagcctgtaaatgtttttacttatgtattgataatgtgtttttagagccagtacattacaataacaggttcgtactgcagttaacagttttttttttttttttttttttttgagacggagtattgctcttgttacccaggctggagtgcaatggtgtgatctcgactcaccgcaacctctgcctccctagttaaagtgattctcctgcctcagcctcctgagtagctggtattacaggcatgcaccaccacgcctggctaattttgtatttttagtagagatagggtttcaccatgttggtcaggctggtctcaaactcccgacctcaggtgatccacccgcctcggcctcccaaagtgctgggattacaggagggacccactgagcctggcctccagtttttttttgttttgtttttttgagatgaagtctggctctgtcgcccagactgcagtgtagtggcgtgatctcggctcactgcaaactccgcctcctgggttcacgccattcttcgcctcagcctcctgagtagctgggactacaggctcccgtcaccaaacctggctaattttgtttttgtgtctttagtagagacagggtttcaccgtgttagccaggatggtctcgatctcctgaccttgtaatccgcccgcctcggcctcccaaagtgctgggattacaggcgtgagccaccgtgcccggcccggtttctttaaacaattaattttggctcacgtggtggctcacacctgtaatcccagcagtatgggaggccgaggcgggcggattaatgaggttgggaattggagacgagcctagccaacatagtgaaaccccatctctactaaaaatacaaaaaattaactgggcgtagtgacgcgtgcctgtaatcccagctacttgggaggctgaggcaggagaatcgcttgaacctgagaggcggaggttgcagtgagctgagatggcgccgttgcacttcagtccaggcggcagtgtaagacaccattgcaaaaaaataaaacaaaaaaaaattaattttggaagacaaataaattagaaaatgatttcttggcattgcctgcttccaggttgcccaccgtttctcactttattgaatgcagaccagtggctggttgctcaggagaatggtggctgcctgcaggctgttagtgaggttccacttggtggcctgcggactgagcacagctgtgactgcacctgcccaccaggtgcatggcagaatgttgggaaatccctgcctaattttatcacaaccatcaatgtgagtcaacaggggcaggcttatctctgaagtaattagaaaaacaatgtaattgaaagagcctgctgcagttctcaatttattgtgctcctttgtaaaaagatgataaagttcttggtcagaatatatttctttatcttgctccttttgtgtcatgggaaacgtaacaaataccaatgtataactctgggttcaggtgttgccaccagttttattgtgagctgcttggatcatcaaattctcatttttatctcatgtttttccctttgcatctattctccccgtttaaaaggcaattttttttgtgctgcatcttaaaataaggcattttaaacagcaagtctttggttttagattttgtctcatgtgttaagagaaagctatggttttgttttgtgtttaaggctctgctttgcaggatcaagcctcaaggctgggggttcccgtgggtattctctcagccgggatggttgcctctagcgtgggacagatctgcacggctccagcggagaccagtcaccctgtgctgctgactgtggagcagagagtaagacaccagcaaagatgaggaaacctgcccgttgttacttttaagctggttgggaaaataggacatagctttagtattgtttcaggtaatttgttttttaaaaaatgtaatctctcttttcagaagaagctgtcttccctgttagagtttgctcagtatttattggcacacagtatgttctcccgtctttccttctgtcaagaattatggaaaatacaggtaaatttgagattgcaaatctgactctccagtgttccaggcaatgttctgttgatctggatggaggcaacagagtacctgggttttcttgggaattctccaagcttctcattaattacagagagtggatgaaaaagggtttagaaatcatctgtggattggaaagaagtaccttcaattgccattttttgtccctattcacctatcattagtaatatttattagactagaatatattgaaaaacacgtttagccttgggtatattagtatggagaattttccagggtagtatagtaaactattaaaaaaaaatgtatgtaatttttttttccagagacagggtctcgccttgttgcccaggctggtcttttttttttttttttgagacgaagtctcgctctgtcgcacaggctggagtgcagtggcgtgatcttggctcactgcaagccccacctcccaggttcacgccattctcctgcctcagcctcccgagtagctgggactacaggtgactgccaccacgcccagctaattttttgtattttttagcagagacggggtttcaccgtgttagccaggatggtctcgatctcctgacctcgtgatctgcccacctcggcctcccaaagtgctgggattacaagtgtgagccaccgcgcctggcatttatttttatttttgagacagaatattgctctgccgcccaggctggagtgcagtggcgcaatcttggctcactgcaacgtctgcctcccaggttcaagcgattgtcctgcctcagccaccttagtagctgggattacaggcgcgtgccaccatgcccagttaatttttgtatctttttttttttttgagatggagttttgctcttgttgcccaggctggagtgcaatggtgctatcttggcttatcgcaacgtccgcctcccgggttcacgccattctcccgcctcagcctcccgagtagctgggattacaggcatgcgccaccatgcctggctaattttttttgtatttttagtagagacggggtttctccatgttggtcaggctggtctcaaactcctgacctcagatgatctgcccacctcggcctcccaaagtgccgggattacaggtgtgagtcaccgcgccctgcccaatttttgtatctttagtagagatgaggtttcaccatgttggccaggctggtcttcaattcctgacctcaggtgatctgcccatcttggcctcccaagtgctgggattacaggtgtgagccactgcgtccggcctttcccattcttttatccagcatacattatagaattcattagatttttcagttattgctttggtccctgccctcattatcacgtagcttgggaaacaagccactaaatccacaagaagtgcgatgattcatgtgctcacagatttgcgaagaagatgttggacatgcatatcagattggagagttaggaaagccttcctgcacggactgtgaagagtgcgagttaggggccgggcccagtggctcacacctgtaatcccagcactttgggaggccgaggcaggtggatcatgaggtcaggagatcgagcccatcctggctaacacggtgaaaccccgtctctactaaaaaatagaaaaaattagccgggtgtggtggcaggcacctgtagtcccagctactcaggaggctgaggcaggagaatggcgtgaacccgggaggcagagcttacagtgacccgagatggcgccactgcactccagcctgggtgacagagcgcgactctgtctcaaaaaaaaaaaaatagagtgtgagttagggggatgagaaggggaggctgcagggagatcagggcagtgtgacaggcacagtgttcacagtgagtggctaaagcagatcctgttttatcaaatgggagagggttgagtgagaaagacaagggacatgcacagggcacactgaagcctgacctttgtcctggcagcttcgaggagccagtgaaggcttctgaaggagagactgtcatgtcagtgtgtgtaatactgtgttggctgtagtgtggagaaagggttagaagtaggctacagtgcgtaggaagagagaaggaagagaagcaagtgttgggcaacggtgtgtgggtgcccaaaggccagggagtttgaaaaccagtacagctttgtaaaaaaagatgtgtttcaggctctaagtttttgcttgaggttaattttcaatacggcatggttaagaacctaagttgaacattttgtaggaaaatgcattcataaaggactcagaatgctgggggtttttttgtttttgtttttgtttgttttgttttgtttttcagagttctttgttgcttgaagcggtgtggcatcttcacgtacaaggcattgtgagcctgcaagagctgctggaaaggtagcgtgctaatgatgattcagtgttactgtttttgcagtctagtctagtataaattatatttcaaagcccagaatcagacgggtttgatttctggctttgacatataatttgtactagactagattgcattgcatatttatactagactagacctggaggaactattgctttattatttcaagagaacgtttatggtgttttggttttgtttgctttttgtctgttttttttttgagacggagtctcgctctgtggcccaggtgggagtgcagtggcacgatttcagctcactacaacctccacctccagggttcaagcaattctcctgcctcagcctcccaagtcgctgggattacaggcgcccgccaccacacgcagctaatttttgttatgtatttattttttttagggacagagtctcgttctgtcacccaggctggagtgcagtgacgtgatgtcggctcactgcaggctccacctcccgggttcacgccattctcctgcctcagcttcccgagtagctgggactacaggcgtccgccaccacgcctggctaatttttgtatttttagtagagactgggtttcaccatgttagccaggatgggctccatctcctgacttcaggatctgcccgcctctgcctcccaaagcgctgggattacaggcatgaaccactgtgcctggcaatttttgttatttttagtagagatgtggtttcgccatgttagccaggctggtgtcaaactcctaacctcaggtgattcccctgcctcggcctcccaaagtgctgggattacaggcatgagccacctcgcgcggcctttttttttctttttgagacagagacctgctatgtcgccaggctggagtgcagtggtgagatctgggctcgctgcaacctccgcttcccggattcaagcaattctgcccctgcctcctcagtagctgggactacaggcgcgtgccaccacacccggctaatttttgtatgtttagtagagatggggtttcaccatgttggctaggctggtctcgaactcctgatcttgtgatcctcccgcctcggcctagagcagaatttcatctcaaaaaaaaaaaaaaaaagaaaaacctgcttcctaggatatacacatcttatctcagcaccaaaatctatgaagcaaaaatggccagaattaaagggagaagtagacatttcagcaataatcattagaggtttcaatactcccctttcagtaatgggtagaacaagttagattaagaatgatatagaacagccgccccgtccgggagggaggtgggggagtcagccccccgcccggccagccgccctgtccaggaggtgaggggcgcctctgcccggccgcccatactgggaagtgaggagcccctctacccggccaccaccccgtctgggaggtgtacccaacagctcattgagaacgggccatgatgacaatggcggttttatggaatacaaaggggggaagggtggggaaaagattgcgaaatcagatggttgctgtgtctgtgtagaaagaagtagacacgggagacttttcattttgttctgtactaagagaaattcttctgccttgggatcctgttgatctgtgaccttgcccccaaccctgtgctctctgaaacatgtgctgtgtccactcagggttaaatggattaagggcggtgcaagatatgctttgttaaacagatgcttgaaggcagcatgctcgttaagagtcatcaccactccctaatctcaagtacccagggacacaaacactgcagaaggcctcagggtcctctgcctaggaaaaccagagacctttgttcacttgtttatctgctgaccttccctccaccattgtcctatgaccctgccaaatccccctctgcgagaaacacccaagaatgatcaattaaaaaaaaaaaaaaaaaaaagaatgatatagaagttgaatgctgcaaaccagctgacctgactgactgtggagcactctacccagtagtagcagagtgtgtattcgtaagtccaaatggaacagtccccaggatacagcataaggttcaggccaaggccaggtgcggtggctcacacctgtaatcccagcactttgggaggctgaggcgggcagatcacctgaggtcaggagttcaagaccagcctgtccaacgtggtgaaaccctgtctctactaaaattacaaaaattagctgggcaaggtggcaggtgcctgtaatcccagccgttgtggaggctgaggcaggagaatcgcttgaacttgggaggcggaggttgtagtgagctgagattgtgccattgcactccagcctggatgacaagagcaaaactgtttcaagagaaaaaaaaaaggttcaggccataaaacaaagaggaataaatttagaagggctgaaatcattcaaaatatgttctctaaccacaaatgaatttaattagaataaacaacagaagggaattgggaaaatccacaatatttgaaagttaacataatgagtcaaagaagtcacaagggaaattagaaaataacttgagactgggcacagtgccacaccagtcatcccagcactttgggagggcaaggtgggagattgttttgagcccgggagtttgagtccagcctgggcaaagtagtaagacctccagctgggcgtggtggtatgcgcctgttgtcccaactactcaggaggctgaggtggaaggattgcttgagcctgggaggtcgagggtgcagtgactgattgcgccactgcactccagcctcagtgacagcaaaaaactgtctcaaaaaaaaaattgggacatatggctcaactcaatcccctgatgatgggatttagttgagccttacgtctgcctctgtgtgtgtctccagccatcccgacatgcatgctgtgggatcgtggctcttcaggaatctgtgctgcctttgtgaacagatggaagcatcctgccagcatgctgacgtcgccagggccatgctttctggtgcgttcatgacaagatgcgggttcttgggtaaaactcattttgatctgtgataatgccttctgctctcaagagctctgcgaggcagaacagcctgtctctccgtggccgtgggaacctggcatgacagactcccagtctcagcctgttgtggggttgcattttacttgactgatgtggaaatactagtaagtcggccttgacatgagtttaagtgtttccattcacctttcccatagagtgaccgcagctgcttccttctgtcgcccaggctggagtacagtggcgcgatctcagctcactgcaacctccgcctcctgggttcaagtgattctctgcctcaacctccttagtagctgggactgcaggcacgtggcaccatgcccggctaattttttttttgtatttttagtagagacggggtttcattaggttggccaggctgctcttgaactcctgacctcgtgatgcacccccctcggcctcccaaagtgctgggattataggcgtgagccactatgcctggccttcctgaggaatgatattatgagaaaaacttgggactgtaatgtccccccacaaactaagaaggtgctgagagaccagaggatggctcagactagggaccaacccagtttgaggagtagttgggtttgtcagaagatggcttggaccagagtccagcttgaggagtagttgggcttgtcagaggatggctcggaccagagtccagcttgaggagtagttgggcttgtcagagaatggcttggaccaatccagcttgaggagtagttgggtttgtcaggacttatattcagcgcactcctggacggcggcaggacagctctagagaaccgccccaccacctgtctctaaggtgcattgaagctcgttttctggctctttgcctgctgtgtttgagtgatgagactcttttccttggtgagttctcagatcctctctgggatatttgggttctgaggaacacctgctgggagacccatcccactacaagtgacacctacaaataaaaattagatgagaaactgatctgtacagtagcttgtgggttttttcctttttcctaaagctttttggtggcatgagcgacttagcattcctgagctactataacctggtaccagataggttaaatttaaatcaaagttagaaaatcttgtggatttcagtcctcttggtcttattttttaaaaagctaagaatgcctttcctcccccatcacattcctcagaataggatgcttctgggtccctctagaccctctggtattggagattggcaggcaagacaatccataagacctcccttggaaaccacttttatttaagagaaaaaaattgggctgggtggggtgactcatgccagtaatcccagcactttgggaggccaaggcaggtggatcatgaggtcaggagttcaagaccaacctggccaagatggtgaaaccccatctctactaaaaatacaaaaattagctgggtgtggtggcggcgcctatattcccagctactggtgaggctgaggcagagaattgcttgaacctgggaggcggaggttgcagtgagcgagatcataccattgcactcaagcccaggcgacagagcaagcctccgtctcacaaaaaaaaaaaaaaagaaaaaaatctgactataaacttgttccctttcaaatagaagtgcaagaggaaaaaatctggttcatctaagggtcctgattgggtttggtgaacgctagtgtagctgtggtcaggtgagcagtaacttctgcagcgttcctcaggttaggagcagctcacaggggtcctggtgggcccaagccatatgctcacccgcccctctgaagtggatggtctgtgccattcacagttgcttggagaccatgatgtccataaataactttggttttatggtttttcagattttgttcaaatgtttgttttgaggggatttcagaaaaactcagatctgagaagaactgtggagcctgaaaaaatgccgcaggtaggaggaaaagtcaagtgaagagtttagcggaaggagccgtccttattccaagtgttgaaatgtatttacgtgtctctctattgaaacgtgctgtttgtacctatttacggggtacatgtgatacttgttttgtgcatagagtgtaatgatcaagtcagggtgtttagagtctccgtcacctccagtatgtatcatttctgtgtgttggcaacatttcacatgttgcagttactttgaaatatacaatctgttgttaactatagccgcctcactctgctgtggaacattagaacttacttcttctgtctagctgtatgtttgtacccattaaccaactctcttcgttcccccactgcatatacccttctcatctctggtatctctcgttctactctctacctccacaagagccactttttagctcccacatatttgtgataacatgcaatatttgtccttctgtgcctggcttatttcacttaacataatggccttcagttgcattcctgttgctgtgaatgacaggatttcactttaaaaaaaaagaatagctggccgggcatggtggctcatgcctgtaatcccagcactttgggaggacgaggcgggcggatcacaaggtcaggagatcgagaccatcctggctaacatggtaaaatcccgtctctactaaaaaaatagaaaaaattagccgggcctggtggcaggcacctgtggacccagccactcaggaggctgaggcaggagaatggcgtgaaacctggaggcggagcttgcagtgagcccagatcgtgtcactgtattccagcctaggcgacagagactccatctcagaaaaagaaaaaaatagctgaggttgggctcaatggctcatgcctataatccagcactttgggaggctgagactggtggatcccctgaggtcaggagttcaagaccagcctgaccaacatggtgaaaccctgtctctagtaaaaaaaaaaaaaaaatagccgggcgtggtggcacatgcctgtagtcccagctacaggcgtggaggcaggagaattgcttgaacccaggaggcggaggttgcagtgagccaagattgcgccttgcactctagcctgggtgacagagcgagactccgttaaagctgaccagtattccgttgtgtgtatataccacgttttctgtatccggtcatctcttgttgggcacacaggttgatttcatatcttggctattgttaatagtgccacaataaatgtaggagtacagatgtctcttcagctggctgatttcctttcctttggctgtaagcccagtaatgggattgctggatcatatggcagttctggttttttttttgtttttttgtgtttttttgagacggtgtctctctctgttgctcaggctagagtgcagtggcgcgatttcggctcactgcaacctctgcctcccaggttcaaccgattctcctgcctcagcctcccgaatagctgggattacaggcatgcaccaccatgcccagctaatttttgtatttttagtagaggtgaggtttcactctgttggctaggatggtctcgatctcttgacctcatgatctgcctgccttggcctcctgaagtgctgggattacagatgtgatccaccatgcctggtgaaagtgagaccctctgggctggtagttctgtttttagaactacccaactatttagaaatctccatactattttccataatggctgtattaatttacattctcactgatagcatataagagttctgtttgcattctcaccagcatttgttattttttgttttcttgataatgataattctaactggagtgaaataatagctcattgtggctttgacttgtatttccctgatgattagtgacattggcttttttttttttttttttgagacagagtcttgctctgtcgcccgggctggagtgcagtggcgcgatctcggctcactgcaagctccgcctccggggttcacgccattctcctgcctcagcctcctgaatagctgggactacaggcgcccaccaccactcccggctagtttttctatttttagtagagatgggctttcacagtgttggtcaggctggtctcgaacttctgatctcatgacccgcccaccttggcctctcaaagtgttgggattataggcgtgggctaccgtgcctggcctttttttttcttttttcttttttttttttttgagatggagtcttgctctgtctcccaggctggagtgcagtggtgccatcttggttcactgcaagctccgcctaccgggttcaagctattctcctgcctcagtctcccgagtagctgggactatagacacccgccaccgcacctagctaatttttttgtatttttagtagagacagggtttcaccttgttggtcaggctggtctagaactcctgacctcaggtgatccacccacctcgacttccgaaagtgctgggattacaggcgtgggccacagttcccggcctgtttctgggttctctatcctgttccgttggtctgtgtgtatgtttatatcaacctcatgctgttttcatttctgtagcctcgtagtatattttgacctcaggcagtgtgatttctatattctatagctttgttctttttcctcaggattgctttgcttatctgtgttctattttggttccatgtgaattttagaatctttttttctatttctgggaagaacgttattggtattttgatagggattgcattgaatctgtagatagttttggatacgtcccaaatttttattcccttttggaggttcctgagccagtggctcccattttgcctacactgcagtctgtgggctttgtttgaggaagtctgttttattgttaccatgagttgctctctgagtagtggtatgctttaagcccaggagatgtgaagaagggaaatggacaatggtaccttctcaccgtcttctggctccagaggcatcaagggtgaaagtccttagttccacagcccagattcaaggcctgagctttcctctcttcactgaagtacttcagcaaaactctgcgtgcaaaagtgtcctgcccagccctaggctcatggcctcaggccatgctgagagcagtcttagggtaattccagaaagttcagccttttcactctgtctaggtcccttcggtactggagtaatttctaggtctatgagggtttttaaagttgatctctttgtaaagtccatttctttttcttttttccgagacggagtctggctctttcgcccgggccggactgcagtggcactatctcagctcactggaagctctgcctcccgggttcacgccattctcctgcctcagcctcccgagtagctgagactacagggcgtccgccactgcgcccggctaattttttgtatttttagtagagacggggtttcaccatgttagccaggatggtctcgatctcctgacctcgtgatccgcccgcctcggcctcctgaagtgccgtttctttactttagagtaacaagtaataattctcttgtgtgatgcaggtatcacacaaattacagaagattaccaagatggtaactcacattctattttgacaggtcacggttgatgtactgcagagaatgctgatttgtaagttaattgcactgcagcccagactgtaaatgacttagtttgcttattagcaattgtatcagttttctgcctttccatttgaggtatttctcctctgtatgtttcactgtgcagagtcctggtactggaatgcccttgttttggcattttcagagctgtgaagggatacctcatgaatctgtgggtcacagggaagcattttcttgtctgtgtgttttgattaaggcctacagattgtagaagtcttgatggatgtgggccctctggggggttgaagtggatctgttgtctgaaagcgcctggggattgtttctggtgggctgccgccgtgtgctgacatctgttttctgttcctggctctgtcttcagttgcacttgacgctttggctgctggagtacaggaggagtcctccactcacaagatcgtgaggtgctggtatgttcctgagggtggcctgcctgagtgtgcagcagggaggtgtctgccaaattaaagagccaagatattttaaacacttccagagcttcagcagcccgctcctgagcacacttcctctgccagttacgataacgtgcgtgaggaggaggcgaccatgggaaagcccggggaacgctctggtcagccttttcctgtgaggatgaggtcggaaggtgcgcccactgcagtatcctgttccgcctctggaagtcctgcaccaatgtttgtcccactcactgtgacctcctcctgtgtggagtctccccttgctcctccttccctgggtgtgattcaggctctagagctggccctgcctctcagccccccacatttctagaacacactgtagctgtgcctctacagactcccgctgcctggcctccacagatcctgctcagattcaccagtaggcaaagcttggccctattagctttttctctccatggctctgtggagatgtgcggagacccttacaggtcgggaggcggaagctgaggagtgggggctgggtggaaggtggacatcggggtttggtggaaatggggctctggggtttgcttccctctagtgtgggcaggggaccttgaagtgaagtcttgagaaaccagtagaatttgccactgtttccaggccttgtcaaccttttcattctttattttgctcctcatttcccatccctcacagtaactgtttaactgctcaattaaatgtgttgtaccgttcggtacttttactgaaacagtgaataaagcactgtgtgatttcctgaatgtttacatgtgcatcagttagcttgggctgctgtaacaaagtgccagagactgcggtgtggacggcagatgtgttctcacagcagtggaggctggaagttggaggtcagggtgcccctagggttgggttctggtgaggaccctcttcctggcttgcaggagacctactttttctgtgtcttcatgaggtagagaggggagagcaagccctctggtgtcttctccgggcagtcatctcatcatcacctcagccttatcaacaccccaccttgagaggctgggcttcaacagaggaactttgtggggatacagtttagtctgtggcaagggcttttttttataatctgtgtgataagattactcacactgatgtcctgagagtcaggtaacaaccactgacctgccgatttttatattttgtaattagttgccaattatttatttatttatttatttttgagacagagttttattcttgttgcccaggctggagtgcagtggtgagatctctgctcactgcaacctctgcctcccaggttcaatcaattcttctgcctcagcctcctgagtagctgggattacaggcatgcaccaccacacctggcacaagcctatagttttgtattttctatttttaagtagacatggggtttcactatattggtcaggctggtctcgaactcctgacctcaagtgataacacccacctcagcctcccaaagtactgggattacaggcgtgagccaccgcacctggcctgccaataatttaaaatcagacatcctccaacagtcttggtggccagcttcccttgcacactgggggctgtggtgtcccaaagccctgccctgtgaggaaggacagcagggctgagaagtgaatctccacgatgtcccacaccctgttgtgtgagtgtcttgagtttgcacagagccgacgtggcctcgttgggtgtgtgaccctggggcagttcactgaaccgccaggacccttgattttctttctttctttctttatttttttgagacagagtctcactgtgtcgcccaggctggagtgcagtggcacgatctcggtttactacaacctatgcctcctgggttcaagcgattctcctgcctcagcctcccacatagctgggactataggtgtgtgccaccatgcctggctaattttttttatttttctttttttgagacagaatttcgctctgtcgcccatgctggagtgcagtggtgcgatctctgctcactgcaagctccgctccctgggttcacaccattctcctgcctcagtctcccgagtagctggaactacaggtgcccaccaccatgcccggctaattttttctatttttttagtagagatggggtttcgttgggttggccgggatggtctcgagctcctgaccttgtcatctgccccccttggcctcccaaagtgctgggattacaggtgtgagccaatgcgcctggcctaatattttggtatttttagtgtagatggggtttcaccatgttagccagggtagtcttgatctcctgaccttgtgatctgcccgcctcagcctcccagagtgctgggattacaggcatgagccaccgtgcccggctggacccttgattttcttacctggggaatcggcataaagtgccgcttgctggttgcaggttgtaagcctcacgagagggtctgggtttggtttggtggtctgtataggcctgctgggatgtggcaggctaacagacctcaagtgctcttgccacctggctctgtgaccccattcacccccagaacatcgtgttctctcacacagatggcccaggaaaccttagtcccttccattccttcctcatcttcatggacagagctggcctcagtccctgttgtgactgtttgaggccctggtgtgctgggctcttctctcaggcttggcacgaccctctgggggagttccgtgtcacagagggtgccgctgaggccccgtcgggttggctcccggggctccactcccgggtgcggcgcggcctgcccttcccaacctgtttccttctgctccactcccgggtgtggcgcggcctgcccttccccacctgtttccttctgctccttcgcttctctgctccgtgggtttcgccgttgccttgccccctttctcgttgaactgccacctccttggattcagtttcaagtctgtggttatagtggcctggccaagaaagccccttccttgcttaaagaagggatgagcctgagccacagtttgtgctgggattggtgggtggcgtgcaaggcaccctccctttcctgacccctctttctgctgcattggcaggttcggagtgttcagtggacacacgcttggcagtgtaatttccacagatcctctgaagaggttcttcagtcataccctgactcagatactcactcacagccctgtgctgaaaggtaggcccagtgtggaggctgctcagttgctacccattttggggattgctgttgccttgttgccttggtaacgctgactggagatgccaggaattctaggacctcttttacgtctgtcttgaaccagagactgggtcctcagatgcctgagattgttactaaatatccttttacctgaaagcaacagatttttataagaaaattcagaattatgagtggacaaaataattgtcattaaaatagaaatatcttttttgtttgtttgtttgagtcagagtctcactcacttgcccatgctggagtgcagtggcgtgatctcagctcactgcaacctctgcctcccaggttcaagcaattctcgtgtctcagcctctcaagtagctgggactacaggcgccaaccaccacacccggttaattttttgtatttttagtagagactgggtttcaccatgttggccaggctggcctcgaactcctgaccttcggtgctccacctgccttggcttcccagagtgtcgaagtgttgggattacaggtgtgagccaccgcacccagcgtaaaatagaaatatctttattttatttatttatttatttatttatttatttatttatttattggagatggagtcttgctctgttgccaggttggagtacagtggcgtgatttgggctcactgcaacctccacctcccgggttcaaaccattctcctgcctcagcctccacagtagctgggattacgggcatgtgccaccatgcccggctaatttttgtatttttagtagagacgggctttcaccatgttggccaggctggtctcgaactcctaatctcaggtaatccgcccgtctcggcctcccaaaatactgggattacaggcgtgtgccgctgtgcccagccgctgtctagtcttttaaaacttggtgtttgagcatgcacattctccttctggaatacctgatcacccagcacaactcacgttatctttctgctggctacccttgccttgctgtgactgtgtcatggttctcagctagactcggtggcgtgtttgatggcccaggcatcgtctgcccagtgggtgtcctgttacccatgtatgacagactgtacccaagatatcagtcttacgaataaggccacgatgaacactttgagctttttctgtatctagcatatccccagggtagatgctcaggcaggaaactggtgggagatgagggatacacagatggctcccaacaggtgctgtgaggtgctcaggagtttatcatcacttgactgagctgagcttcctttgaacagcatccccaccatgattggtttattcccagtttatcttattttatgtatttatttatttttttgagacagagtcttactctgttgcccaggctggagtgtggtggtgcgatctcagctcactgcaacctctgccgcctgggttcaagctattccctgccaagcttgaattacaggcgcctgccaccatgcccagctactttttgtattttgagtagagacagggtttcaccatcttggccaggctggtctagaactcctgaccttgtgatccacccacttcggcctcccaaagtggtgggattacaggcgtgagccacctagcctgaccttactgacagtttaaaagcaggaaaattgaaatgcagttggtacattggaaaatatttattgtgaatatgacaaagcattacaagtaagtaaccgggcctgagaaacagaattgatgatatagcaaataggcaacaaacagggagatggtgaactttaataactgaaaaagtacatattaagatctgtcttcacactgaagctttgaaacacaactttttggccaggagcagtggctcacgcctgtaatcccagcattttgggaggctgagacgggcaggtcacgaggtcagaagttcgagaccagcctggccaaaagagtgaaaccccatctctactaaaaaatacaaaaattagccgggcgtggtggtgggcgcctgtagtcccagctactcgggaggctgaggcaggagaatcgcttgaacccgagaggcagagcttgcagtgagccgagattgtaccactgcactccagcctgggtgacagagtgagactcagcatcaaaaaaataaaaatacaaaaagtatctgggtatggtggcacacgcctgtggtcgcagctacttgggagactgaggcaggtggattgcttgagccagggaggtcgaggctgtggtgagcactgcactccagcctgggtgatagtgagaccctgtccaaaaacaaaacctgtgggcggcaagccacccaggcaccaaggcaagagaccgaggacacgagctgttctagtataataaaatataaaacaagaatagttataccagatatagatcttagatatgattacatatgaatatcattaatcattagttggtagtaattactgtttattgcaatattataataatcctcgctctataatcataacctaggaaaagccaggccatacagagacaggagctgaggggacatggtgagaagtgaccataagacaagagtgtgagccttctgttatgcccggacagggccaccagagggctccttggtctagcggtgacggcagcgtctgggaagacgcccgtcaccaagcggatcgtggtccagcggtagcaaaaggtgtcaaggaacaccactcactacttagaccgggaaagggactctccctttccccccgggagtttagagaagactctgctcctccacctcttgtggagggcctgacatcagtcaggctcacccacagttatccggaggcctaaccgtctccctgtgatgctgtgcttcagtggtcacgctcctagtccaccttcatgttccatcctgtacacctggctctgccttctagatagcagtagtaaattagtgaaagtactaaaagtctctgatatgcagaaataatggcataagctgtctttgtctctatctcctctccctctctgcctcggcttccaggcagggaagggccccctatccagtggacacgtgaccttacctatcattggagatgactcacactctttaccctgccccttttgctttgtatccaataaataacagcacaaccagacattcagggccactaccggtctccgcgcattgatggtagtggtcccccgggcccagctgtcttgtcttttatctctttgtcttgtatctttctttctacactctctcgtcgccgcacacggggagagacccaccgaccctgtggggctggtccttaacaaaaacccacaactttttgatctctgacttgaagtttttgtctgtttctccccctgcagcatctgatgctgttcagatgcagagagagtggagctttgcgcggacacaccctctgctcacctcactgtaccgcagggtgagtggatgtggtattatacctgcttctgagctcgtggcggggggattaagatctgcctagtacttgtcatgctgcctgccgtggacggcacatcgagaggttcagggatgtctggtgagatgtggctgtcctcatcaaggccaccactcaggtcaggagactgaacttgtcccttgggccgagcccctcctccttgagatagggagaattctctccaagcaggtgctggccactgtgaggggagagacgccacggtgtgagctgtcacagctccatgtgttacctttgcagtgggaagtgagggggctgcggtggccaccggctgggaggaaggtgaggggtcatctgtcgcacattggtttgcttggatattgaagggagcggatgcttttatttcagctctttgtgatgctgagtgcagaggagttggttggccatttgcaagaagttctggaaacgcaggaggttcactggcagagagtgctctcctttgtgtctgccctggttgtctgctttccagaagcgcagcagctgcttgaaggtgagcttttacgcgagcccggtggtgctggtcaagagtgtgtgtaggggggtgtcagcagagtcccagctgactgtgggtgagcctctcagtgaagcccttccctacctgcccggaacctgcagtgcctcctgtcgatggaacattctttgtcagacgcttccataagcactgactgctgctctgagaggccagagtgtccactgctgcttcattcaggtctctagtggtttgcacttgacatgctgtaattgctgtgtagtcttttaaaacttggtgtttgggtgtgcacagtctccttctggaatacttgatcacccagcataactcacgtcatgttcctgctggctgcccttgccttgctgtgactatgtcatggttcttaactagactgggtggcgcgtttgatggcccaggcattcgagagctgccagctggacagcatggtcactgcgttcctggttgtgcgccaggcagcactggagggcccctctgcgttcctgtcatatgcagactggttcaaggtaagtgacctgccaatcggctacctaatacctgatcttcccagaaggcctgggagtggggaccatgctgtccccacctgattctctgtcatgtgagtgagcaaccttgctgtcagctttgccgagtggccttggcagatcttcctctgcgtgtgccgaggagcctgggttctccctgtcggggcctcagcggatcttcctctgcatgttccgaggagcctgggttctccctgtcggggcctcagctccttcccctggtttctgtctcacttagttgacggagcctcctgctgtcttttataagaaaattagcgaaatcaagcctggacaccatagtgaaacctcatctccaccaaaaaaaaaaaaaaaaaaaaaaaaacacacacacacacacacaaaacaaaaactacgcaggtgtggtggcagacacctgtagtcctcgttactcgggaggctgagacgcaaggattacttgagcctgggagatcaaggctgcagtgagctgtgattgcaccactgtacgccagcctgggtgacagaaggagactccatcccaaaaagaaaaaaaagaaaatgagtgaaatcaggaaagaggggacacagaagtggatgctgctttttgcagagtatacaatgtctcttattttccctttttttttttttgagatggagtcttcctctgtcgcccaggctagagtgcagtggtacagaaagctcaccttctcggctcactgcaaactccgctgccccgtttcaagctattctcctgcctcagcctcctgagtagctgggattacaggtgtgcactaccatacccagttcatttttgtatttttagtagagacggggtttcaccatgttggtcaggctggtctctaactcctgacctcatgatccgcccgtcttgtcctcccaaagtgctgggattacaggcatgagccagcgcacctggcctttcctttttatttatttatttatttattttatttatttacttatttatttttttgaggtggagtctcattctatcactcatactggagtgcactggtgcgacctcggctcactgcaacctcctcctcctgggttcaagcaattctcctgcctccgcctcccgagtagctggggttacaggcgttcgccaccacacctggctaatttttagtagagacagggtttcatcatgttggtcaggctggtctcaaaatcctgaccttaagtggtccgcctccctcggcctcccaaagtgcagggattacaggcatgagccaccgtgcccagccttgcgtctctaattttcacgtaagtcctgaaacaagtacttcatttcttcagccgtatcacatattcttcctttttctttggaacacacacagtgtgctctctgacagaagtttatgcagctgttcctgaacctaagtgggcattagactcgcctggagggggctttggaaataaagatccagggcccatttgagactactgagtctgagctcctgagacctcagggatccctgggcaacccctgtgaaaacccccagttcatgtggggagttgggtgtatttgagatatcagctttgaaggaccgccatggtttctcttttagtgcttgtgagtaaagtttccatttgaagagctaatttttgtagaagttttgggttcgggccaggtacagtggctcatgcctgtaatctcagcagtttgggaggcctaggcaggaggattgcttgagcccaggggttcaagatcagcctgggcagcacagtgagaccccggtctctacagaatgtaacaattagctgggtgtggtggtaagcacctgtggtcctggctacttaccggctgaggcaggatgattacttaagccgaggaggttgaggctgcattgagctgggattgcattactacgctccagcctgggagacagagcaagactctgtctcaaaaaaaaaaaaaaaaaaaaaagtattgagttttcctgccatcaccacctcggtgaagtagttgcctctttgtaggagtctcagctccctgaaattttcaagggctgcggtgcctgcatcgccatcgtggctgcggtgcctgctccccccccaggccttctgaggagctgaggctgcacaggaggctgagccgcatctgcttgtgttgggagaaggtggtgactggtgcagtgtcagtgtcaactcacttctattccttaaagttccttctcacctgccctcaggctctccccagctctgcccagttagcctggggcttccactaaactaagaggagaggtgtttgttctgtccttttagtgaggcgctgagagatttgtgccagaatccacctggtgctcttgggtcaggagttgatgggtctccccgagccgcggctcaggtgtctccctgggctgctttttcttcggttccagaggcgacagttgggagaggaatactctgaagtgctgtgttggtggtggtgttttggttttgtttgcttttcttttaccttttcaaatcaactttatcaaaatatagtttaaatgaaataatgaaaggtatccaatttaagtgtaccattaaatgaggttttttgtttttttctgtttgtgttttcttttaagagactgagtgttgcccaggctggagtgcagtggcatgatcatagctcactgcagcctttacctcctggggtcaagcagtcctcctgcctccgcttccagagtaactgggactataggtgtgtgccaccacacccagctaattaaaaaaaatttttttgtaaatacaatgtcataccgtgttgctcaggctggtctcagattcctggcctcatgcgatccccgcaccttaacccccgaagtactggaattacaggcatgagccaccatgtccagatagttagatgagttttgataaatgtatatatgcatattcagtgtttgaacatctgtttttgttatgttttgttttgtttttgagatggagtccccgtctgtcaccaggctggagtgcaactcccacctcctgggttcaagcgattctcctgtttcagcctcctgagtagctgggactacaggtgcctgccaccacacctggctaatttttgtaattttggtagagatggggtctcaccatgttggccaggatggtctcgatctcttgagtttgtcatccgccccacttagcctcccaaagtgctgggattacaggcatgagccaacgcacttggcctgaacatctgttttaatttttacttttgagggcaaataccagcactgtgggaggacgaggtgggccgattgcttgagcccagtagttcaagaccaccctgggcaacgtggcaaaaccctatctctaccaaaaatacaaaatttagctggtatggtggcaggtgcctgtaatcccagctactcagaaggccgaggcaggagaattccttgaacccggaacgcgcaggttgcagtgagccaagatcagaccactgcactccagcctgggcaatggagcaagaccccgtctcaaaaaaaaaattttttttttttacttttaggaaatgttaatataagtagaccaaatgatcgtgaatttgagccctttggggtaattaatataattctcagcatatcacattatgtagttaaatgtaatttgtggggtttttttgtttgtttttttgaggcaaggtctctgttctgtctcccaggctgggatgtggtggtgtgatcatggctcactgcagtctcaaccttccaggctcaaatgatcctcccacctcaacttcccgagcagctgagtccgcaggtgtatgtcaccacacctggctaattattaaaaaattttttgtggacatagtgtctcactatgttgccctggctggtctttttgtttttttaagatggagttcgctcttgttgcccaggctggagtgcagtggtgcgaccttggctcacggtaaccacctcccgggttcacgccattctcctgccacagcctcctgagtagctgggactacaggcgcctgccaccacacacggctaattttttgtatttttagtagagacagggtttcaccgggttagccaggatggtctcgatctcctgaactcgtgatctgcccgcctcagcctcccaaagtgttgggatcacaggcgctagccaccgcgcccggccgtcctggctggtcttgacctcctgggctgaagtgatcttcctgcctcaacctcccaaagtgttggaattaccggattgagccactgcacccagccattaagtgtaattttttcaaaaatagcaaacagaactgccttttatctcagcaactctaacaatggctgctgtgaccccaggtctggcttgcgcgtgtcacttagatgctttacagaaatgcctttggcgacgggtctggactgttcctgctgcggccagtgatcatctggctcactgttaattgagtgaacgttgccaagagacaggagcagttgtgttgtggatggctgaatggagggtgataagacatggtgtgcttggcgggagaatttcaggttgaaactgggtgctgatgttttgagaagggaacccttgagtggtctcaggttttatttaaatttttaactgacaagtattgagctgctttcctggtatttggcacagacagttcatgtctctgagctttgtttttccgtgactctgtccctctcagagacatttgacaagcgttatcagcattttccgctttttatctaatggctttttgggtctgtctgcatgatgataacattcaaaagaatctacacatggtcaggtgtgatagttcatgcctgtaatcccagcactttggaaggccgaggcaggtggatcacttgaggtcaggagtttgagaccagcctggccaacatggcaaaacctcatctctactaaaaagacaaaaattagctaggtcagacgtggtggctcatgtctgtaatcccagcactttgggaggccaaggtatcacctgaggtcaggagttcaagagtagcctggccaacacgatgaaaccctgtctctactaaaaacacaaaattagccaggcatggtggtgcacacctgtaatcccagctactcaggaggctgaggcaggagaatcgtttgaacctgggaggcggaggttacggtaagccgagattacgccactgcgctccagcctgggtgacagagtgaggctttgtctcagaaaaaaggaaaaaaaaaaccgggcttggtggcacgtgcttgtagtcccagctacttgggaggcagaggtgggagaatcacttgaacccgggaggcagaggttgcagtgagccctgattgcaccgttgcactccagcctggatgacagagtgagactctctctctcaaaaaaaaaaaaaaaaaaatagctgggagtggtagcaaatgcctgtaatctcagctactagggaggcaggagaattgttcaaacctgggtgggcggacgttgcagtgagccaagatggcaccactgcactccagcctgggtgacagagcaagactctgtctccaaaaaaaaaaaaacaaaacacaattttgcacgctttcagaaagaccaaggtgagccttcagttcacgttggagttcaggtttcctgatagatggtaacttgctgaggtttcaccaggatgtcctgtggtctcaagtggggctagggtggcaggagctcgtctggttttgcaggtaagcggttcagtgttcacagaggcccacattctgtctgcaggttcactatgatgcgttcagggccatgcccatttaaaatctccttccttccctgactcactgcagcccccaggactttgctgcagcccccttcgttcctgggagggtttgctcatgttcctcgcttgctctgctagggtcttgcagcttcattgtctgaggggtggccctccttggcctgtgttccttacccacctctcttgcagtgatctgtccactggtggatgaggttagaagttaaagtgtgttcagaagtggcttcatcccacaaaatcaatttgtttgctgtgcacaaacacttcttagggcatttagcaaattgtacccctaaggatcccaaaaggatcccatagttagtgtttgttatagctaatgatttttaactgtttttcttcgaataacttttagatatctcttcagtcaaagcgcagtcgtgacatctgtaaatgtatgaaccacatgactttttggtgtttctcttttttcctttttgtttaggaggccgactacagcagccgcccggacactgcctaggtgggcttcacactcttctctccacacaggacactgcctaggtggtgcagctgcgcctggctgtcctgggcttcacgctcttctctccacacaggacactgcctaggtggtgcagccgcgcctggctgtcctgggcttcacgctcttctctccacacaggcctcctttgggagcacacgaggctaccatggctgcagcaagaaggccctggtcttcctgtttacgttcttgtcagaactcgtgccttttgagtctccccggtacctgcaggtgagaagctggctgccacatccatgatttctggtgcttcgctcacctgctgcatctgaggactgccttggcctccccaagagcctcctgcagatctgctctgagcctctcagccaggcccttccccttccccttccccttccccaagccgtttatggtgaaacaacacaaacattgcaactggaggtgtccacgtggacacacagtgagtgcgtgtgtgccagtcaaggcaactgctaagaaacccttttctcacctaggccaaggaggtgggtagatatattatgtcactgttcagtctccctcaaaacagtgagcaggtctgagtggtgacgtggagagacgttctcagcacccagttacgcaggaagagcgagttgtactgcagtgagggttttaggatctcatgtttgcttttttttttttttttttaatttcatgtgggttttttttttgtttttttgtttttttgggtttttttttttgagacagtctcactctgttgcctaggctagagtgcagtgttgccatcatagctcactgtagcctagacctcccaggtcaagcagttctcccacctcagcgtcctgagtagttgggactacaggcgcatgccagcaaacctggctgttttttctttttttcttttttttagtacagatggggtcttgctgtgttgcccaggctggccttgaactgagctcaagtgatccttccgccttggcctcccaaagttctgggattacaggtgtgagccactgtgcccagcctgaccctcatcttttaagaaaattggccgggcgtggtggctcacacctgtaacccagcacttttggaggctgaggagggcagatcacttgaggtcaggagttcgagaccagcctgaccaatgtggagaaaccccctgtctactgaaaatacaaaattagccgggcgtggtagcgcgcgcgtagtcctagctactcaggaggctgaggcaggagagttgcttgaacccgggaggcggaggttgcagtgagccgagactgcaccattgcactccagcctgggcaataagagcaaaactccctctcaaaagaaaaaaacacgctgtgtcccctctgtcccctttgaccaggaagtcaaaggcatggagctgcaggcggccggggccggttcctgctgccgctgctaggattgcacatccctggttcccccagtgagccgccctggacttgcaggaccagctacattagggtttcttgatttttcacctggggaagcagccttctattgtgttttttttttgttgtttttttttttggaaatgaagtctcactgtgtcacccaggctggagtgcagtggcgcgatctcggctcactgcaaggtccgcctcctgggttcccgccattctcctgcctcagtctcccgagtagctgggactactggtgcccaccaccgcgcccggctaatttttttgtatttttagtagagacagggtttcaccatgttagccaggatggtctccatctcctgacctcgtgatctgcccgcctcagcctcccaaagtgctgggattacaggtgtaagccgctgcgcccggcttgtgttttaattttactaatggtttgctttgcatactcataagtctgactgtaaagggctgtgtttctctactcagcactgtggatgttggaagtgaattgtggcctccctggagtcccaggcagttcccagactaacggtgctgcgctctgctatctatcctcaggtgcacattctccacccacccctggttcccggcaagtaccgctccctcctcacagactacatctcattggccaagacacggctggccgacctcaaggcaagctgtccctccatgcccactcctcacacctgtcccagcagaaactgctttgttttcttgttctcattctgtgtcttccctgaaggtttctatagaaaacatgggactctacgaggatttgtcatcagctggggacattactgaggtaatgttgcttgagccctgcagggtctcagccagtcacgcccaccatgcaaaggtccagtttcttttgactcttgagttgagtttttcagccttcccagtctcatgtctggtcttgcctcgggcgcagctgggggcgaggctctgcgggcctctgtgttgctgtgtcccaccttgtgtgtccccagcattggcagggaaagggttactgtgtggcagagtgaagtgcctcaggctgcaggacatttgtccttttgggagatcttggttcctgtggggttgaatggagaggtggttcgtcatgtttttctctgaatcacagaaaagtgttaactttttttttttttttggagatgcagtcttggtctgtcaccaggcttgagtgcagtggcgcaatctcggctcactgcaacctctgcctcctgggttcacgccattctcctgcctcagcctccagagtagctgggactacaggagccgccaccacgcctggctaatttttttgtatttttaatagagtcagggtttcgccatgttagccagaatggtctcaatctcctgaccttgtgatccgcccgccttggcctctcaaagtgctgggattacaggcgcccgccaccacgcctggctaattttttaattttttttagtagagacgaggtttcaccgtgttagccaggatgatctcgatctcttgacctcgtgatctgcccgccttggcctcccaaagtgctgggattataggtgtgagccactgctcctggccaagtgttaactgtttttatagcagccaaatgtcagatggtcatgtgatatgtgtgggtcactaatgaaaacattcttttttttttttgagatggagtctcgctctgtcgcccaggctggagtgcagtggcgcagtctcggctcactgcaagctctgcctcctgggttcacgccattctcctgcctcagcctcccgagtagcctatagtgggcctacagatgcctgccaccacgcctggctaattttttgtatatttttagtagagatgaggtttcaccacgttagccagtatggtctcgatctcctgacctcgtgatccgcccgtctcggcctctcaaagtgctgggattacaggcgtgagccaccatggccggcctaatgaaaacattctttactttttacttttttttttttttttgagacggagtctcgctctgtcgccctggctggagtgcagtggtgcgatctcagcttactgcaagctccgcctcccgggttcacaccattctcctgcctcagcctctccagtagctcagactacaggcacctgccaccacacccagctaatttttttgtatttttttagtagagatggggtttcaccatgttatccaggatggtctcaatctcctgacctcgtgatctgcccgccttggcctcccaaagtcctgggattacaggcatgagccactgtgcccagcgtattgtttttttttttttttttttttttggaatggagtctcgttctattgcccaggctggagtgcagtggcgcagtctcagctcactgcaagctccgccttccgggttcatgccattctcctgcctcagcctcccgagtagctgggactacaggcacccgccaccacgtcaggctaattttgtgtgtttttagtagagatggggtttcaccgtgttagccaggatggtctcggtctcctgacctcgtgatccgtctgcctcggtctctcaaagtgctgggattacaggcgtgagccactgcgcctggccctccattctttactttttaagacctttttattttaaagttacgagttactgaagaacacttataggtgacattaaagtgttaggtgaaaatatttaatataattttccatttataatttattgctgtttataaattactttttttttttttttgaggtgggatgttgttctgttgaccaggctgaagtatagtaccgtgatcacagttcagtgcagcctcaaactcctaggttgaaacgatcttctcaccttgacctcctgagtaactgggagtacaagtgtgcgccaccatgcctggctggtttctaaaattttttgcagacatagggtctccctgtgtggccgagactggtcttaaactcctgggctcaagtgatccttccgccttggccccccaaaatgctgggattacagatgtgagctgccgcgcctggcctcagaatgtttttttttttttttgatgcagggacttcccctgttgcccaggctgcagtagggtagcatgatgatggcttactggagccatgatttcctgggcacaggcaatccttccacctccacgtcctgagtagctgggaccactggctcatgcctctacacctggctaatgtttttgtatttttttagagatgagatgtcatcatgttgcccaggccgggcttgaactccttgggcttaagcagtctgccccgcttagcctctcaaagcactgcgtttatagacatgagtcatggcacccagccctcgtaatttcttttaatctcaaaaattaagtctctactccttcccacctagaaatctttactttcaactctttcctggaggcaggaaagaggctcacggcaggctctcagcagagctgagctctcgaggagggccgcacatcacggggtctgaaccttgtgtgtgtggaggtggcagtgtcatcctcccctgtcgtgctggtattttgggacattttggagtgctccagggcccctgctgtgcgcacagcatgtgggcctttacctttaatgtgtacagagcctttcaacaaggaagcacaggttgagtgtggccttcactgctcagtcttttctttaaagtcctctgttctttttcctttcctccctgtatgggaaccagccccacagccaagctcttcaggatgttgaaaaggccatcatggtgtttgagcatacggggaacatcccagtcaccgtcatggaggccaggtaggctgggctgccgaaaaggcctctagcagctgcagtgtgtgcagaccgcgctctgatgcctgcagtatgtgcagactctgctctgatgcctgcagggtgtgcagactccgctctgatgcctgccagcgtctggggctctttggagtgtgtcccatttctgcccagagccacatggggcaggttggccactgtctattcagagagagacaggagtcagggctgtgaatcgaggatcctgccgttaagggatacggggtgaggtcaagagctgtgcatttgctgtgaaacattttttcctctgtaaaagcaggtgatgcccctcccgtgctgaagcagccaacaggaactgctgattggggagcttgcactgggagggaaggcagtggggccatgatgtttttttttttatcaatgccttctttgtgaccaatatggagtcagtaacagagagctgaatagcacagctttattgaatttggtatgatctcaaaacatcttgaattctggtggttacacatgtggatgagctgattgcagctcccagggttttgaaatttagctccaaggaaattgccccaaatggaccttacatggtcctcgtggcctcagattgatccaggctccacgttcaagcccagggagcaggccgaatgtggtcctgattcccacggactcagggctgggctagcacggcctgccctacacatgccttgtcccggaactgtgcacaagaagacttcataatgcatcgtggctttggagtgagccctcgcagtccactctctgaaacaccggtcaccgtctgtgggaattgccttctcgctgctctgactgatgcactgtctgcttctctgtgttgcagcatattcaggaggccttactacgtgtcccacttcctccccgccctgctcacacctcgagtggtcagtatgcgtctccatgagtttgtgaccagttgtgtagaaagcaaggactttccttgtcagtctctcacaggtctcttctcttcccacagctccccaaagtccctgactcccgtgtggcgtttatagagtctctgaagaggtatgcagcaacggttagaaggggatgactacttccaggtttcttctgacaatgcgaagaattgtggatcttctgtagagaaatttgttagaccactattgtgttttattggtaaaatattggctccaaaattggttggttacttttttttttttttttttttttttttttttagttggagtctcactctgtcacccaggcttggagtgcagaggcgagatcttggctcactgcaacctccacatcttaggttcaagcgattctcttgcttcagcctcctgagtagctgggattacaagcctgtgcctggctaagtttttttttttttttttttttagatggagtctcgctctgttgcccaggctggagtgcaattgcacaatcttggctcactgcaagctctgcctcctgggttggagcaattgtcctgcctcagcctcctgagtagctgggattataggtatgcaccaccacgccctgctaatttttgtatttttagtacagacagggttttgccatattggccaggcggttctcaaactcctgagctcagaagatgatctacccacctcatcctcacagagtgctgggattacagatgtgagccaccgctcctggcctttttttttttttttttttgagatgaagtctcactctgttgcccaggctggagtgcagtggtgcgatcttggctcactgcaccctccacctcctgggttcaaggaattctcctgcctcagcctcctgagtagctgggattacaggcgcgcaccaccacgcccggctaatttttgtatttttagtagagacggggtttcaccatgttagtcaggctggtcttgaactcctgggctcaagcgatctgcccacctcggcctcccaaagtgctgggattataggcgtgagctaccgcacccggctgcatcattcttcagtgaaagaaaatgtttcagtacataatgattgtgcagagaggagaactgaaggaaaatgaaagagctctgggaaagcctcatgctgcagaacttgagagtagacctggaagttattgtttagaataataaggtatccttggatcacttacattgcaggtttctagtaagaaagttggttggtatcaaccaactttggaagaaataggaaagtataagtcctatattccagcaaaatttataaagttctgggacctgtaagaagataaacacaaagagccttttttttttctttttttgtatttttagtagagacagggtttcactatgttggccagactggtctcaaactcctgatcttgtgatccacccacctcggcctcccaaagtgctgggattacaagcgtgagccaccatgctctgcaaaaataattttttaaatcttaaaataagtttattctctgggatccttactttcatttgttttgagacagggtcccactctgtcacccaggctggaatgcagcggtgcagtcatggcttactacagccttgacctcctgggcttcaacagtccttccctctccgcctcccaagtagctgggtctagaggcgtgctccaccacacccagccagccttgatctcctgggcttcaacaatccttccccctccgcctcccaagtagcagggtctagaggcgcgatccaccacacctggccagccttgacctcctgggtttcaacaatccttccccctctgcctcccaagtagctgggtctagaggcgcgctccaccacacccagccattttgtaaatgctttgaggacacggattttcgctgtgttgcccaggcttctctctctcttggcctcaaataatcctcctgcttcaacttcccaaagtgctgggattacaaatatgagccactgtacctggcttaccctttatcatgttaagaaagttccctcttactaatttgctaaggatttttagcatgaactaatgcgttttatttttttttctttaatttattttttgagtcggagtctcggtttgtcagccagtctgcagtgcagtggcgcaatctcggctcactgcaagctccaccttctgggttcatgccattctcccacctcagcctaccaagtagctgagactgcaggcgcccgccaccacgcccggctaattttgtttttgtatttttagtagacacagggtttcactgtgttagccaggatggtctcaatctcctgacctcctgatctgcctgcctcggcctcccaaagtgctgggattacaggcgggatccaccgcgcctggcccaattttgcatatttttaatgacacgaactaaacgtttttcttagtattaatcattaaaattaacaaagattcatgttttgctgggcgtggtggctcacgcctgtaatcccagcactttgggaggctgaggcaggtgaatcacaaggtcacgagttcgaggccagcctggtgaacatggtgaaactccgtctctactaaaaatacaaaaaattagctgggcctggtggcaggcgcctgtaatcccacctactcgggagggtgaggcaggagaattgcttgaacctgggaggcggaggttgcagtgagccgagatcgcaccactgcactccagtgtgggtgatagtgggagactctgtctcaaaaaaaaaaaaaaaaaaaaaaaaaagaaaaacaaagattcgtgttttgaatttggaaattaccaaaaattgtatgagagaaatagaaataatttataatttcactgcccagggataatcactggtggtattttgtggtctagctccttagatattaatatatgattaatatgatatattttgaaacagtgctttttaaatctatatatattttttaatatttttttgtaaaaacaggctcatactgtacacagtatttataatttatttaaatttaatatgtttttattttataatagatttggggattgtaatcttgaattaatttaagccatagctgacttaattgtattgttttcctgtgatccagagcagataaaatccccccatctctgtactccacctactgccaggcctgctctgctgctgaagagaagccagaaggtaagttcctgggccgcttgtccactctgggacttgtgcttttccattttcctaaccttgagtgtctgttgtgctacaccacccgagtgagctcgggggtggctgtgccagctcaagccggtgctttgggtacagggtccgcccaccatgctgacgcccagtgccagctgtggcacagactcttacctgggggtcctgaagaatcacttagcaccttccggaaaggagtgtgtgcagtgcacagccccactttgtcactcgtcatcttcctgtgggccgcactgaggtgtttgtacaggcttcagactcgggtgctctctcagcggccaccttggggcccacagcgctggctcgagcctgtcgtagggagtgtcatgcagcacttttctgttgcacagtgcaggtaggagtagaagtcaggctcttttggcctgtggggagcagtggtgcagctgtcggtcagacctacgccctcattgggaatccgtgaaaggctgcactcaggcagcagtgggagatgccatcatgaggctggtttttcttgaagtgtgtggctttatctccagtagaagccagcatctccctgtgggagccgctatgagctgaagacatagatctgaggctgctgcttccctgtgggctttttttttttgagacagagtctcgctctgtggctgtggactgcagtggcgcgattttggctcgctgaaacctctgccccctgggttcaagcagttctcctgcctcagcctctgtaatagctgggattataggcacgcactactacgccttgctagtttttgtatttttagtagagatggggtttcgccatgttggacaagctggtctcgaactcctgacctcaactgatccgcctgcctcggcctttcaaagtgctgggattacaggcatgagcaaccgtacccagccccttgtgtgctcttctagatccccttccacctgcagggccagggaggctcgttgagatttttttttttttttttttttttttgagacagagtctcgctctgttgcccaggctggagtgcagtggcgcaatctcagctcgctgtaagctccgcctcccaggttcatgccattctcctgcctcagcctcccgagtggctgggactacaggcgcccgccaccacacccggctaattttttgtgtttttagtagagacagggtttcaccgtgttagccagaatggtctcaatctcctgacctcgtgatccacccgcctcggcctcccacagtgctgggattacaggtgggagcccccatgcccggccgacccaccctgagagcatgacctctcagttgtgctggggatgccacaggggcctcagggctgtgtaccctgcggtgtgaggcgtttgcttctcttgagaggtgtcctccttcccccaggatcctccttcccctggggtccacttgttcgtagcttttggtggcttccagaatggtttctaatcatttgtctgatgaggcttatgcacagactcctagagcctatgatttctagagcctgtgatttctggtttcattttggctgtggctgtgcatagcagtgcattttcatgcttgtgtcttctccagcaaccccagaacttgaaggttttttactttaaaaacatatgcagcgtatcttcctttttatattgaaagtggtggctgggcgcagtggctcatgcccgtaatcccagcactttgagaggccaaggcgggcaaatcatgaggtcaggagatcgagaccatcttggccaacgtggtgaaatcccgtctctactaaaaatacaaaaaattagctggatgtggtggtgcgtgcctgtagtcccagctactcgggaggctgaggcaggatgatttgaacccgggaggcggaggttacagtgagccgagatcgcaccactgcactccagcgtggtgacagagcaagagtccatctcaaaaaaaaaaaaaaaaaagtttgaggaaccaggggactaaatggtcacctatccgtgatcctgtccccaccctcgccagccctcgatcctccttgttttcttccgtgtgtatgcttctcacggtggtggagtggtattgatggtgcacacagaaccgctttttttcttaaacttgtttataaatgtaattttttatgaaactcgtttataattgtaattttcgatgtggcatccagcatcagggaagacacctcatttacctcctcagagactcccagtccctccgtctgccacacacagcagcttggaagttcacagctctgtatttgactgtgtgaagtttctatttttgcagtgaagagtcctgttgagtgtctttccatctggtttcttccttcttctcacagatgcagccctgggagtgagggcagaacccaactctgctgaggagcccctgggacagctcacagctgcactgggagagctgagagcctccatgacagaccccagccagcgtgatggtgaggatggatgggagctcatgctgtgtctcatgtgtgcagcctgtggttggagctctgtggctgggccattttccccatagtgacatcaggctggtgtgtcttcctagtagtccagtagtttaaagattgaccccgggctggcgggtgtggaaccttttttgagacaaggtggaaggctagtcctactgaagctgtcacagacccttggcagaaggtgaatattcggctagttgcatctgagtaggacgaatgatgatagagaagaaaacgcgtgactaggatgcctgttttcccgctcatcctgcctgccggagtcgatgtcacatcagacacacagggtctctgccctgtgatcctgcttccatgtgatggttttctgtaaaatccagagtaagaaatgttcatctgtggattgagaacatgcagtttcttttttcttttttttttttgagacagagtctcactctgtcccccaggctggagtgcagtggcgccatctcggctcactgcaacctccgcctcctgggttcaagcaattctcccgcctcagcctcccaagttgctaggattacaggtgactgcctccatgtctggctaattttttgtattttttagtagagatggggtttcaccatgttggccaggctggttttgaaatcctgacctcaggtgatccacctgtgttggcctcccaaagtgctgggatttcagtgtgagccaccgtgcctggcctacatggaggtgatatatatatatttttttgagacggagtcttgctctgtcacccaggctggagtgcagtggcgtgatctcagctcactgcaagctccgcatggaggcaatgttaacacagcttggttagcgctagctggggctgcagcgccttggcggtcttcactcagaccaagtgcgccagttcctgagtgcagccttccggtgattcaatgatggcttgtgcagaatgtggtacatgggggacatggaggaaaagttccagtgcttaagcaagaggttgatacatgtcaggtgagtcctgtttctaaaagcaaagcggttttcacctttaaatgatgtagttgggctatgtgtggcccatttccctgggccaacatggaacctctggcatgcgcttaggcagatgtggtgtctggagggctggcatgggatttcagatggggaggttcatgttggtgaatgaacatgtccccctctcagccaatcaggaaaaggtagtggatggcgtctggccccatttgccatgacacatgctgcaccacaaggctgcaaatcctgcggggcgaacaaacactggtgttcagcacctggctgggggatgtgtgcagtcagcaggatccgtggaatcgtacttgacgggaggcggagctctctaggccgcagctgtatccctcctttcggggttcttgtcatccctaactagtttcttccttcgcagttatatcggcacaggtggcagtgatttctgaaagactgagggctgtcctgggccacaatgaggatgacagcagcgttgagatatcaaagattcagctcagcatcaacacgccgagactggagccacgggaacacatggtaggtgtaggggctcagaacaaagcagggggtcttcaccattttccattaggcagaggcattagacgcatggagccttctctcaatttctgtttgacttgctcagttagtgtcgtatcagatgttccagggccaggcagcggtgtaccagggtcagctgccacagtctgtttgtgtatgaagagctccttttacattttatttatttatttaattttggagacagggtcttgctttgttgcccaggctggagtgcagtggtgcaatcatggctcactacagctttgacatcctgggctcaagtgatcctcttgtctcagcctcccgagtagctgggactacaggcgtgcatcaccacacccggctaatttctgcattttttgtacagttggggtttctctgtgttgcctcgactggtctagaagtcctgaggtcaagtgatctgtctgcctcagcctcccaaagtgttgggattataggcataagccacggcacttggcctctttttttttttttttttttgactgagtcttctctgttgcccaggctggagtggacgatcttggctcactgcagcctccacctcctgggttcaagcagttctcttgcctcagcttcctgggtagctgggattacaggtgcacaccactacgcccagctaatttttgtatttttagtaaagacagggtttcatcatgttgaccaggttgggctcgactgcctctttagaatatgcgacagaggctgtttctggccccaaaacctaaaatatttttctggccccttacacacaaggtttgccagtcccgcctgctgctgtagaattttgtgattggcgattacttgagggctgctattcccaagattggggaatgggggccctgggcaccagtttgcattgtaacatgccctccaaacaagcctgttttggaggtctttttgcaaagcagaattgcgatgtctgtggcgggagcgctggccggcttccttcctgctgctcccgtccccaggacaccacgctcatgagaactgtgtctctgcaggctgtggacctcctgctgacgtctttctgtcagaacctgatggctgcctccagtgtcgctcccccggagaggtgaaggcgcgggcagctccctgagtggtggggctcctctgggtgccacctcttgctgggccaagtctgcagaccagggactcatgagctcgtctccgcaggagcatgcggcgatgctgagtttcatcaaataggacgcagcagaagttgggaagcactgcagaagatgggttgtcttccagaaagaccactgttttggggaacagcttggctctttcttcggccgctggtggttggattagctgttggagggatgtgcaggactgaatggctagtactgatggtttcacggctgtctctgcaggcagggtccctgggctgccctcttcgtgaggaccatgtgtggacgtgtgctccctgcagtgctcacccggctctgccagctgctccgtcaccaggtgaggctctccttcatgggggccacccttgggggcccactctgagggccaggctgctacttctcaattcgtcttcagtgccctggaaaattccagcttggaagagggcagtctgctctgccaccctcattctcgttgcagggcccgagcctgagtgccccacatgtgctggggttggctgccctggccgtgcacctgggtgagtccaggtctgcgctcccagaggtggatgtgggtcctcctgcacctggtgctggccttcctgtccctgcgctctttgacagcctcctgacctgtaggacgagggattccttgttcttctgcctgaagtgagctcttcttccacagtcgcgtcttctctcctctctctcgaaaagtgacacatgctcgtttgataaaattagaagagacagacatgcagacataccacccaaagataaccactttttagcattttggtatatatccttccagaattttatctgtcatttgtttataatatgcgtgcgtttgtttctttgttcataaaaatgagatcatattatactaaactgctgaaattaatagtagatagtaactgtctatatcgttaagcattctttgatgtcctggtgagagctgctttgttttgtcttggtcccttgtctggcccttggttggaccagctccctctggtcaggttcttcggcaccccatggtgagtagcttcccagtgtgtacacctcgggctgtttctctagggctcagcagatggggccatgtgctgaggtgaggaaggaccctgtggttaagaatggtctgctcagtgcctcaagggctccctgcagctgccacgcacaggcagaagccaggacagaatcccttcagctgccactcagaggcggaagccaggacagagggctgggagactctggtgggagttgctggctggggcttggcttgtagcttctggtctcttgggcagaggtagcccaggtcgggacagagccctgttgcggtgccggagaccctgtgcgggaaaggggagatctgacattatgacagggtctgaataacagagaacttagaagaggcgcaagaaatgtacgtggagcaaggagagggagtcagatggcagctgtgcggatcccacacctcagacatgggcctcggggagcaggcactcggtactccggggatacagagtccctcctaggcgcttggccacaccagacagtccccactcaccccaggccccaaacactgagtactgggtgttggcatgagaggcacacagccaatggagaagttgggagctggtgaggagggaggcatccaggtggcttgggggagacagggccatcctctcttagaaacacagagatgcctcaggatatatatccaggtgaagaaagcaaaatactgaactcggtctcagatgctactttttgcataagaaagggagaatgaaatatatatttggtgtgtgttttgtttttttttttgttttttggtttttggtttttgttttgagacagagtctcactctatcgtccaggctggagtgcagtagcgtgatcttggctcactgtaacctccgcctcccgggttcaagcagttcttgtgcctcagcttcctgagtagctgagactacaggtgtgcaccaccatgcccagctaatttatgtatttttagtagagatggggttttgccatgttggccaggctggtcttgaactcctgacctcaagtgatctgcccacttcagttaggattacaggtgtgagcctccacgcccagctcaaatatgtattagtaaaacagaagtattagaactgtaagaacaccatgacagtgctttgacatctccattgcctcatggaatctcattctgagcttccttggttacaagtgagaatttttcacatgggtattgctgtaggtatgtatgttgagtaaatgacacaggtctcactgtgtcccccaggctgaagtgatcttcccacctcagcctcccagtagctgagaccacaggtgcacacccacacacccagctagtgagagatggggtctcactgtgttgcccaagctggtcttgaacttctgggtttaagtgatcccctgagctgtgattgtgcgactgcactccagcctgggcatcagagtaaggccctgtataaaacaaaaaataaaccgagggctgggccaggcacggtggctaacgctgtaatcccagcactttgagtggctgaggtgggcagatcacttgaggtcagcagttcgagaccagcctgtccaacatggggaaaccccgtctctactaaaaaaaattaaaaactcgactggttgcagtgactcatgcctgtaagcccagcattttgggaggctgaggtgggcggagcacgaagtcaggagatcgagaccatcctcgctaacacggtgaaaccccatctctactaaaaatacaaaaaattagctgggcatggaggctggcacctgtagtcccagctactcgggagactgaggcaggagaattgcttgaacctgggaggtggagggtgcagtgagccgaaatcgcaccactctactccggcttggcaacagagcaagactccctctcaaaaaaaaagcactaacaacaactacaacagaatcagctgggcatggtgggagatgcctgtaatcccagctacctgggaggctgaggcaggagactcgcttgaacccgggaggcagagattgcagtgagcccaggtggtgccactgcactccagcctgggcggcagagcaagactgtctcacaacaaacgaaccaaaaaacgaaggaccaatgctcaggccatccagttcggaatgcactaaattcagttttatgaaattcaaagtaactttttccttcatcccttattttgtatggattacatttatatgttataatttctgttttcagattttgtacagcagcaatttcttactctctctgcaagttttcttcccagtcacgagatactttgtgcagctgcttatctccaggccttattaaaaaggtaggttcactcttttcctatttttccattctgccatacgtttcaggtttacgcagctttcggaccggaaggccgaggtctgctgccgctttgtgcccatctcaggggcagctcctgggtcaggctggctgtcatggggcagctcctgagtcaggctggctgtcatggccacctctgctgtctgcttaggcagcctgactgctgagtgctgcctttccttgtgttctctgagtgtaaagtgaagttgtatgaagacaactacaagtctgtaattgtaatgaaatagatgttggcatttataggatagatgaattaaaagatcagtattcataataagtatctttccctggaaagaagaattcttattcctctcatctagtaaatgttccttacattgttcagacaaaggaatttttttttttttttgagatggagtcttgctctgtcgcccaggctggagtgcagtggtgcgatctcggcccactgcaacctccacctcccgggttcaggcagttctcctgccttagcttcccaagttgctgggattacaggcacgtgccaccatacccggctaattgttttgtatgttttttagtagagatagggtttcaccatgttggccaggctgttttcgaactcctgacctcaagtgatccacccgccttggcctcccaaagtgctgggattacaggcgtgagccgctggtgcccggcccagacaaaggaatttaaagatgagcattggaaaccctgaatgtcaaaagtaaaggtgaaatggcactgcaaaccagtgttgtccttttataggattttaatgaacgtctcgtgtataaaatagtggttttcaggctgggcgtggtggctcatgcctgtaatcccaacactttgggaggccgaggcgggcagatcatgaggtcaagagatcgagaccagcctggccaacatggtgaaacctggtctctactaaaaatacaaaaattagccaggcgtggtggcgcacgcctgtaatcccagctacttgggaggctgaggcaggagaatcgcttgaaccagggaggcaaaggttgcagtgagccgagactgcaccactgcactccagcctgggcaacagagcgagactccacctcaaaaaaaaaaaaaaataaataaataatggttttcaacttcaggcttcacattagaatcaactgagaagcttttgaaactatagattcctggcccctttccagataaattaagtcagaatctgggagcagcccctgaggatccagggtgcacgtatttccagttatttcctctgaggaactttgtccctggtgccaagtttttaaagaaaacatggagtttgagcttaggagagggcagcgtggttcccacccagcatgctgagcagggacgacagtccttggagcaggctggttataaacatgggaggctctcatctcctcgggggcagagatggacacggtcacgcagcaccaatagtgtgtctggcttgtccagttggtgtgcatttttggtgggaacgccattcctggcagaggcctagagatgggctgtttcactgcccgggaccaaaccagccctacccctgggaggcagttttgttcctgcaattctgcttccagacatttagctcaaggaagcagtcagatggcaggaaggtctgcacataggctcttccctggagcactgtgcacagccatgatcgctgaggggctctgcacccttccaggggctggactgaggtcccctgaacgtggggttgtgtgttgtgccctcccaggggctggactgaggtcccctgaacgtggggttgtgtgttgtgccctcccaagggctggactgaggtcccctaaacgtggggttgtgtgttgtgccctcccaggggctggactgaggtcccctgaacgtggggtcgtgtattgcgccctcccaggggctggactgaggtcctctgaatgtggggttgtgtgtgtgggctgttgatggtctgtttccacctgagcatttgctcagccactcacagtgaaacttgcgcaatgaagaaacggccgggtcactctctgtttcagtttcagttcctcatgttcagattgttctcagaggcccgacagcctctttctgaggaggacgtagccagcctttcctggagacccttgcaccttccttctgcagactggcagagagctgccctctctctctggacacacagaaccttccgagaggtgttgaaagaggaagatgttcacgtaggtgaccgttccttctcctgcatcatgccacgtcctgagtctagggtttgtgtgtgctcctcgggcaagaacagcagcacgtaggtgaccgttccttcccctgcatcatgccacgtcccgagtctagggtgtgtgtgtgccgactgtctcctcgtctcgagtctagggtgcgtgtgccgactgtctcctcagaggcaagaacagcagcacttagatggtttgattggaatcttgactaaaatcgttgtggcctcatgtgcagctcttaagaaattatacagatactgggcacggtgctcacacctgtgatcccagcactgtgggaggccaaggcgggttgatcacctgaactcaggagttcaagaccagcccgggcaacatagtgaaaccccatctctacaaagaatgcaaaaattagctgggcacagttgtgtgcacctttggttccagctacttgggaggctgaggcaagagaaatcacttgagcccaggaggtggaggttgcagtgagccaagatcacgccactctattccagccaggatgacacagcaagaccctgtctcaaaaaaatatattaataaatacagagaaaccctgctatactttctcagtttctcccaacacgaacttctttttttatttttactgatatattttttgagacaacgtctcgctgtgctcagtggtgcagtcttggctcactgcagcctctgcctcctgggttcaagcaattctcatgcctcagcctctccagtagctgggactacaggcgcctgccaccacgcccgactaattttggtatctttagtacagacggggtttcaccatgttgtccaggctggtcttaaactcctggcctcaaattacccacacgccttggcctcccaaaatgctggaattacaggcgtgagccattgcgcccgagaacttgttttttgttgttgttgttgttttgttttttttttctggtggagtcttactctggggcacagtggcgcaatcttggctcactgcagcctctgcctctctggttcaagtgattctcctgcctcagcctcccaagtagctgggactacaggcgcgcaccaccacgcctggctaagttttgtatttttagtagagatggggtttcaccatgttaggctggtctcgacctcctgacctcgtgatctgcccgccttggcctcccaaagtgctgggattacaggtgtgagccactgcgctcggcccctgggaacttgttttaaacatgtctgccaggctgtgtggtggtcactcagggtctctgggctcacccatgtgtgcctggttactggagctggcattgctctcaccagtgtgccttggtactgatttatttctgaggatgtttgcctggttgttttggtctttagaaaagaatttcaaggtggctgggcacagtggctcatgcctataatcccagcactttgggaggctgagatgtcaggagattgagaccatcctgggtaacacgatgaagccccatctctactaaaaataggaaaaagtgatccttctgctttggcctgccaatatgttgagattgcaagtgtgagccactgtgccaagccttttgtgaaattattttattatttttaaattattatttttttttttggagatggaatcttcctctgttgcccaggctggagtgcagtggcacaatcttgggtcactgcaacctcagccttctgggttcaagggattctcctgactcggcctcccaagtagctgggaccacaggtgcacgccaccgcgcccagctaactttttgtatttttagtagagatggggtttcactgtgttagccaggatggtctcaatctcctgacctcatcatcctcccgcctcggcctcccaaagtgctgggattacaggtgtgagccaccacgcccaaccctttttttttttttttttcgtatttttagtagaaacagggtttcaccgtgttagctaggatggtctcaatctgctgacctcgtgatctgcctgcctcggcctcccaaagtgctgggattacaggcatgagccaccgtgctcggcctcctaaaaatgtttttaaaaaacttagctggtcatggtgatgtgcacctgcagtcccagccatctgagaggctgagggggagaattctggagttcaggaggcagagtctgcagcgagctacgattgcaccactgcacacactccagcctgggcaacagaacctgtttccaaaaataaatgaaggtatgctactgtgaatagctgtagaatgttgttgttttgttagtttcttttttcttttttttttttttcctttttatagatagttctcactctgttactcactgcagccttgacctcctgggctcaagagatcctcctgcctcagcctcccaagaggctgggaccacacacatgtgccaccacacctggctgatttttaaatcttttgtagagacggggtgtcaccatgttgcctaggctggtgtcaaactcctaggctcaagcaatctgctggcctcagcctcccaaagtgctgggattacaggcatgagccaccgtgcccaggtaatttttaaatgagatgaggtcttactatgttgcccagactaaaatagccgttttatacttagaaagaaggattacagtactaacatctttgtgctagggaaatcctgtaagaaatcattcttgataaaactaaggtttctttcctgtggaactctcagctgcaatttcattataacacagggacatggaggactgcgtatgagatgaaatgacaaactggtttataaacctgtcggtggattgtgtgttctgtcctcattgtattgaattgcttgctctctttctcagttaacttaccaagactggttacacctggagctggaaattcaacctgaagctgatgctctttcagatactgaacggtaagtgttgaaaagagctaccctggccaggcatgatggctcacacctataatcccagcactttgggaggctgaggcaggagatctcttgaatccaggagtttgaggtcagcctgggcaacatggggaaactccatttctacaaaaaatagaaaagaaattagccggacatgcggcacgttccagtcatcacagccacttgggaagctgagcaggagcattgcttgagcctgggaggtagaggctgcagcgagctgagatcacaccactgcactttagcctgtgcaacggagtgagaccctatctcaaaagaaaaaggagcttccctttaaaatgttacacggttttccacattgccttaaagcctatgtttcgtcattttatcctcaatttaatgtttggtttacctgttaatctttgagcacaatttcaattttttttttttcggtggcaagatttattaaagcaaaagcgaaagtaaagcttccacgcggtggcaatttctgtttttctttttttttttttttttctgagacagagtcttgctctgtcacccaggctggaatgcagtggcgcgatctcggctcactgcaacctccacctcccgggttcacgccattctcctggctcagcctcccgagtagctgggactacaggcgcccgccaccatacccagctaattttttgtatttttggtagagacggggtttcaccgtgttaaccagggtggtctcaatctcctgacctcgtgatccacttgccttggcctcccaaagtgctggcattacaggcgtgagccaccgcgcctggccaggttgcccaatttcggttgttattcctttatttaagaaacatttactgagctcctaccatgtggcagacaattctagagtgttctagaagcagggagtatagaggggaataaacaagcctgcccatatggcacctttgtatcaatgagggcagatgtggcacgtataaggcacccacttagacttcaccctaccctggctgggctatggctgctgtccgggagctgtacacctgtgtccaggccctggcaacacacaggtagatacagaagtggattaaaggtaggaatgagccctggagataacagacagggccgtgtgagaggaaatgaccaggcaggagcagaggctggtgtggagcaggtggtgcagactttgaggagtgatgccagccttgacttgggggcaccaagaagtgggtaaatgaagcagtgaacccccatgagtcccagggctgatgactgagaccatttgagactatttgagaggccagatgtgctgttctgggcataggagtagggagcccagaggaccgttgggtttaagggtgtggagtttagggtggaggtcagggagaggggaatgtggtcactgcagatatggagtatcctggtgggtatatgggcctcagggtgcctgccacacctagactcaggagagggttggcaacagccaccctgtgctcctcgtccttccggccatcaggggccttccaggcacatgcagcactgtcgcctgcacctggatcctggtatcagattctggatgaaaccaatggaagtaataggaaaaggaaaacataggggccacaaaaagaaaactcgctgctgcctgcggcaaaacacgtgctgatggttcaggtcgtgccaagcccgctctgcaggcgcttccttcactcacccccgtttctcctcccggctgctctctggggtggagtctaaggaggaggtcagagggaggggcttgtctgctgcatgaggtcatgctgcatcaggtcaccgctgcgtggaagttgtgttgagatgtgttgcgggattttctttcttttctgaattacttaagtgatacttagatacattctgtgccagttccagacagtgtgggtggagcaccccagttccggacagcgtgggtggagcaccccggtcccggacagcgtgggtggagcaccccggtcccgcacagcgtgggtggagcacccaggtcccgcacagcgtgggtggagcaccccagtcccggacagtgtgaggagagcacacactccctagcactcacatttgcagggtcgtgtggagcgttttcctggttgtggctctttctgcataaatggattgcggtattgatggttctgtgcactgcggatttgtttgtttgtttgagacagggtctcactctgttggccaggatggagtacagtgatgcactcacggctcacggcagcttccctctccagagctcgagtgatcctcctgcctcagcctcctgagtagctgggaccacaggtgggcactactatgcccagctaatttttttattttttgtaggaatggggtctccctttgttgctcaggctgatgtcagactcctgggctcaagtgatcctcccaccttggcctcccacagtgctgggattacaggtgtagccactgcagttttgagtcagtgtctccttgagccccttcccatccgtatccacagagtccacagtctggatgcaggttgcttcaccatccccttctggtgggcctgtgagtagctcaggtgccctcaggtgactttccaggctactttttttttttttttttttttttttttttttagacggagtctcgctctgttgcccaagcaggagtgcagtggcatgatctcagctcactgcaagctccacctcccaggttcataccattctcctgcctcagcctcctgagtagctgggactacaggcgcccaccaccacgcccggctaattttttgtattttgagtagagacgaggtttcaccgtgttacccaggatggtctcgatctcctaacctcgtgatccgcccgcctgagcctcccaaagtgctgggattacaggcatgagccactgcacctgccccagcctacatttttgtgcttgcctattctgttcaccaagctcatgtgctgtgtggccagcagttaccccgtgggatgtcatcctgagtggcctttgatccgtggaaggtggggtcacaaaggtcactcctgagaccaggcctttcccacatccccaggcatcccaccctgcagacagtgaggtctcatccctactccaaggtcccgagccgccagtctcaacccagctctcactagtgctgtgtgtcccttactatgggcctattccctggttatggggaaccgctggccacgaagcatttctcagaattgatagcagtgtttgctgttctaggcaggacttccaccagtgggcgatccatgagcactttctccctgagtcctcggcttcagggggctgtgacggagacctgcaggctgcgtgtaccattcttgtcaacgcactgatggatttccaccaaaggttagcagcacacactgtattagggttctctggagggacaggactaataggatatatataaaggggagtttctggccatgctggtgcccatctaattagcttagggtgggtctgcctttcccagcctatacccaaatgtcagtctcctttggcaacaccctcacagacacactcaggatcaatgctttgcatccttcagtccagtcacgttgacactcagtattaaccatcacacaccgatgaggccttacttttaatcatggtagttctaagaatgcatttttctctcagtccaattttggtatgcaaagtacacttgagcctatcacatagcaaatctatgtcaatacaaaataaagccaagcttcctgcatcggttgtttctttatgtgtatagacttgtcagaagcgacaacttcgggctgggcgtggtggctcacacctgtaatcccagcacttcgggaggctgaggtgggtggattacctcaggtcaggagttagagaccagcctggcctacatggtgaaacctccctctctactaaaaatacaaaaattagctgagtgtggtggcgggtgcctgtaatcccagctacttgggaggctgaggcaggaggattgcttgaacctgggaggcagaggttgcagtgagccgactgggcgacagagcaagactctgtctcaaaaaaaagataaaaatagcaacaacgttgtttttctgttctgtcacctggtattcaaggtgagcatgtgtgaagcacggcacaaatggcctagtagatcctgggcatcacagcctctctccatctgagagggattctcaggacagagcagttcctgaggtgttgcatgtgggccagaaggatggacggagtgtacctggggctgtccaggctttgtccccaggggctcttgtttgcagcttcacactgttgtgttacagctgcagcattcagtacagatggcaagtgtgtatgcagcttccccccatgtctcctgcctgcggcaaccacgaatccattttatgttcatggatttgcctgtttgggatgtttaatatcaacagaatcatgtagtatgtggccctttgtgtctggcttctttggctgagcagaatgtttctgaggctcatctgtgttgtagcacatatcagcatacccttccttcttatggctgactgatgctcacagaaggtatggaggctgacgcacctccatcgtgggtgacttcttgttaaccctactccaagaatgcctcctgagatttcccatttatctgctgttaccttaaatcccactcttaggtcaaaacaaccttgaggctgggcgcagtggctcatgcctggaatctcagcactgggaggccaaggcaggcggatcatctgagctcaggagctcgagaccagcctggtgaaaccgtctagacaaaaaaaaaaattagccaggcatggtagtgtgtgcctatggtcccagctactcgtgaggctgaggtgggattgcatgagccggggaggcagaggttgcaatgagctgtgaaaacaccactacattccagcctgtgtgacagagtgagactccatctcaaaacaaaaaagcaaatcttccaccataaatccagcggttagattcacagagcattcttgcctttccctgaggggttgacttcaatagtccttccctgtggtatagaagccctgcctgggggtaacagtgcagggatgcatcgtctctctaggctgcctgagacatggtttctgtctgtaagtccttaaacgtttctgtctgagaaactggattattcagcctctcttcagccttccagcttccccagcctttatgggtaggtttgcacagagctgctcactgcggaacagaaagatcagccatattttgtttatccattcactttgtttgtttgttttttgagatagtcttactttgtcttatttatatttattttgaaactgggtctttctttgtcacccaggctggggtacagtgactgcagcccactgcagcctcgacctcctgggctcaagtgatcctcctgcttcagcccctcaagtagctgggaccacaggcaccaccatacctggcaaatttttgtagttgtagtagagatggggtttcaccatgttggccagactggtcttgaacttctgacctcaggtgatctgcccgcctcggcctcccaaagtgctgggattacaggcgtgaacctctgccaggcctgacttgatggtagccatcctagtgggtattaagtgctatttgatagtggtttcgatttgcacttccctaatgggtagtgattttgaacatctttccattttcttattggccattttagattttttttggagaaatctgttcacatccttagcccatttgaaaactgggtcacattcatgtactgcataagaatgttctggttaacaacgagccacatatatgacagtaatcccacatagccataattttttgtaccttttttttaaactgtgtttttaccgtaccttttctatgtttagatacacaaatactgttgtgttacagttgcggcatgcaatacagttacatgctatgccggtttatagcctgggagcggtgggccgtgccatgtggcctaggtgtgcgggggctctggtctgtttctgcgcggtgggccgtgccgtgtggcctaggtgtgcgggcggctccggtctgtgtctgtgcggtgggccgtgccgtgtggcctaggtgtgcggggggctctggtctgtgtctgtgctcttggatgttcacgtgatgaaaccacctaaagatgtgtttctcagaatggatccttgtcattgagcagttcatgactgtatttgtcttactgagttgtatgagttctttatatattttagataaagttcttatcaaatatatgatttgtaaatattttttcccattctgttaattcttttttcactctcttgatagtatcgtttaatgcacaaaggttttaaatttttataaagtccagatcatttatttttagtttagctctttaggattttgattcattttgatggatcagaaaacattttgggccagccacggtggctcacgcctgtaatcccagcactttgggaggctgaggcgggcagatcacttgatgtcaggagttcgagaccagcctggccaacatggcgaaactaaaaaaatacaaaaactagccaggcatggtggcaggcgcctgtaatcccagctactcgggaggctgaggcggcaggagacttgcttgaacctgggaggcggaggttgcaatgagcccagattgtgccactgcactccagcctgggcgacagagtgagagactgtctcaaaaaaaaaaaaaaaattgttgtgtgaggtcatccagctttattctgttgcttgtggccatgcagttgtcccagcaccatttgttgaaaacacttctttccccactgaatggtcttggcacccttgtcaaaagttagatggctgctcgtgtgagggtttgtttctggctctcattgtgttcccttggtctgtatgtccatatgcactgcgtcattgggatgaagctttgtagtaggttttaaaattgggaagtgtgaggcctccaacttggttcttctttttcaggatggtttggcttttctaggtgctttgtagttgtgtcttaattttgggatgagcttgtcagtttcgacaaaagtagctgggaccctgatacggactgcatgtggggcagtattgccatctcagtgatagcgagtcttctttccttttgaatcatttgttgctaacgtatagaaacaccagtgattcttgtatattcattggctctagtcatttattagttctaagagtgtttttgtatcgattccttagggctttgtatatataagatcgtgtctggccaggcatggtggctcatgcctgtaatcccagcactttgggagggtgaagtgggcggatcatgaggtcaggagttggagaccagcctggccaacatggtgaaaccccatctctactaaaaatacaaaaattagccgggcatcgtggtgggctcctgtaatccgttacttgggaggctgaggcagaagaatcacttgaactcaggaggcagaggttgcagtgagttgagatcatgccactgcaactccagcctgggcgacaagagtgaaactcagtctcaaaacaaaaaaacaaaagaaagatcatataatatgtgaagagagatagtttcactttttcctttcctatctggatgctttttctttttcttgttgaattgccccggcttgaactccccgggcagtgttgttttttttgttgttgttttgttttgtttttttttttctgagacggagtctcgctctgtcacccaggctggagtgcagtggtgcaatctcggcttaccgaaaccttcgcctctcaggttcaagcgattctcctgcctcagcctcccgagtagctgggattacaggcacccgccaccatgcccagctaatttttgtttgtttgtttttgagacagagtgtcgctgtgtgtcccaggctggagtacagtggcactatctcagctgtctgcaacctccgccttccaggttcaggcaattctgctgcctcagcctcccaataggtgggattactggcgtccgctaacacgcccgtctaatttttgtatttttagtagagatagggtttcgccacattggccaggatggtctcgatctcctgacctcagatgatctgcctgcctcggcctcccaaagtgctgggattacaggcgtgagccaccgtgtctgtccccagtgcagtgttgagtagaggcagcgacactgttctgagtgtagagaggacatccttgttgcccctgatcttaggagaacagctttcagtctttcctcattaaatctgacgtttgctgtgggttttcatccatgccaggcactagattgagaagatttcctttgttcctggttgattgagtgtttttatcacaaaaggatgtcacatttcgtcaagtgctttttctacatctattgagataatcttacggtttttgctttttattttattgataactgcgttatattggtttggggatcttaagctatccttgtgtagggaccagccccggagggtcggtgggtctctccctgtgtgcggcgatgagagagtgtagaaataaagacacaagacagagataagagaaaaggcagctgggcccgggggaccactaccaccaatgcgcggagaccggtagtggccccgagtgtcgggctgcgctgttacttattggatacaaggcagaaggggcagggtaaacaatgtgagtcacctccaatgataggtaaggtcacgtgggtcacatgtccactggacagggggcccgtccctgcctggcagctgaggcagagagggagaggagacagagagaaagacagcttacgccattatttctgcatatcagggactattagtattttcactaatttgctactgctatctggaaggcagagccaggtgtacaggatggaacatgaaggtggactaggagcatgaccactgaagcacagcatcacagggagacggtgaggcctccggataactgcgggcgagtctgactgatgtcaggccctccacaagaggtggaggagcagagtcttctctaaactccccgggggaaagggagactccctttcccggtctgctaagtagtgggtgttgttccttgacaccttttgctaccgctggaccacgatccgcttggtgacgggcgtcttcccagacgctggcatcaccgctagaccaaggagccctctggtggccctgtccgggcacaacagaaggctcgcactcttgtcttctggtcacacctcagtatatcccctcagctcctatctctgtatggcctggtttttcctaggctatgattattgagtgaggattatcataatattggaataaaaagtaattgctaccaactaatgattaatgatattcatatgtaatcatatctaagatctatatctggtataactattcttgttttatattttattatactggaacagctcgtgtcctctgtctcttgccttggtgcctgggtggcttgccacccacatccttgcattcttgggataagcctccttggtcatggtacataatttttgtatttcctaggttggggttggtagtattttgtggcagtttttgttgtttattgttgactaatgtgagggtcacactgtcagagaagcacagccatcactcagctccggaggcaggaggagaactgggaacttcagcactattaggcgatactgaggaggattttattgtattttcatttcagctcaaggagttatgaccactcagaaaattctgatttggtctttggtggccgcacaggaaatgaggatattatttccagattgcaggtgagtttgagggtgccacaactcagtgcattcacttcatttaagccgcgtgctattaagatatttattgccaggcgcggtggctcacgcctgtaatcccagaactttgggaggccgaggcaggcggatcacacagtcaggagatcgagaccatgctggctaacacgatgagaccccgtctctactaaaaatacaaaaatttagccgggcgtggtggcgggcacctgtagccccacctactcgggaggctgaggcaggagaatggcatgaacccaggaggcggagcttgcagtgagccgagattgtgccactgcactccagcctgggcgggcgacagagtgagactccgtctcaaaaaaaaaaaaaagatatttattgttggctcaggcttgtaatcccagtactttgggagtccgaggctggtggatcacctgaagtctatacaggtaggcagcatgtacctgtgtgggttcactgtcagtcaacaggcatttactggtgctggccacccgtgcgtcttctgtgccaggcccctgtctctccctccgccagctctggggcctcccaactccttagccagatgctttccctagacccacctggctccttctcagtgagaccatctgctttttcctcttaattgtaatcataattattattattattgggacagggtcttgctctgtcacccaggctagagtacagtggtgcgatcatatctctctgcagccttgacttcctgggctcaagcaatcctgacagcgtgcacctgtgtgcgccaccacacccagctgattttttgtagagacggagttttgccatgttgcccaggcttgtctcgaactcctgggcccaagtgaaccacccatctcggtctccaaaattgttggattacaggcgtgagccactgcacctgatctttattcttctttaaaaaatacagccggccaggcacggtggcttatgcctgtaatcccagcactttgggaggctgaggtggctagatcacttgaggtcaggggctcaagaccagtttggccaacatggtgaaaccccatctctactaaaaatacaaaacactagtcaagcatggtggtgtgtacctatagtcccagctactcaggaagctgacttaggagaatcagctgagctcgagagtcaaggctgccataagccaagactgcactgccgcactccagcctgggcaaccggactgagactgtcctaacaacaacaacaacaacaaaagacttgtgaggcaaaaatgatgtgtggggtaaaatgttagccagaggttaatctgggtgaagggcacatgagtgtcctcctgctgtttttttttgttgttgttttgttttgttttgtctgtttgtttttgagacagagtcttgctctggagtgcagtggcgggatcttggctcactgcagcctctacctcccgggttcaaactattctcctgcctctgcctcctgattagctgggattacaggcgcctgccaccacacccagctaatttttgtatggctaattttgttggccaggctggtcttggactcctgacctcaggtaatccatctgtcttggcctcccaaagttctgggattacaggcgtgagccaccatacctggctgtttttttttgtttgtttttttttgagacggagtctcactctgttgcccagtctgaagtgcagtggtgcgatctgggctcactgcaagctccacctcccgggttcacgccattctcctgcctcagccgcctgagtcgctgggactacaggcacccgccaccatgcccagctaatttttttgtattttttagtagcgacagggtttcaccatgttagccaggatggtctccatctcctgacctcgtgatcctcctgccttggcctcccaaagtgctgggattacaggcatgagccaccacgcccagctgttttttcttaattgataagtagttgataagtagtactgtaactcctgggctcaaggaatctgcctgcctcggcctcccaaagtgctggcattacagacgtgagccacagcacccggcctgcactgttctatatttgcaatttcaaagtgatttccaattgaaatagcttgccccacttgttccttcttgccctgtccactgtggagacctctccctgacccctgacgtctgggtccccgactggctgggcagtgagccccgaggccttcctgtgccagcatactgctctttttcaggagatggtagctgacctggagctgcagcaagacctcatagtgcctctcggccacaccccttcccaggagcacttcctctttgagattttccgcagacggctccaggctctgacaagcgggtggagcgtggctgccagccttcagagacagagggagctgctaatgtacaaacggtaacacctactaccacctgggcagggcagcaccacctgggcagggcagcatctcatgacggtcctagaggttctttgtagtgagtttgtttcccgttacttacttgtctgtgtgtccccaccccaagcctgtccatttctgtggcacatgccacggagaagaggatctggagggttgaaagtacttttgattaaaaccttccagccaagcgaggtggttcatgcctgtaatcctagcattttgggaggctgaggtgagtggatcacctgaggtcaggagtttgagaccagcctgaccaacatggcgaaacgccatgtctactaaaaatacaaaaaaaatacaaaaaaatttagctaggtgtggtggcgggcacctgtaatcccagctactcgggagactgaggcaggagagtggtgtgaacctgggaggcagaggtttcagtgagccgagatcacgccattgcacaccagcctgggcaacagagcgagactctgtctcaacaacaacaacaaaaccttcctgctcagacgtggagggacgtcgcagaaggagctcttgtgaaagtagggaaaagtgttcagaaatgcccacggcggctgcatttataagaagcagcgtggagtcatttaattttacagtcatagggaattgcttcactagacagactggtgcgtcatccacttggttatcgtgtaactgtcagaagttgttggttattatgtaactgttaaaagttgtttgtttggtaacacattttgaatgcagtgggccaaacacagtataggggaggtgggctcagagtgcaggctttggatgggacagagggacacaggccaaggctctggttccaacagtggccctgggtttcagggtggtggttgctgctctgagagtctgagcccttgggaaggagcagagtgtacgctgtgctgtcgccaccaatacagccccttctttccaggatcctcctccgcctgccttcgtctgtcctctgcggcagcagcttccaggcagaacagcccatcactgccagatgcgagcagttcttccacttggtcaactctgagatggtaggtgccccgtgtgcacgtgtccgtccgatctgtcagtgcctgtggcgctaacagcagctcttgcagcctccatgcgtgtactgaccgtgtgaattactgaggaaagggttcaaagtcaaatagggaacagtgtctggaatgccatgtgagggaggaccccacccacagccaggacggcgaccagcacatcaccaaaccagctgtaggttgccttctcccaagtttgagttcctttagtttccctcaagttttaatgattttgacacatggaatcgtacagaccattttgtgtgccacgcacctcggttcatttatttctaatctcaacatgcttcatgtgtaaaaaaagccttgtggtgatctgactaccgctgttgcctgccaggcagcccagttatcttccattttagacactgcccagcgtgagttgcagggtgatcttaaccagcaggctgggtgcggtggctcacgcccgtaatcccagcactctggaaaggtgggggatcacttgagcccaggagttcgagaccagcctgggcaacatgacaaaaccctgtttctacaaaaaatagaaaaattagctgggtatggtggtgcacgcctgtactcccacctacttgagaggctgggtcaggaggagtaattgagcccaggaggcagagttgcactgagccaagatcccaccactacactccagcctgggtgacagagcgaaactcttgtctcaaataaaaagaagtgacactcgctgtggggacgggcagcgtagggacccagttggtcagagctggggagacggataccagcccctcccactctacagagagcagcttctgctcccgaaggcctttttcttgtttttgaagatgcacaaatgtgagagatggaattcaggttccatgccagctgtgcagcattttatatttttatttatttatttatttatttattttttgagacagagtcttgctctgtcgcccaggctggagtgcagcagtgaaatcttggctcaccctgcaacctccgcctcccaggttcaagcgattctcctgcctcagcctcctgagtagctgggactacaggtgcctgccgccatgaccggctaagttttgtatttttagtagagatgacgttttaccatgttggtcagtctggtcttgaactcctgacctcgtgatccacccgccttggcctcccaaagtgctgggattacaggtgtgagcccggccttgtgcagcacttcaaaatgtgacaaggaaagcagaggacgtgagactagcaaaagctttcagaaaatcactatggtctcctttgaattcttatgaatggctgtttttcagaaagctctcagttggcacgtgacagccgacagacaggaaaacaccatagacagcacttggttagtgaagggaccagaggatggttggcccttggtattagtgtcgtcctcaccacagttctacgctccgggtgcgtccccttccctgcggctgcttgtgcctccctggcttcttcctggagcctacaagactgtttgggccagagctggtgggctgcaggatctggccgcccagggaagccgttaagtttcaggacagcacagccagggcgccaggcccggtcagcccaggagcaccatccatggtggccacgccaagccttagcgagtgtttttctcaaaactgaatccacagcagccactctgcatgttggtctcgcctctcttcctgtgggcttttcttacctgccttgaactcttttgcagagaaacttctgctcccacggaggtgccctgacacaggacatcactgcccacttcttcagggtgagatgctccctcagcccctctcgtggccttctcagaacgccgtgggtggatcctcctgtcagcttcctgtgagttccttcactctactagttgtgggtcctcacaaaccgctgacctcctgctgcgttctctcctgcagggcctcctgaacgcctgtctgcggagcagagacccctccctgatggtcgacttcatactggccaagtgccagacgaaatgccccttaattttgacctctgctctggtgggtcagctgtcttgtttggtgttttgttttggggatgagtgggagactccacagctgcctctggcatctctgcagcacgtctccatcacgggtgttaccatctcagggaaaatgcatcaggagacatggaagccacagttaaagatgccagctcatagcagatgagggccgcacatcctgagttcccagaaccgtccctgcccccaccgccgtcaccatggcacccgcaggacttctcccctgtggaccccactcagaccccacgggcaccttcatgtccacaggggtgcagggcttgtttgttcacggtcttgggttgtgcactggctggaggctgtacggtggctgcctgtgccccgtcacgagagcatgactgtggcccacttgcgcctgactatgctttcttgggacttcggagcagagacttcacctcagctcccgccagagctcagcaggctcccctagcagcccagggtcccgagagtgggaggagggcagcatttccctcacttccctggcggctcacttagtcctgaagaccacagctgtcgcccttccttctcggtcatcagggacaggagggcctttttctccgcagcacggcatgttccccagggagctccccaagcaggctgcatttgcaccgagttgtagctcagttggtggaattcgtgagaaatgaactcttcggtgtttagaacgccacctctcagctgagggcatccaaggaccaggcattcccagctcagggcagtgtggtctcttcactgtttcgttcccagctcagaggagtgtggtcccttcactgtttcgttcccagctcagggcagtgtggtcccttcactgttttgttcccagctcagaggagtgtggtcccttcactgttttgttcccagctcagggcagtgtggtcccttcactgttttgttcccagctcagaggagtgtggtcccttcactgtttcgttcccagctcagggcagtgtggtcccttcactgttttgttcccagctcagaggagtgtggtcccttcactgtttcgttcccagctcagggcagtgtggtcccttcactgtttcgttcccagctcagaggagtgtggtcccttcactgttttgttcccagctcagaggagtgtggtcccttcactgttttgttcccagctcagaggagtgtggtcccttcactgtttcattcccagctcaggggactgtggtcccttcactgtttcgttcccagctcaggggagtgtggtcccttcactgttgcgttaggccaggctcttccttctccaaattccacgtcttccatgagtgtgggtaataaatgcctcatggaactgctttgagccttaattgacgtaaaaaatactggctttggagttccagagcgcagggcgagtgtgggcctgtagtggcctgtaggagcactgggggcttgtcatggctggggcagcggaggtgtgtccatctcagccaccctcatctgtgtgctggtgctctctccataggtgtggtggccgagcctggagcctgtgctgctctgccggtggaggagacactgccagagcccgctgccccgggaactgcagaagctacaagaaggccggcagtttgccagcgagtacgtgtgggtggtgagatggggtgtgcccgcccagatgcacttcgggacctgctcaaggtcatctcctaaacaccctggcttgcttgagagaagcggtgtgggcagcctctcgtgtgagcagggagaaaagaaccgagttctcgtggtggtgggcgcctgtaatcccaactactggggaggccgaggcaggagaatcagttgaacccaggaggtggagtttccagtgagccgagatcactccaacggccaatagagcaagactctgtccagaaaaaaaacaaaaaaaaaaacagcctctgccagtgtctcgtctgagtgaggaacggcctctcccaggctcccgtctgagtgaggagctcgagtgattcctttgcacctgctccccttcctcttaaatctaatgtgggctcctagagtgcaccgcgtgctggtagggtcagtgtcatggggacctcagggatgcagattctcagcctaccctgacctgtcgaccccagtcagatattcacgggtccttgcaaaccatcaagctcctggcgcaatccaggctcacacacccttctgaggaccacagagctgacagccactccacctgctgaatgtgggtgccgtgttcttaaggggtcgtcagagggcactgctagtacccatcctgcctccttggagaacaccttactttgtgactagttttgaatcactgatgccacaccgggtcccctcagggtttggctgctcgccgtctgctgaaagaagagaagagggccccggcgcggtggcgcacacctgtaatcccagcactttgggaggccaaggcaggtggatcacctgaggtcaggagtttgagaccagcctggccaacatgtgaaacaatctctactgaaaatacagaaatgagctgggtgtgatagtgtgcgcctgtagtcccagctactcaggaggctgaggcaggagaattgcttgaacccaggaggtggaggttgcagtgagccgagatcatgccattgtagtccagcatgggcaatgagagagaaactccatctcaaaaaaggagaaagcaggtcacacctccagttctaattctacaaacacagatcagattgtctgaagttttgttttttgttttgttttgtttgagacagagtttcactcttgtcacccaccctagagtgagatggcacgatctcggctcaccatgacctccgcctcccaggttcaagcgatcctcctgcctcagtctcctgagtagctgggattacaggcgtgagccaccatgcctggctaattttgtatttttagtagagacagggtttctccacgttggtcaggctggtctcgaactcccgacctcaggtgatctgcctgcctcagcctcccaaagtgctgggattacaggcgtgaaccaccacgccctgcctcgtttttgtttatttgagattgagtctcactgtgttgcccaggcagatctcaaactgctgggcttaagcgatcctcctgaagtgctatgattgcagatgtgaaccgtcatgcccagcttatttaaagtctcttaaaccacagcattgtttcattaatttcctaccaattttttaaccagccagaaaactcagacaccacactggggccagagccaggcagtcctttgttctctgttgtaggagggaatgcctgatccacagggccaggcatgggcaactgaggaaaatgaggcctcttcttccaaaatgtaggcagctggggcccaagagcacagggcaaggtagacaggaccaggccagctgcctgctcagtcagcagctctcagaacgccaggatgctgtgggggcagcaccagcacctgcccacactctcacgtggacctgggggatgcagacctagtttctgatggtcctgaaacccttctctgtcctctgatggaaaggcaggccccaaaggtgacaggtgggaataaggacttggtttctatggcgtggttgtatggttgtaaggccctgcaatgaccccgttctctctgtcccagtttcctctcccctgaggctgcctccccagcacccaacccggactggctctcagctgctgcactgcactttgcgattcaacaagtcagggaagaaaacatcaggaagcagctaaagaagctggactgcgagagagaggaggcaagataggaaattcttttactgatttattttctcgcaagcttggtttcaatcagtgctatttctctgggcttgtctgatgaactgtttttctaaagacaaatatgtggcttggagcaagactttttttttttttttttttttttgtatttttagtagagacggggtttcactgtgttagccaggatggtctcgatctcctgaccccgtgatcctcccgccttggcctcccaaagtgctgggattacaggcgtgagccaccacgcccagctggcttggagtaagactttgactatcaagtttactagtaaaaataataatttcagttttttaaatggttgtatgtagttgagacagggtctcactgtcgcccaggctggagtgcagtggtgcagtcagctcactgcagcctcttctgggctcaagccatcctcttacctcagcctctggagtagctcagactacaggtgtgtgccaccatgcccggctaattttgtaattttttctgagatgggggtctgtagtccaggcatggtggctcatgcctgtaatcccaacacttagggaggccgaggcaggcggatcacttggtgtcaggagtttgagaccagcttgggcaacatggtgaaaccctgtctctactaaaaacacaaaaattagtcgggtgtggtggtgcgcacctacaatcccatagcctgtaaagctactcaggaggctgaggcaggaggatcacttgaacccagggggcagaggctgcagtgagccaagatcacgccactgccctgcagtctgggtgacagagcgagacttgtctcaaaaaaaaaaaatttgtttaaagtaaaaattaaaagagatgggggtctcactgtgttgcccaggcttgaagtgcgtttcttcagcttatttttatcctcatcacagcccagcgtaaatgctgtcagccttcaagtggtgccttctgtgttcatgctgcagtagccttgattcatgtgctgagggacagccccagataagcttgcagtgagacagctcagacctggggtgctggggacaagaggcagcaaggatgggaccgtctgcagccataggcatagggaaaggagtgggagaggctgctcttgaattccaggccagggaccatgttcgactcagacccactgcccacctggttgctgcaccctggaaagcctgactgcccccacaagaccagtgacacccacacagctctctgtgcagggagccaagggtggtgtgtgcagaacaggaacagaaacaagcatcccacaagagagctggaggcagcagccctctgtgcccagcccgagatccgcaacgcataggtgccatgtcagcacacaacttacaccagctcaaagctggatcgacagcagcgcccagggttttggtgattataaccaccctgcaggggttcttctgagtacgtcttcaggtttcttgtgtagttttgttagaagggattttagtggctccagggccttaggaccctagtgtgcagcgaggagtgtccacagagaccctgcccagtcaggccctactttaggctggagcctgtgggcttatcttcaaggattttacaaacacttctgacaggaggccttgcagggagatgatgctgagttgggactgcgcacagccaaggagaccgcagcagtcttctctttctggctcttgtcactttttcaaactgtttctagctttgtttaaaggcaagtgtgaaatgacccagccagtagtaattaattctcaattaagctgtctctctagaagtgattggaaagttttctaagatccacttaaaggatttatggcctagatgtaaaaaatttcaattaaagaggaatgtgtcagccttatttagaatgacagcacaggtaattttaatgtaataataagtgcacgtttttatttacagctattggttttccttttcttcttctccttgatgggcctgctgtcgtcacatctgacctcaaatgtaagtcagaccttaccagccaaggtgtcctctcccactgtgggccaggcaggggcaccaggcagccagcttccaagtcagggtttccagactagctcaggagctccttgtgtttgcggaagtgtgagtgagaactcccaggccgtgggttttttttttttttttttgagatgggggtctcactctgtcacccaggctggagtgcagtggtgtgatctcagctcactgcaacctcagcctcctgggttcaagcaattctcctgcatcagcctcccgagtagctgggattacaggcgtgagtctgtcacacccggctaatttttgtatttttagtagagacggggtttcaccatattgccaggctggtcttgaactggcctcagtgatccgccgacctcggcctcccaaagtgttgggattacaggcatgagccactgcatccggcctgtgggcctttcttttaatgtcttatttgaggacgtggtgcagcagccttggtgtgggtgctcgaagtccctggcctcctacctgagcctcttctgtccagaggcccagtattaccttctataggtaaaactgtcaccagttttaagacttacaataagcaaagaggaaatgccctcttctgtgctgagggctgtaccctcctacccatgggagcaccaggtcggccattctcagggttggtctcctgcggtttacagagcaccacagacctgccaaaggctttccacgtttgtgcagcaatcctcgagtgtttagagaagaggaagatatcctggctggcactctttcagttgacagagagtggtaagaaacacgctgctgaggcacaaatgcggagggccgctcttttcagaggcatcttgcaaatggttaagaacgagccctccttgaggttccttgctaagtaagtttataagctccattttagttgggacagattaagcacaaacttgtttaaagcaataagataatttactggctcactggtcaaccccaggaccaatgggcctatcatggggactgcctctctctgcaccacacccaccctcctgcaagaggtcgacccccccatcctctcccagctgctgacaggtacctgggtatcctcagctcaggctgttcgccccacactatccccacagccaggcctcccagggtacacgtcccgacccccaggggtgtccccagcactgataataggcagagatgtccagagttgcctgagccacttcttggtgttgcagacctcaggctggggcggctcctcctccgtgtggccccggatcagcacaccaggctgctgcctttcgctttttacaggtacctccacccacagggctggtcagggctgggcagtgtttcccagacccccatctcagcacctctgggtcccgccagatgggaagggttgtctgtgcctctgctccacagatgagcagtatcccttggcatcacctgctacctttccagcagtctgtagccatttgtcactatgtctttacctctagtcttctctcctacttccatgaagacgcggccatcagggaagaggccttcctgcatgttgctgtggacatgtacttgaagctggtccagctcttcgtggctggggatacaagcacagtttcacctccagctggcaggagcctggagctcaagggtcaggcaggtgcaagggccagtcccacctccaggggagctccccccagccggaggctccttctgccaaagaatgttccggcacagcatgcagactatgggggacacaccagccctgtttctgtatgtcttctaacctgtgagtttgcctgttttctctctagggcaaccccgtggaactgataacaaaagctcgtctttttctgctgcagttaatacctcggtgcccgaaaaagagcttctcacacgtggcagaggtaacgtcaagatgcccaccttgggccatgtgggggacatgagaattgacagctgcctgggccatgtgcctgcctggctggcaatacaactcgactatttctgccagagcccctcccctgtggtctgaggcctagtgggcggcatgggctgaggacctgctcctctctcacagctgctggctgatcgtggggactgcgacccagaggtgagcgccgccctccagagcagacagcaggctgcccctgacgctgacctgtcccaggagcctcatctcttctgacgggacctgccactgcacaccagcccagctcccgtgtaaataatttattacaagcataacatggagctcttgttgcactaaaaagtggattacaaatctcctcgactgctttagtggggaaaggaatcaattatttatgaactgtccggccccgagtcactcagcgtttgcgggaaaataaaccactggtcccagagcagaggaaggctacttgagccggacaccaagcccgcctccagcaccaagggcgggcagcaccctccgaccctcccatgcgggtgcacacgaagggtgaggctgacacagccactgcggagtccaggctgctagaggtgctcatcctcactgccgtcctcaggtgggttcgggcttcaccgcctggccctctgtggtcacagaggggctcggtggcccaggtggtggttccgcctccaggggcagggccttgtcctgggtctgtgtcagcgggtgcaccatggacatgtgtacattgaggttgtgggccttctcaaaccgccggccacactggtcacaggcaaagtccagctcagtctcagccttgtgtttggtcatgtggtacttgagggatgcccgctgcctgcactggaacccacagacctcacacctgggggacagaggcagataagaaggtgcgagggccacagccctgggagggggtcctgactcacacttactgcaaaggcttggctcccgaatgtcgcatttggtggacgagaaggtgcttccgctgcttgaaggtttgtccacattcgtcacagatatagttccgcacctctgagaggggagagtccagtgagtccaggcccctgatgctccaacctcccggggggacgacgatgacaatgtgaaaccatcacagctgggaagacatttctgcacatggttcaccatgcagtgggcccaagcaaggggcctatgagggcctcgtttattaagatctttaaactgctttatacactgtcacgtggcttcatcagctgtgtgcatttcaggatggtttttaaagaaacctcagaaagctatttccttaa

SEQ ID NO: 1183 - DNA, 4274 bp, Homo sapiens
ccgggagccacgtctccgaagaccgatagctgcttcgggattggcgtccgggcggctatctaggggctgctgggaagatggcggactcggtggctagccgatgaggaggccgcggggggaacccggcccccgggccccgagaccgactgagggagcgacctgcgcagggcccggggagtcatgtaggggtggcgcctgcggggagggctgcgggagggcagcgggagctggtgttagcggcagcggccacggtctcctggcgtccctgggccggggtgggtgttggggcccccgacttcgccgactccgcgccatcgcaaagcggtgcactcgggctccacgcgcgccctgcgaggtgggcgctgcgttttcatttcacgggtgaggagacttagagagacgaagccacttgtccaaggtcacgccgctggtgagtgggagcgcccagcatggaacccagcaccgtccagccgcggagcccgcgttccaccctctgtgccgccgccgcctcctgtgggagagggaggtggtcgggagagtgcacgccggtgccgcctgggctccagactgggcgcgaccactaacccggttaatgacctcgggcttaacttaaccccttcgctgctctgggcctgcgtttctccaccggtgaaatgaggtaatgccagccctgcctactcttcatgggcgtgtaaggagcatcagagatggtgcatgtggaattgctttgcaagtagtgctgcgctgagcgcactgaggattatgattgctgtttcaaaggcgtggaaggaggcagaggggcggggtggggaagaggcccagagcagtcacaaaggcttgctctgaccacaggccccctaaatgaggagtgaggtaagcagtaggtagcaggtctttctcccctttggagaaaacctcacccccttttttgggctgcccctcagggtctccatcacccaactccatgcttcgagtcctgctctctgctcagacctcccctgctcggctgtctggcctgctgctgatccctccagtacagccctgctgtttggggcccagcaaatggggggaccggcctgttggaggaggccccagtgcaggtcctgtgcaaggactgcagcggcttctggaacaggcgaagagccctggggagctgctgcgctggctgggccagaaccccagcaaggtgcgcgcccaccactactcggtggcgcttcgtcgtctgggccagctcttggggtctcggccacggccccctcctgtggagcaggtcacactgcaggacttgagtcagctcatcatccgaaactgcccctcctttgacattcacaccatccacgtgtgtctgcaccttgcagtcttacttggtgaggaggggcttgaggtgggcgcctggggggctaggtgttaatgaagaatagggagaacagtagaggaccacggacagagacccagcctctcaggcgtttgcccaggaacgcttgctcctgctcccgtcctatgtctgcggcagacatcatgagtcgaacgcactccttccggcctcgctagggtgccaccccagattcctgctaatagagtgccctaggaagccaccataatttgtcacaattggtatgagatgaaagcctatttgccatctttgtatgtactccctacaaaccgtttcgatacctcatagccacatgatactttacatgtctctagtgtttgcacttaaactctagcacaccttcccgctcaggaaacgggagaggagaaaggtggagaattcaccaagtaaccccatgataagaacagcagcacagctctgttaccaggctgccttttacctctccccctcaggctttccatctgatggtcccctggtgtgtgccctggaacaggagcgaaggctccgcctccctccgaagccacctccccctttgcagccccttctccgaggtgggcaagggttggaagctgctctaagctgcccccgttttctgcggtatccacggcagcatctgatcagcagcctggcaggtgctggagggggttaaaatcagatgggggtggggagggctgacaggaggaggaaggtgggctcagttggctgggctgaggtggaattgagccagccggaggtccggctgaggcccagcgtgacaggctgctcttcacagaggcaaggccagaggaactgactccccacgtgatggtgctcctggcccagcacctggcccggcaccggttgcgggagccccagcttctggaagccattgcccacttcctggtggttcaggaaacgcaactcagcagcaaggtgggcttgccacccaccctccagtgcatctctgtcattctcagggaccttgtcaggcccagcgcctcgtgcagctcggctatccttttcctgaagcagacacaccctctctgtcccctgggacctgcatcttttctacaccctttctgtggcttgcccacctcctgtcagcagcatgcattcctggaaatctgcagtttcccaaagcactcttagcagcatcctagctccacccatccctctcgaagtcttcagggccagaccccacagcgatgtcccctctgcctgtctggtgattagtcacgtgcagctcgtgactgctttgctgttgaactgtgaggccggagggactgtcctgtctttacagcagtgttgtaaacctgagggctaagcctctctaaggcttagcttgtaaaagatgactgcagaaatacttgacactgggtaatgaactgctcttcctccacaggtggtacagaagttggtcctgccctttgggcgactgaactacctgcccctggaacagcagtttatgccctgccttgagaggatcctggctcgggaagcaggggtggcacccctggctacagtcaacatcttgatgtcactgtgccaactgcggtgcctgcccttcagagccctgcactttgttttttcccctggcttcatcaactacatcagtggtacgcagccaggatggctggctgggcccctgagggctggagaggcaggggagcagggtggcctgcagcccagagccccagtccccgcctccccacaggcacccctcatgctctgattgtgcgtcgctacctctccctgctggacacggccgtggagctggagctcccaggataccggggtccccgccttccccgaaggcagcaagtgcccatctttccccagcctctcatcaccgaccgtgcccgctgcaagtacaggtggatggggcagcctggggcaaggggaggggccagcctgggaccagcagagtggaaaagccagagggaccatgaagcgccaaagctaaggagctctcggccaccataaaactgggccctgaagcagcagagggctttgcccagggtggtggcactagactgggacagattaggatgaggtgccgggcccttcctgctactggtgtcctttctcctcagtcacaaggacatagtagctgaggggttgcgccagctgctgggggaggagaaataccgccaggacctgactgtgcctccaggctactgcacaggtgagcaaggggcaggcggcaggcccggggagacggagccctggctaaggccgccggccctgctcccctccagacttcctgctgtgcgccagcagctctggtgctgtgcttcccgtgaggacccaggaccccttcctgccatacccaccaaggtcctgcccacagggccaggctgcctctagcgccactactcgagaccctgcccagaggtaaaggaggcagggtgggggagccctggccaccttgcccgccatgccctgagccacgtccctccccctgcagggtggtgctggtgttgcgggaacgctggcatttctgccgggacggccgggtgctgctgggctcgagggccctgagggagcggcacctaggcctgatgggctaccagctcctgccggtgagtggccctggcctggcccgtggcgcatcctcactcccagcctgcgggtaacctgccgccctctcctctccccacagctacccttcgaggaactggagtcccagagaggcctgccccagctcaagagctacctgaggcagaagctccaggccctgggcctgcgctgggggcctgaagggggctgaggggttgatgtggggttcaggatggcccccccatggggggtggatgatttgcactttggttccctgtgttttgatttctcattaaagttcctttccttccccgttgtgaatctcagttttgggacggggagc

SEQ ID NO: 1184 - DNA, 9879 bp, Homo sapiens
aggcccacgacgcccaggcgcttccgcgaccacccggagtgattgcccggcagagcgcggtaggtgtcaacgcggggtctccgcgcagttggtccggctgggtgtcaaagacctggccggctttctcctcaggctgcgccgcccggcccgtgtctcagcgcaggtccccggggcgccgagtttgggggtgctcgccccgcgggtccctttcattcctaggaaaacgcgccgcggggcctcccgtctgtctgtcttgcacacacgtgttgccaaatccccccgcaccgtctttagatctggactggccgccccaccttctcccttcattgatctatgttttgctttttcttttcctaccttgtttccattgacaaagtagaccctttccttcaacactaaccttctcccgacaccgaggggaaaccaacagcttagggcctttccagcgcgtttttacccttgccttgctctaacctcgcctaattttgcccactttacctgttctttgatttctatccaaatgcaatttcttccttcaaccaacatttaagggccacccttaagagctacattgcctgagtttgaaccctagctctgccacttaaccacctgcataaactgggcaaagtaactttgtgcttcaacttcttcctcgtgtaaaatgatagtaaaagtactgaatctgtgtaagttaatagaatacctacaacagtgtttagcaagtaatagcgattgttattgttcaatgtcagccactcttctaactctaggatgcagagactttgcccctctggtgtttatatgttaaccatcctttttttttttttttttttttttccagatactcgtttgtagtttcataaacattgatgttgggtcaatcatgttctcaatgtatttaaccatgtgtttttaaattttttaatttagttatcaaattgagaatctgatggtatggcattaatcaccttgaggaagaacctttatcgtttatctgattttcagatgcatagagctctggctgctttaaaaaataaacctctaaatcatgttcacaaggtagtcaaggagcgtctgtgcccttggttgtgttcacgacaacctgagcctttcggggtcaaattccatcatgcccattgtaaaaagtttcattcgaaaaatggaaatgaccttcatccactcggtggaccagtgttctctcaagtatctgactgcgacaggcttgaacaaaatgttaaaaatgaggagagtcagatgttttacaggagactgagcaacttgacttcatcagaagaagtgctaagttttataagcacgatggaaaccctgcctgacactatggcagcaggagctttacaacgaatttgtgaagtggaaaaaaaggatggtgatcaagggctgccaaaagaaatactggagaatagcatctttcaagctttatgctttcagtttgaaaaggagccctcacagctgtcaaacactagtttagtgactgctttgcaagctctgattctgttgcatgtggatcctcaaagtagcctgttgctgaacctggtggcagaatgccaaaatcgtctcagaaaaggtggcatggaagttcgcaatctttgtattcttggggaaagtctgattacactgcacagttcaggttgtgtgacactagaactcattataaatcaacttcaaggtgaaaaattggaaacatttaccccggaggatattgtggccctttatagaatcttgcaggcatgtactgaaaaagtggatgaacaccaaacatttttaaataagataaacaacttttccctatcaatagtttccaacctgagtcctaaattgattagccaaatgctcactgccctggtggttcttgatcaaagtcaagcatttcctctgattataaaattgggcaaatatgtcgtgaggcatgtcccacatttcactaacgaggagcttaggagagtcttggaggcgttcatatattttgggcaccatgacacattttttacaaaagccctagagcatcgtgtagctgcggtgtgcctcacgttggatcctgaagttgtctgcagggtcatggagtactgcagtagagaactgattctttcaaaacccatcctcaatgcagtggcagaaacttttgtttgccaaacagaaaaattttcacctcgtcagatttctgccttaatggaaccatttgggaaactcaattatttgccaccaaatgcctctgctttatttagaaagctggaaaacgtgctattcactcatttcaattattttccacccaaatcattattgaaacttcttcattcatgttcacttaatgaatgccatccagtcaactttctggcaaaaatattcaagcctcttttccttcaacggctgcaaggtgagttggttataaattctgacagttggaaaaaagtaacctttgaactggcagtggtttcaagtcacatataaaggcaatatgttgcctttagtttttcttccatagtgatccgaagatgagacctgaagttaacagatgctggcataaacacagttaaagcatgctaggaaatcatgtagagggaagaaagctgtctcagataaactgacttttgccttatctgagaaattgcagcattcttaggagatatggtaatggcagtggaaatagccacattaacatgttagaacttttgatgagtgagcaactgtatctttttttttttttttgagaggatggtattattcatcttaattcaaggccacccaaatatgtcaaatttccggaactccatagttaaaggaaatttccactaattctgtgaacatattttatctcttttaattgtattctgtagctaggagcttgggttcttggaagtcaatttcattggtggcaagaggagggcataattaattctaacaagttcatttcatagtgtcatttaaaaatagaatacttctgtctggagtgtgtaaattgatgttgaatgttcatgatgttctctcatacatacctcaattcagacgtaactatgactgggatgctttctgtttcaggtaaagaatctcatttggacacattgagtcgggcacaactgacccaacttttcttagcctcagtcctggaatgccctttctataaggtaaaagcatgaactatatgtggctttatttccccatgggtgcagtttccttttaagttcctttacttctgatctgtctcaataacctgaaaaagcagaatttcatttacttggagtcagttgccaccagataggcttttctttgataaatggaccccatttttgtgttcttgttcttgaaggaacaatttcctgctgtttaagatttcttaggaggttttatcaagtgctgcaggcatgtgagttacagtatttctccattctctctgaaggttttacagggttttagtactaggtttactactaggtttcccatagctgtttgttatcaaagtgtgaatgtctggactgaacaaatacctaaattatttgcaagtacagtatatttttaagccaagccagaaatttcacttttatctaatagagtttagtttatctagagttcgctcttcccataaagacctataaagatttatcctattacctatcacattccttatgtagaatcagaaatagcacaccagactatgacattctctctctgcttctctctacttgactctgaatcatagtttagagtatctgatttttgaaataaggtaataagaatggaaaaataccccttttttaaaacagcttagacagtactaagttatataaagataaataatagttaaccccgatctcttaccatttctaaaggaacagtattaaaagcagtttctacgcccaaatgtatacagatacataaacactgtctattttttttctcttttcaaggaatgagactcactaatcaaagtacaatttgcttttatgcgcagtatatcatggccatccctcgaggccagtgcatacagatcacatgcattctttttagaaaggcatgatatttcatggtgtttattctactattgatgcacttggaggtttttgcaacttttgtctctatcgggaatgctataataaacattcttgcaaatcctgtcatactagagcctttttggtttttttcatatataaactagattcccaaaaatgtgattagtggattaatttttgatggatactggcagattttttttccctaatagttacagatgtcacatttccccagcaatgaatgaaggtggccatgtctcctccacttctattgcagtgtgttagtagtctctttaatttgtgttactcaactacatgaaagaggatatcatatcatatatttaagttgcattttaatgagcattaatgaagtttagcatattttcaaatatgtgttggccatttacatttcttttgaattgcctttctacaccttaatttatttctgttggatggtttgtctttaaggactcattgtaaaacagatattaactattatgaatgttgtacatattttcccgatttgtactcttttattactttttaatattacttatgatgtatttttaaatgttctgtagtcgaatctgtcttttatgacttccgaggttcctatctcaagagcatgaatattttacatttttaaaaataatatcttttaaattttatttagatctttgatctaaaagtaaaattgaatttttatttatgtattctaattaacaaaaattgtatatacttattatgttcatgttgttttgaaatatgtatacattgtagaatggctaaatcaaaccaattaacatgtgtattacctccatatctatcattttattttgtggtaagaatatttaaaatgtactcttgccgtgcgcagtggctcatgcctgtaatcgcagcacttttggaggccaaggcgggtggatcacctgaggtcaggagttcgagaccagccttgctaacatggtgaaaccctgtctctactaaaaatacaaaaaattagccgggcatgatggcacacgcctgtagtcccagctactctggactctgagttaggagaatcgctcaacccaggaggcggaggttgcagtgagccgaggtcgcgtcattgtactccagcctgggcaacaagagtgaaactctgtctcagaaacaaaaacaaaaacaaacaaaaaaaaaggtaaaaaagtactctcagccattttcaagcacgcaatcattcttattaactatagtcagcatgttgtacacctggaatttattagcatctgtcatggatgacagaagtttaatttagttattttccaaataaataaccattttctccagcatcgtttattatattgctatccttttcttcctaaactggaatgtcatttatatcacattttccattacagattgagtatcccttatccaaaatgctcaggaccagaagtgtttcagctttcagattttttcatattttaaaatattctcattatatttaccagttcagcatccctaattcaaaaatttgaaatccagaatgcttcatgagcattttctttaagcagcctgtctgtgcttaaaaggtttcggattttggagcattttggattttggattttcagattagagaaattaaacctgtgttgaaaactttagttgtgtgtacttaagacccttgggacaattctcagttctaaaaatgtttcttgaactgttagcattattatgtttcttctcactctctcctcactcctttttaccttccttctttacttttctttctgtttatggtaaccagtgactactgtaaaaacacatataaaagacattttgaactattagacttgcactgtaagaagagaagtttgcattatcattttgagagagatgcctgtcccaattcctggaaaagtatcatgcctataaagtaatgttatatcaaacttttctacctaggtaaccttcaatttattctctgttgttatatcttatttttctttctcacatttgcacttatgattttttagggtccaaaactccttcctaaatatcaagtgaagtcatttcttaccccatgctgttccctggagacccctgtggattctcagctttatagatatgtgaagattgggctgactaaccttttaggagcaagattatattttgctccaaaagtgttgacaccctattgttatacaataggtaagtagtataaggagttttgttgttttaaacctaagcatcctgttcgattttggagatatatgggacttagaagcaatagaagttctctggaaatgcaaaatggaatggtcccttccctgaaggcaagttggggttagcagcagagccgttgagtcaagactgtctgggtttaagtctcaaatattagccacgtagtagcagaatatcctgggcagaatatttaacctttttctgcttgcttcttcctctgtaaaatgatagtaatattgacctcaaagacttacttaaggtctaaataaaatagtacctggaacgtaggaaatgctcactaattgttagctactactataacctaggcttgtactgtccaaatatagtagccactagaccatgtggctatttaaatttaaattattaaaagtttaagaaaattcaattcctcagtcacattgtaagtgctcagtagccacatgtggctcatggctgccaaattggacagcaccattataaagatttccacatcacagaaatttctcctggacagcactgacaagagactccaagtcctccgtccttacagttcttctaacttgatgagcagaagaaagccttctcgtaaaggacagcagttcataggcttcagatggtcacttctcttctctttacgaagggaactgcagtttaccagaggggaaggacagttcggaagccttccgtgctcgcagaccaggtgtctgggtgtggcatgctttctttacttaccatggaggcactgcaagttggaatgatggaagttatgagttgcacagatgtctaatgtcttaactcaagggttttcttcacagtctggattgaaggatctctgccacctatcataaggggaaagagaaagcatgcatggttcttgtcataccccagataacttcagaacccattctgtggtttagcgttattgagctttcttaatttaaggctgacttgattgatcataaagccaattgaattaaaattctcaccattgtttggttgtggtcattactttgcagccttcagtccaattgatcaatgcaaggtggaaggaatcaaagcaaagcaaaggaatgaatacaggaagatagtgtttgtgagggtatcacacgaggaatttttcctttcttctctcaccagatgttgaaattaaattagatgaagaaggatttgtattgccatccacagctaatgaagatatccataaaaggtacaggaaaatgttgtgtttttcacattacaagactcgttgaggctaataagcagcggtatctttttctcaagaaggtgaaaaaaatagatatgattctggaaattaaaatactacatttcagaataccatgttgggaaattccttgtaatattttataaacattaatattaataagatcaaattcatgattcatttgaaaataatattggcacatagtaatagccaaatcccaaataaactttggcaactaaaatatataataaatattttggattatttaaaaaattaagtatttttctccttttttatttttcaggatagcactgtgtattgatggtccaaaaaggttttgctccaatagcaaacacttactggggaaagaagctattaaacaaagacacctacagttactcggttatcaagttgttcaggtacggtttcacctattttttttgtttcccaaaagcaaatcctatttcaaaattatttttccaggttacttttaaaaagtaatctgaggcacagtaaaattttaaagaatttgatcaggcagcaattattgaactggacagcacaaaactcgaaatggcttgggaacccaagagggaggcttttataggaagaacacaagtacacaaagaatctacttgactggttacagttacatattcttgctgccttgtttgaactattctgtggaaagttcctagttatataattattagtttgtgagatgcttctgattggttgagcttaagttctgtttttctgtagtagaagcttctacaagaaatagcccaagttaaattttgcttaacatttgcactttaagcaaagttaaggttattttcaaggcccaactggcttggtctgctcagggatttttcaggcacaggctccattttaatttgcttttacagtactaactggtttgccagcccagtggaccaccgatcttacgtctagtttaaatcccaacgttgttaattcggcttaaatctcttgacttatattttgaaatacagaattttcagagctttgatttttcaaaagtggggcctacctatattcattataagctatgcttaaccctgcttttagaattactcaattgttggaatatatgttctgttttaatttctccttgatttaataaataaaaatgaacaagataatccattaaaataaggagcttcaccaacacttaatatttaagaccttttaaatatttcactgtagataatgtaagaaggtcttatgtgagggctcagcagtgcgtgagaatgagcgctgccctaattctctaagctgtcagtactaggcagcactgtggtttcatatctgctgacttttttctccatcttgcacatccccagctgaatattcctaaaactaatcatgccagtgtctactcagaagcttcaatgtttctttactgcttacagaataaagtaaaaacttctctacatcttaacattcaagaccctccaatggttggcctgcagccaggctgcaggcacatgattactacctggcccctctgctcccagctgagcagactctctcctttgctgcgcctcctgctctctccctcttcattccctctttgtccctgctgcgtcctccagctctctgaatacctaccttccagcagtttgtcggcatccccaccctcatctaatgaaatgctcactccctcttagcactagatcaccaacctacagcttgttttttatatttattgtgtaatttaacttgccacccaagttgtgaactcctggagaacaagagatcatgtttaattcttatttgcatattctacatattaattcatcaaatatttaccaagccccttctcagtgccaggcactgttctagacattggggatacaggatgaagaagctggttgggatatttgccttccaggagcttacattccgctgtggggaagcgtgtaagaaacaaacaaagtaaccaatagccagaggaacctcagattttgaaggatcttgaccagttttacttttctacctttacagatcccctatcatgagattgggatgctaaaatcaagacgtgaattggtggaatatttacaaagaaaactgttttctcaaaacactgttcattggttgcaagaatgaatactgacttcagaactcaaacaatggaagaacttgcatttttatggaactcagtattaaaagaaaaatataatgtgaattagccactttgcagaatatgttctagactggtgatctgaaagcatctgtagttttccttatactatgtatacatttattgtggtaaaatttaaaattaattttaatttaatactagtgtcatagatactttttgtacatcaaacaattgatcatgtgctgtaaaggaattcaatgaataaatgttatttttaagta

SEQ ID NO: 1185 - DNA, 19731 bp, Homo sapiens
cagctctagttaaatcctgggcagagctggcttggcagagatgcccacacctgtgcgtcacttcgtgccctacccagaaggggagcaggaaaccaagggatgaaaggtgctgggtccctggctgcctccttgcccatggctgagaagttctggtgggaaggaaccatggagggcccatctggatatccttcctcagctaaaactgcctccttccaggtaggagaacccggtgaccaggcaggtggcctttcctgtctaagcctcagtttcttgggggcgatgctgccagcccctcacagggctcagcgcagcacccagcatgcttggagggtgagaacaaattgaaaaaagatcccacatttttttcctctgaaaattttggtaagacggccaggtgcggtggctcatgcctgtaatcccagctcttggggatgccaaggctggtggattatgaggtcaggagttcgagaccagcctggctaagatgacgaagccccgtctctactaaaaatacaaaaattagccgggcgtgatggtgggcacctgtagtcccagttaattgggaggctgaggcaggagaatcacttgaacccgggaggcagaggttgcggtgagccggtatcacaccactgcactccagcctgggcaacagagcgagactccgtctcaaaaaaaaaaaaaaaagaaaaacaaccgggcatgatagcgcatgtctgtaatcccaaccactctggaggctgaggcaggagaatctcttgaacccgggatgtggaggttgcagtgagccgagatcaggtccctgaactccagcctgggcaacagagtgagactctgtctcaaaaacaaacaaaaaaaaaaagtcgggcacggtggctcacacttgtaatcccagcactttgggaggccaaggtggatgtatcacgaggtcaggagatcgagaccatcctggctaacacggtaaaacccggtctctactaaaaatacaaaaaaatagccgggcgtggtggcaggcacctgtagtcccagctactcggaggctgaggcaggagaatggcatgaacccgggaggcggagcttgcagtgagctgagatcacgccactgcaccccagcctgggctacagagcaagactccgtctcaaaaaaaaaaaaaaaaaaaaaaaaaaaaaaaatcctcatcctcctaaagaggagactaggggtcagacaggatcacagagggaagtgtcttgcccatggtcacacagcagttcgacagcagagagggccagggtgaccagacaggtggtggtaaggtgcaaggaccaacattaaagtcagtaatctgggtttgaatcggctttgccacgtccatgtgcctgctgtattcctgggtgagttgattaacctctctgagcttccatttttccacctgtaaaatagggatcatctgtaattcacacaattttcatgagattccaggtgccaaacacagggataagtgcttaataaatgtttatttgttttgagacagcgtcttactctgtcactctgttgcccaggctgtagcgcagtggcgccatcttggctcactgcaacctccgcctccctggttcaagggattctcctgcttcagcctcccaagtagtgggactaccggagtgtgtcaccaggcccaactaatttttgtaattttagtagagatgcggtttcactgttgtggccaggctggtctgaaactcctggcctcaagcgactgacccaccgtggcttcccaaagtgctgggattacaggtgtgagccactgctcccagccgagtgcctacttaataaatgttaacaagaaaaacccaccccaaaaaaggaaagaggacaaacacaaggcaagggtgtttcagcagaggcaaacatcgcgagcaaaagcttgcaggtgggagaggccaaggccagttgctgaagtccttgccagctggcagggactgtgccctgtaagtgggggatgagtccagaggcaggcagggaccaggccacagtgaacttgtgggttttattaatcccaagtgtatgacggggcaggagagagtgtagtatcccaggcagatctgagttcagaaagacctgacccactctgtctgtctctctctcagccttagcctgccactctacagtggttaccatctgacctgatcagggtttgtaaatctgtatattcctttgtgaatttctttatttgctgccctctcacccccaggactgggtgctctgtgagcagtaccttgtcttctgttctccacagtgaccccagcatctagtccagggtctggcagagataatttcttccaatgaataagtgaatgaatgacatcgtttccctgtgggaaggtggggattgaggcagagttcctcagtctgctcctaccccagcccctcctcctgtccacacgcacctgcagatctgcccgcatgagtgggcactggcccacttactggttcccctgccccctttgttttctattgttcttcctggagagagagaacgcagtgccttcgtggtcaccaaaaggccaacggcgattccctctccagctgcatgatgaagatccctttgatttttccgtttacagtttcttctagttccttctataaatatttgtggcttttcaagtaaaaagccacaaaggaggtgagtgggctgtaaaggaaacaaaacagctttttttttttttttttgagatggagtctcactctgtcggccaggctgaagtgcagtggcgcgatctgggctcactgcaacctctgcctcccgggtttaagtgattctcctgcctcagcctccctagtagctgggattacaagcacggaccaccatgcctggctaatttttgtatttttagtagagatggggtttcaccatgttggtcaggctggtcttgaactcctcacctcatgatccacctgcctcaacctcccaaagagctgggattgcaggtgtgagccactgcgcccagccagcttttttttctttttttgagatagagtcttgctgtccctcacgttggagtgcagtggtgcgatcttggctcactgcagcctccacctcccaggttcaaacgattcttctgcctcagcctcccaagtaactgggattacaggcaggtgccatcacacctggctaacttgtatttttagtagagacagggtttcaccatgttgacagattttgaacctgaggtgatccacccgcctcagcctcccaaagtactgtgattacaggcaagagccactgtgcccggccacaaacggctgttaaacacaaaaaaagtgttcagcctccttcacgataaatgtaaatgataactactcagagaatccatttttccaccttacgattggcaaggatcaaagctggctgtgttgctgaagatgtgaggaaatgctggctcatgcactgctgaagtcggggaaacttgtacccctctgggggacaatgtggccatgtgtataaaaatgtcagctgggcgcagtggctcatgcctgtaatcccagcactttgggaggccgaggaaggtggatcacctgaggtcaggggttcaagaccagactggccaacatggcgaaaccccgtctctactaaaaatacaaaaattagccgggtgtgatggcacacacctgtagtcccagctacttgggaggctgaggcaggagaattgcttgaacctgggaggtggaggttgcagtgagccgagatggcaccactgcactttggcctgggtgacagagtgagactctgtctcagaaaaaaaaaaaaatgtcaagtgcaggtcacctttgacccagcaattgcacttggaatttatccatgaaataacccacacaaggaagaaatgatgaaggtaaaatgttacccactgtagcttgggtaaaatattatccattgcttgtgatagcaaaatattggaaacaacccaaatgtccatcaataggcaactggctgaatacacagtagtacttccacaccatggagtactacacagcttcaaaacaaattagccaacggagtggcccttatgtaccgacacagcccagaatagggccctggttaaaaagggacatggagaaagtacaaggcaggcttgccttacagtctgctgctatatgtgggtataaaagggaaatcaatatatatttgtatttgcttgtaaatgcataacatacctctggaaaggtgataagaaactgataacattgactgctttgagagagaaggattaggatgctggaatctgggctcccagagagggaggctttttgctgtacacagttttgaccctttaactatttgttgttttttgtttgttttgagaagagtcttgctctttcacccaggctggagtgcagtggcacaatcttggctcactgcaatcttcgcctcccaggttcaagtgattcctgtgcctcagcctccgaagtagctgggattacaggtgcgcatcaccaagcttggctaatttttgtatttttagtaaagacggggtttcatcatgttgcccaggctggtctcaaactcctgacctcaagtgatccacccgccttggcctcccaaagtgctaggattataggcgtgagccaccacgcccagccagtctttgaactatttgaatgatatattatccaaaaaataccagaatttaaaaagaaaacataagaaaaagtgttttttccagcaatgtggacaggctttccaccttacaccacaggagggactccggctctgggatctcattcttggaggaatggcttagagcacctatgccacctcctacagatgagtccactgaggccaccaatagtagatctggaaaaaatacttgccctacagaggacagaaactgagggataatatcagtactacacaaagtgcctttttttcttttttttaactttttaaacatttgatttatttatttaaaaagatgggggtctcgctatgtcacccaggctggagtacagtggtgctatcatagctcactgcagcatcgaactcctgggctcagattatcctccttggccgggcgcagtagctcacgcctgtaatcccagcactttgggaggctgaggcgggtgggtcacctgaggtcaggagtttgagaccagcctgcctaacatggtgaaatcccatctctactaaaaatacaaaaattagctgggcatggtggcacatgcctgtagtcccagctacttgggaggctgaggcaggagaattgcttgaacccaggaggcggatgttgcagtgagccgagattgcaccactgcacttcagcctgggcaacagagtgagactctgtctcaaaaaaaaaaaaaaaaatcctcctgcctcagcctccaaatcactgggaccacagatgtgcaccagcatgcccagcaatttttgctttttgtagagaagggggtttcaccatgttgcccaggctgatctagaactctaggcttcaagcaatcttcccgcctcagtcttccaaagtgctaggattacaggtgtgagccactgcacccagcccacaaagggctattataactgacatgaaaaagcgaatcagacattagaaaaatgggccaaggatgggttaggcagttcactgacataaatgcatgggaagatactcaagttcactgcagcaggggaatgacagaaacactgagatggttctctgcaccctgtggtctgggggcatcctgggagaggggtgcctccttcacacacagctgctgggatgccaagactacagcagcattggggaaaaggattgcaaacatccctggacccaaccccacccctccatgcaatccaactcccagaaatcaagcccttcgacgtaaacgcatatccatagcagcaaaacactgaaggcagaatgaatgcccttccacaggcgaatccaggatgctcctgggaaggccatacggccattaaagacgctgaattagcagtgtccctggggagacagggaaggaggcgcagaggctaagaataaggactctggggccagacgtcaaatcttggttttgtgacttgagcatatgcttttactcctttgggcctatatgataatattagtacctatttcatgggtttgtgatgaagattaaatgagcaactgtgtcagaagtgtttatagcagtgtctgaatctagaaaggtactacttaaagtgtttgcgaagggctgggcgtggtggctcaagcatgtaatcccagcactttgggaggccgaggaaggtggatcacctgaggtcaggggttcaagaccagactggccaacatggcgaaaccccgtctctactaaaaatacaaaaattagccgggtgtgatggcacacacctgtagtcccagctacttgggaggctgaggcaggagaattgcttaaacctgggaggtgcaggttgcagtgagccaagatggcgccactgcactccagcctgggtgacagagcaaaactccatctcaaaaaaaaaaaaaaaaaagtgtttgctaagtaaatgtcttaaaaaaataataagcttgtcattgagtaagaaagttaagttgcagccaggcatggtgactcatgcctgtgattccagcactttggtaggcccaggtgagaggattgcttgagggcaggagtttaaggctgcagtgagctatgattgtgccactgcactccagcttgagttatagattgggaccctgtctctaaaaataaacatttttgaaaagctaagatgcaaaaatattgtcacctgcattggcaagaccctatagatgtctaggtgtgtctggtttcatgagcatagaaaactatgggacacatacttagtcgtcaacaggattgccagaggaggaactgtgtgtgtgtgtgtgtgtatgggggaagggggaagggagtaagcaaaataaaaatatttaaagcctcatgattattattattattattattattttcgagacaaagtcttgctctgtcacccaggctggagtgcagtggtgtgatctcagctcactgaaacctctgcctcctgggttcaagcaattcccctgcctcagcctcccgagtagctgggattacaggcgcctgctaccacacccggctaatttttgtatttttagtagagatggagtttcaccatcttggccaggctggtctcgaagtccttacctcatgatccacccactgcggcctcccaaagtgctgggattacaggctcctgctaccacaccggctaatttttgtatttttagtagagatggagtttcaccatcttggccaggctggtctcgaactccttacctcatgatccacccgctgcggcctcccaaagtgttgggattacaaggcgtgagccactgcgtccagtctcttgattatttttatgcagtcattaaactatatacatgcatatgtatagagaaagtttcaatgactaaaaataaggaaaccaagaaagaacttctctatctgccatggggccagggtcggggcaccccagcagtgtgtgaagagcagaagtccagccaatgacagactcttcccaaaacatcacttgcttatttcgaaatcaaacaatttctcataaatattttctcccaatgctgggaagagggagaggggaaggaggtacggaaactccatcaatcatttgaagggctgccttttatcagactgattttccgtagtgggttgtttgcagcttcctcctccccagttctgggcctcagctgtcaaaaggatttcaccatgcaactttttcatgctagcagttggggccaagaagctaatagatgggaaaaagctctgaaaactccaggacgacaaataggtgtcctcctcacagaaaaggattactgccccaccatccccaggtggccctcaaatccgttctctaaacggcagcagctgtttagaggtgtccaccaggtgtccgcagctttgtcatcctatccctgttcggggcagagactgagggctgctgacccggaccggctattttgggacgtgctgcggggggccttgggaggttggtgacgaaaggagtgcgtgcccgctaagggaggggacgccccggagcgtacactcataaacctggtcccgaggcctgcccctcaccaggatggtgcacgcggaaggggcggctttttagtggcgcaagggggctggtcggtggtagtttggggcggtgctgattgatggcgggcggggcggggcggtgctgattggcggggggggcggggtgaggcgacgctgcgctgattggctgggggcggggcggggcgtctcccgcccgggcctagagcgctgccgggggcgccgggactatgtcgcgggcgcggagccacctgcgcgccgctctattcctggcagcggcgtctgcgcgcggcataacgacccaggtcgcggcgcggcggggcttgagcgcgtggccggtgccgcaggagccgagcatggagtaccaggtatcaggcgggccagcgggccagcgggcctgggcgcgacgacacgtgggcctgcgctgagccgcagaacatccgggctccgctagccgagagggtatcgggagccctggactgggggactcggggggcggaacatcctggaggctgggggtggggacagggaccaggaagttgggcccgggccgccggggctgggaattcggagactatagcgtccccgccccgggttgggaagtgggaagtggcacaggagctaggatccagaagcccagaggctcagcggtgcttctggagttccagtgatcccggagtctgaaccggcagtgagagtggggaaagagggtagggaagagactcaggaattcaggcttgaaagatccaggagtattgatctgggggtgggctgtccaggattcagaagattggggatccaagtgcctggatttgggggagaggcaggaatcaggggtagtggagggccccagaacctggaaaatagaaaatgtccgcgggcgctgtgtcaagagccggttgccctagaccagaccctgatgccagtgaggcgggtggcactggtttgatgagggtggagcctccaaccagccttgaggtcctgagggtgggaggcacggaatatgaggcctaaggggaatgaaatagcacccccactcccacttccattgtgaaccctcctgaagccgtacctacctgccttcctggctgagtgacccctggcacacccctcctccctctgagttgctcctctgtgggttggaatgtggaaccccagagtcatgagggttggggtggagcttcggggaactccagaattcgaataccccagccttctgtagttctggccccgctctggcagggagcaatatagcaatggaccccattggagagaatgagggcaaaggcccaggagtgaagtcgggggagcctgggcaggaagcaaggctagcccgttagtcatgccaccttctttgtgtagcactccctgggtggggctgaactgccccagactcccatttttgccagagctggaaagatgccatactctctgttgcttaacctacaggctaggctaacagtgctggcatggcaggcgggcctggtactggccttgttgccctggcttggccactggtctgctggctgtctctgtgcctgtggaccctgagtgagccttaacctactatctgggcactgtggttgccaggatgccgtgcgcatgctcaataccctgcagaccaatgccggctacctggagcaggtgaagcgccagcggggtgaccctcagacacagttggaagccatggaactgtacctggcacggagtgggctgcaggtaaggtagagagggcctgtgaccacctcccacccccatttgtgattcccgtagctgaggcagggaccttgtctgtctgtcccaggtggaggacttggaccggctgaacatcatccacgtcactgggacgaaggggaaggtgaggggcaggaccctggggtagggggtctattaagtggctggtggagtagagcctgcccagacaatcccttttctttcaagggctccacctgtgccttcacggaatgtatcctccgaagctatggcctgaagacgggattctttaggtactggcttgtggggggatgtggtgtctgtgtcccaatggaccctggggggctatggaaccagccagtgcttcaggaccagggtcacccccaggaggtcagctgcatgtctctctgcccagtgtttattcattcaataaacattcagttagcacttaccatattggcccatgtttatggcaacctttaattttttttttttttttgagactgagtctcactctatcgcccaggctggagtacaatggcacgatcttggctcactgcaacccccgcctgccaggttcaagcaattctcctgcttcagcctcccaagtagcttggattacaggcacctgccaccacaccaggctaatttttatatttttagtagagatggggtttcaccatgttggccaggctgttctcgaactcctgacctcaagtgatccgcccacctcggcctcctaaagtgctgggattacaggtgtgagccacggtgcctggccttaattttcataattaaaaaaaaattggggaaggggcagcaactttaatgtataaactaaatatgtagcaggaggtccagtgtggtggctcatgcctataatcccagcactttgggcagctgacatgggaggatcacctgagtctggggaggtcaaggctgcagttagcagtgatcatgccattgcacatcagcctgggcgacagagcaaactgctatcttaaaaaaaaaaaagaaaattacatagctggaatagtcagatggtcagatgtctctttaataacttaaagtccaggttgagtgtggtggctcacaactgtaatcctagcactttgggaggccaaggtgggaggatcactggagctcaggagtttgagaccagcttgggcaacgtagtgagacttcatctctattaaaaaaaaaatgaaaagaaaaaattttaaagtccatatataactttaaaatcacatagagatatttatcaattagtatgtctttagagtaaggagaaaattgccttgcaagggcttaaacgataagggtggcttgtgccatccacgttaaggtctcctaggcgggctgcagataggagcccttctgcttggccactctccactgtggctttgccctggggcagcgccccctcttggtctcacttgtctagacttacacaagaggatggccaggtggaaccgggatcactcttcctgtgccacgcatgtcttctaagcccatcaccacgaacttctgaaatcagctgcctaaggtcatttcaagccgatatgttttccctaaacagttcttgttcaaataaagagatggagaggaggacttactacctgagtagctttgaggattgaaacataaggcaccaacctgtcttctaaaatcactttttgggccaggcgtggtggctcatgcctgtaatcccagcactttgggaggccgaagcaggcagatcacttgaggccaggagttcaagagcagcctggccaacatggcgaaaccctatctctactaaaaataccaaaaaattggctgggcacggtggctcatgcctgtaatcccagcactttgggaggctgaggtgggtggatcaccagaggtcaggagttcaagaccagcctggctaacatggcgtaaccctgtctctactaaaaatacaagaatcagcgaggcgtggtggtgtgtgcctgtagtcccagctacttgggaggccgaggcatgagaaacgcttgaacctgggaggcagaggttgcagtgagccaagattgcaccactgcactccagcctaggcgacagaacaagaccctgtctcaaaaataaataaataaaaactacaatcatttttgggataaaaacctagccttcaacttgggcccacatggccttgagggccagcccagggctgcagcttgaacattggttgtgggctttgtctctgagagctgtaagacagatgacattgtgggacagatgtcagcagagtgactgattggtatgggactgttggagcccatagaatgtgcaagaccagcctgggtgaggaggctgtcttagttgagaccaacgtggtgaatagggtgagccaggtgcagaggcctggagatagaagatggggaggactggggggctacagatagtccggggggatggggcaccaggaacaaaccgagggacacaggagagatgaggcacggaggccagtagcatcagtccctgcagggtgggggaaggccaggacgctcgggaagggagtcctgatgaccccagctgtcccggcagctctccccacctggtgcaggttcgggagcggatccgcatcaatgggcagcccatcagtcctgagctcttcaccaagtacttctggcgcctctaccaccggctggaggagaccaaggtgccgcatgcaggagggctggcgggtgggtatggttgggggtgctacgtgttccagcaccccatctccccagagaaggggctgcatgggctctgggccctgacatgtccctgtgccacaggatggcagctgtgtctccatgcccccctacttccgcttcctgacactcatggccttccacgtcttcctccaagagaaggtgtgtgccctctccctagaaccctgcatctgaggccttgggaacgggaacctcagcaggcctgggggctccctgcttccatgcggcctctgggcaccctcatatcccctgccatgccctctggtctttgacaggtggacctggcagtggtggaggtgggcattggcggggcttatgactgcaccaacatcatcaggtgagcgcagttgcttgggacgaggggtggcagccaggagcacagcctcacctgccgcctggtggctcagggcagggcctcatggccttttcctcccctgcaggaagcctgtggtgtgcggagtctcctctcttggcatcgaccacaccagcctcctgggggatacggtggagaagatcgcatggcagaaagggggcatctttaaggtgaccaggcagactgggggaagggagagacatggaaggcctgggagtctacgttttcatcctggcttcactgtgtgactggaacaagttgagtctcctctccagactatttccccattgaaacgtgagggatggctgggcatggtggcttatatgcttgcaatcccagcatttcaggaggtcgaggtgagaggatcacctgagatccggagtttgagaccagcctgaccaatatggggaaactctgtctctactaaaaatacaaaaattagccaggtgtggtggtgtacgcctgtagttccagctacttgggagactgaggcaggagaatcactcgaacccgggaggcagacgttgcagtgagccgagattgcgccacagcactccagcctgggtgacagagtgagacttcatctcgaaaaagaaaagaaaagaaacatgagggatgagagacagtggtagcccagacccagggatgtgggggccagagataggagtgtggaggatgctaggtagccctttctctctccttcttccctccacagcaaggtgtccctgccttcactgtgctccaacctgaaggtcccctggcagtgctgagggaccgagcccagcagatctcagtaagtctgattggaatggggcagcggcagggtgggtttgtgtccctcctgtttgaggaggcactgcatcctctggggcctcagtttgcccatctgtgcagtgaggacgctgggccagctgccaggcctgctggaacacatctcagttctgggagcagggcttggtggctgggggaggggagagatgcaagggctgacgtggtcagggagggcctctgctgacccgctcctgcctgtctcccctagtgtcctctatacctgtgtccgatgctggaggccctcgaggaaggggggccgccgctgaccctgggcctggagggggagcaccagcggtccaacgccgccttggccttgcagctggcccactgctggctgcagcggcaggaccgccatggtgagtgggcagctgagtgggcaggcaggtgggtggcacctgtggagcctgcctaggagggtcccggacacacttggtctcacacaccccgcaggtgctggggagccaaaggcatccaggccagggctcctgtggcagctgcccctggcacctgtgttccagcccacatcccacatgcggctcggtgagttagaccttcctgcccagctgggaccactgcgtgtgtctgtgccccttcagattttttttttttttttttttggttttctgtttgggagataagagacaatttgaagtggtgcttaagagaaaggactctgatgtcagcaaacctccctgaccttgagctcatgaactctttctgagcctgtcttctcatctgccaaagtagatgatgataggagccactgccacgggctgtggtggggattcgctgaggtgacatcactaaggtgctgagtgcagagcctggccaatgtgggataaagtgccagccagtggtagctgctgtcactgtcactatcatcatcatcagaccctgaggttctggaggatggtgatccagtcatctgcttcttgcctcccccaaagctttcagcacccagcaggtgctcatgctgttaagccccttcagcaaatggtgggcccgctgtgtgccacgcctgttatcaagggcaagtgacaaggtcctggagacaaaccgacctcgcatcacatcccggccccagctaagggctctcaggctgtcaaacgggaatagcaggccctttcagggttgcctgaaagattccaccagatgagacagccgaaaagcccaagccattgactggtgctagtaaaaagttcctgggctgccggggtcctgagtgttgagggcgggcgcagcctgcaggggagaacgggctcaggagtgtgtgtgcggaattgaggacgggggtgggagagggcctggaggactgccttgctgccctcccccagggcttcggaacacggagtggccgggccggacgcaggtgctgcggcgcgggcccctcacctggtacctggacggtgcgcacaccgccagcagcgcgcaggcctgcgtgcgctggttccgccaggcgctgcagggccgcgagaggccgagcgggtgaggggcagggctgggggtggggccggggctggcccacgaggaggggcgggatcttggggaagggcggggcggggtcgtggggaagggcgggggcgggcccatggggaggggcggggtcgtgggcggggacgggattggtaccgcagggagaacgggcggcgccctttgacccagctcctcacctctgtcgcagtggccccgaggttcgagtcttgctcttcaatgctaccggggaccgggacccggcggccctgctgaagctgctgcaggtgaggggccaacttgggggtgggcggcaggcagtcctgaagccctgggtctggcggtgtgaccctggggggtgccaatcccctcccccttgagttgtattgaggattagatgtgacaaggtgcctgtgctggttctgccaggtgctgcagggccgtggggaggccagtcataggtcattactcatattcccgcgtgtctagactcaagtccaggcttaagaggagggccagatcgtggctaaaggtgtagactctggactcgcttgtcatgcccctttaggcactagcatatcaccctggacgagaagcggcatttccccgagcctcagtttgcctctccgtaaaatggggttgctgctaggggcacccgcttctcaggtttggttgaaggagtcattgggcctttctctgcttggggaaactgaggctgcccaagctgtcagggctgaagtggcccctaggtatcatctcccatttcacagaccaggaggctgaggctgtatccagaacctctcccatttacccacagcctttttccagcctggatttggggccccctcactatctgagtgaccttcagcaagtccccttgccctgtggccactgttcccctgtctgtacagtaggttggggcttcgctgctcaggccacaggccaggcagggtatactgaggcagatgggggcagggtgctgaagtaccttggctaggtttatacagcatcattctagttgtcagggaggctgcatctccagagatgtgggcgcagggggccatatggaagttggtggacatcctttcgggggtctgacaccaagtctttcccttggccttctagccctgccagtttgactatgccgtcttctgccctaacctgacagaggtgtcatccacaggcaacgcaggtgagaggtgacaggcatggcccctggggatgagcaggggtccctgaggtagacagtgggggcttccaaactggaggtttggggtaggaaataaatttgttttactgtgtaagaacactttagtgtacttatactcttttatacaccaaagtatactttatttaattttattttaaaaaatttttggctggccacggtggctcacgcctgtaatcccagcactttgggaggccaaggcaggcagatcacgaggtcaggagattgagaccatcctggctaacatggtgaaaccccgtctctacaaaaaaaaaatacaaaaaattagccaggcgtagtggtgggtgcctgtagtctcagctactcaggaggctgaggcaggagaatggcgtgaactcgggaggcggagctggcagtgagccgagatcgcgccactgcactctaggtctgggcgacagagcgagactgtctcaaaaaaaaaaaaaattaatttttgagacagagtctcactctgtcccccaggctggaatatagtggcacaatctcagctcactgcaacctctgcctcctaggttcaaatgattctcatgtctcagcctctggaatagctgggattacaggcgtgtgccaacatgcccagctaagttttatatttttagtagagacagggtttctccatgttggccaggctggtgtcaaactcctggcctcaaatgatccacccacctcagcctcccaaagtgctgggattacagttgtgagccaccacgcccagccagcattttttattttatatgaaatagagtagaatagaaaataccagtgtacgttgcacagagtaagggtaggtcctgtttggtgaagattagtctgttccaggcatatgtataagtatgtgagtactgagttgcagtgtaaaatgtgttttttaccatgtatcatgttaaaaaaagtttgaaatagtgtaaaaattacagatcccaggctggacttggtggctcacacctataatcccagcactttggcaggaggatcgtttgagctcaggagttaaaagccagacctcatctctataaaaaaaaatagaagaattagccaggtgtggtggtgtacacccgtggtcctagctactcaggaggctgaagtggaaggatcgcttgagcctggaaggtggaggctgcagtgagtcatgaagtcgtgattgcatcactgcactccagcctgggtgacagagcaagaccctggaccctctctaaaaataaaaaatctccagtcctcacatcagtctggttggggagagttctggaatctgcattttttttttttttttcttgagacagtctcgttctgtcactcaggctgcccaggctggagtgcagtggtgccatctcggctcattgcaacttctgcctcccaggttcaaatgattctcctgcctcagcctcgtgagtagccgggactacaggtgcacgccactacacccggctaatttttgttttttgtttgtttataagatggagtcttgctctgtcgcccaggctggagtgcaatggcttgatctcagctcactgcaatctccacctcccgggttcaagtgatactcttgcctcagccttccaagtatagctgggattataggcgtgtgccaccacacctggctaatttttgtccagctaatttttgtgtgtgtgtgtttttttcagagacggggtttcaccatgttggccaggctgatcttgaactcttgacctcaggtgatccgcccgcctcggcctcccaaagtgctgggattacaagtgtgagccactgcacccagcctggaatctgcgtttttaaccagcatccccagaaataactatgctcacctggtgatggtccccagctggatgtacattttatagatggagacaatgaggccagagtggggaaggggtgcctagtgggcaaaagctttggagtcagactgtctggctctgcctctcgtgaccttggtgaagtcactgaacctgcctgagcctcagtttcttcactgtgtgcatggagaaggccactagccgagactgctggcctgatgacgtaaaaggcttggtgcgaagcaggtgctcacggtgcacccgcccctttctccacccctgtcccttactccctctccccttcgctgataggcctttctctgtgccccacagaccaacagaacttcacagtgacactggaccaggtcctgctccgctgcctggaacaccagcagcactggaaccacctggacgaagagcaggccagcccggacctctggagtgcccccagcccagagcccggtgggtccgcatccctgcttctggcgccccacccaccccacacctgcagtgccagctccctcgtcttcagctgcatttcacatgccttgcaatggatcagccaaggccgagaccccatcttccagccacctagtcccccaaagggcctcctcacccaccctgtggctcacagtggggccagcatactccgtgaggctgctgccatccatgtgctagtcactggcagcctgcacctggtgggtggtgtcctgaagctgctggagcccgcactgtcccagtagccaaggcccggggttggaggtgggagcttcccacacctgcctgcgttctccccatgaacttacatactaggtgccttttgtttttggctttcctggttctgtctagactggcctaggggccagggctttgggatgggaggccgggagaggatgtcttttttaaggctctgtgccttggtctctccttcctcttggctgagatagcagaggggctccccgggtctctcactgttgcagtggcctggccgttcagcctgtctcccccaacaccccgcctgcctcctggctcaggcccagcttattgtgtgcgctgcctggccaggccctgggtcttgccatgtgctgggtggtagatttcctcctcccagtgccttctgggaagggagagggcctctgcctgggacactgcgggacagagggtggctggagtgaattaaagcctttgttttttaaagaaatggcaaagccttcgactgacccttgaccccctgctccctcagcagagacggagggaggggctgctggtggtcagggacctgcactgtgtagagggagcctggctgtgtggcctggaacaagtccctccctccctgtgcgcctcaggtggcctgtctgtgagatgagaagaagaccagactgaagcctgttcaccatatgccaggcagtgctttctgcagacccccttgcagagaccttgtgatggagaattatacacatttgaca

SEQ ID NO: 1186 - DNA, 176330 bp, Homo sapiens
acacaaaaagccttacaaatggaagaactaaggtggtacttaaaaacagcaccttaggatctagttccatcctatcttttcccttaaatgccatgacaaaagttaaaacgggccctgtcccttctgaatgctgggcttctcatctaaatttaaataaaaacctttgaagatgggaatgtgttggaagaaaagaagggcagaaaaaaagtgtgttggaagagtctgtgtgagtatgtacatgtgtgggtgtgggcatgtgcggcctgtgcgtatgtgtgtgcccccgtgtgtgtgtggagcatgcgtgagaatgcatgcacatgtgtggggtgggtcactatgtgtgcatgcatgtgaaggcatttgcctgtgtatgtgtctgtgtgtggtgattgtgtgtctatcgtgtttgtatgtgtgcctgtgtgtgtacctctgtgagtgggtgtgtctgtatgtgactgtgtgcccatttgtgaatgtgtgtgtgcctgtgtctgagtgtgtgtgtgcctgtgtgctgcaggcgggagaggctgctctggctcggcgagtggcggagcagttagtacaaaactagtagtgagaaaggaagctgggaagagactgggaagaggcaaccgacctcattaacaaaagctcagttttgtccctgcggacccaaccagcagaaggcacggggctagcggtggctgtccgccagggaggtcgggctctgtgtaaacagtagaaggcatctttatcatgcccttctcacagggagtcctgaggcttggcgctcaggaagtttgcaaagctgcagcagctgccttggagaagaccagcaaagaaagtggagtgtgtatgtgaacttcaattctgtattttctgtgaggtgggttaatggatttttagtaaaaagaaatctcaaacacagctgacctgaaagactggaatttcagctctcttccttcccggggttctttttcctcccccttcctctcaaagccctttaaaccagattgctgtgtcagtgactcttatcctgcccgccagttccaagggtttctaactttttgtcttggaaaggaaaaccactacctgtaagtatctgttttatgtgtttcttttcattgtgactgtgaatgttctgttagcagaatgccccagagattgtttgtgtgatatcattaatgccaagtaacaatgcaaagcatctgcaagagtaggcttgcaaaagtttaactctcctgttaactcagaagatggcaacttgcagtgttaacaaaccaaatgccaaaactgagattctttttattacgtgacacaaatttctaactcttctcagtccatccgtgctggcacttgccaatgaaataaccattttttaactgtgtaattgtttcctctgaaattagaatgtttcttctcagctaaatgaaatggcaaagggaaaagacacaaaaatgaacagaacagataatatcctcatggtacaaacatagagaaatttggatgagataatgtctggatacctttgcttaagtttagttatatttggagacatattttcaaaaacatgatttctgtttcattgtggggaagagagatagtgctggggaggcaaagaaatggccttgttctgaagtttttggactgatttttaggctctctctgctcagtactgagatttggtccagagactttggtgctgttgtaaagagtttcttttcattttattttgaaatccaggaaacaatttttggcttatggaaattgtttattgtttttaaggtatttaattttagtttctgatttttttttaaactattgcacccagtcttgttgcttggtgtgcattacaaagcttaaaaagagcatttctgggagccaattggtgtttatagcctgggaatcttactggagagattaacctctgtggtgctgcttcacagaacagagctagtgattcgaatgctcttcaggtttctgctctggaaaactgacacccgctgttcctgactctaggtaaagcttgaagagctgtgcctcagccccctgcttacatttgataaaggtgccttcagtgcagctctaggaaactttgctgtttctctccatcaggcattctcaaaactgactgtgtgtaagaacccccatttgcttggtgaaaggcaggttctcagttcccaggcccaaaggattttagacctggagtggtgccaggaatcttcccaggtgattctgaagcaggtgggtcacacttgggtaaacattgctctacattgtccttgacatgaaattcttgtcatgtacttggttaatattaaaccttatatctaaataagaaacctgagtttgagctgttgttgagcataacttaatgtgcaacatggttttgcatgcttggctggcaaaccagggctttttaatcagttttccaccaacctcatcttttttttttcttgcttcccttttcatctctgccttttcattcccacgagggaaaaaaggagttgggcaaagggacctgactaccatgttccctgctttcacatgttgggctatatggcctgatctgcccccgcatggctaagcaatgtttgttttggaaactttaaacccaggactgttcttaattctttcccagcctcctggggctgctgggctgtaggggttgggcgaggctgagtttgggtaaactgagcttgatttcatggaatggttcaggagcctcattcctagaaaatgatttttggattggaccatcccacagggatgagaagaaacagaaaatgattcttccatggtgttaaaattctcatttcacaatatgtgaaagtcagagctcagcttccatccccatccttgcattttctggcgtttaatatttatattaaaaagaaaactggacatggccatcagagccccttgctttcttttctttcctcattccaaacatttaggtgcacctgctacatgccaggctctgtgatagtttttaaggatttcagaatgcccactggggatggcatgcacaggcagggtccttgtcctcatggtgtttcaaatcttagttgttgctaaccagccttggaagagccatctaacccctcaaagcttcacttcctcatcagtaaaataagttgaattaaatgagttttggtatcttcctagctctgatattctgacattgatggatatgactcagtcttctaaacacagatatgggctatgagagcttttcagcatttactctgagaataggcctaaagatttcgctaattgcttttcttcaaaaattttcagatgtatttttttctctcacaaagcaccatgaccacaggaatattgagttagacaagtgtaatcttttcagggcatgtagccattccttacaatgggatcccgtaactccctggaaaggctgtttccctgcgccaggttacataggagggcagcctcttatcttgtctgaatctgatgtcgctactcctttggagagctgggtggtctgaacagggcttgacagcttccacacatgcacagcttgcaacctgaccctttcattcaagtgattcaacagcttttgtgctaccaggtgagaggcttaaacagacatctttgaggggccgagcgaaacaaaaaacaaagcaaaacccactccctaatgaaatactgtctatactatattttgtctgtaatgcagcttctctcactgcagtgactggggcaccatttcaaagggctctaaaacttggccatcaagataagaaattataggtgtgatttatgtgctttttgacaacatagcctctagctgtctgaagataatatgtttgagtggaaaactattgactggaggacagggatcttgctaagttagaatatttttaaacaaatgttctttgcctctcatgggtaagtttttacagaagccaaaaatagtttttggtttctcccttaaacctgcctatttatggaggtgatgatatttggggaaaatgtgtattaaaaaatgatgcccaaaatgctctttttgtgcatcatccaaaggctgctaagattgcatgtcacttttcactctcaggtttatccttgaaactttcttatctggctccccagcaacaaaggacagataaatgcccagggagcgactgagcctcaagtcctttactgggtgttctgctttcctggaactcttccctgctttctatcaaacattatcagctgcttagtacttacagatgctctgtgcactcttctcttaaaatatgtgagccacaactttgcctcattagcccacacccactgccatgctaccttcattctaaggcctacgtttcttgttagcataaaaatgatttatttggtaaattacaaactcaaaccacagtaaagttaggaagattgcagaaaggatagataccgcagatgaaaattcacccaaatatttaaaatttgttaggcgtttcctatcaaatctctttcatagtacagattttttcttttttgttaaagtgatcctacaccttagaaagacaacagagcaacaacacaacagcaatactttaattctgttttacataaatgtccctttttattatcacatggtaggatggttctatattacccaataagcattagtgattgttttaaaaccagaaggcagtattgacgcaagggccggaatgttaaatcagagaggtgcagtaggaaaaaataatggcctttgaaaaaatttcacctgggttctaatcataggctacaatgttctttggctctgtaatgttggccaagttactcagccagtttcctcaggggtaaaatgaggtcattgatacttacctcactagatgttcgtttatgaagcatgatgtacaagtgtttaataaatatttcttctttgggagacggctaatacaagtataatgtctgaaaagaaaacaaacatggcaagcgacttaatttatagatgaaaagaaaagagaaacaggaaataaagttacattccagatcccaatgtctggggagaacagatctcaacccaccactcccgtggcctttaactctgatcagcagcctggttctcactttattctttttttttttctttttttaaatttgagacagagtcttgctctattgcccatgctgcagtgcagtggcgtgatcttggctcactgcaacctctgcctccctggttcaagccattctcctgcctcagcctcccgagtagctgggactacaggcgtgcactgccatgaccggctaatttttttgtatttttagtagagacagggttttgccatgttggccaggctgctcttgaactcctgacctcaggtgatccgccagcctcggcctcccaaagtgctagggttataggcgtgagccactgcccccgaccctcacttgattcttatagaccaaaagcctgacacagatccgtgagctcaagactatgaaattgtttggtattgagaaatcaagggcaatgtgaaaatcattctgtcttcattttttactgattctcctcatataggtgttttagataaatgcataaggagatgcatcattttgtttttctcaagattttgctccattgtagcaaggggcccctcaggggtaatgtttatttgagaatttgaaactctgggcttgcactgtagtgagcctgcgaaccatcaccaaaggaaggacatattcattcaaacatgtggaggagtgtgcactctctctctctctcaccattttaaaaaataggtctggtatttgcatttagtcactcaactgatatttattgagcttctctgtgaaagattcaatgatcagcactaaaagaacttgggtgaacagaacagtcatggttattatcttcaaggtgtttatagaccaggagaaacagcagacttttttttttaatggctgcgaataatgacaaaatgcttatagatatgcaacatgtggcaaagtgtatttcaggattccatgtgagcagataaaactggtttgggagattgaggcctgaaggatgagtagaatttagccaggtaaatgaggtggttgatggcagtggggaagggcattcatggcagatggaacagaatggacaaaacctgcaaaggcttggaagctggggttggcaatatggtgagtttaaggatgggaagaagtccagtttgaccagcatgtcagtggcaaggaggagagtcatgcaagaagaggttggagaggtgtgcaggggacagtcggacacagttaaaagtgatcccggaaagtacctaatccacactccctctctgaaacaaacaaccctgttctgtgtctgtacctcagctcttgccattattggacagcactgagggaaagtcctttctgaaagttgagactttcacacattctccctggttctgcaccctggaaccatcaagtcactccccttcaaacatctgaagacagactattttaaaaaataaagtgctgcgaaagcagatctgctcttttccatacatatgcacttgtttttgggaaatgtagagttacacaattttgcttattggaagctaacttactggctcagtgcatcattccaggctctgattatcaaagctgtggatcttgattgtgtcctcagtgataacagttaaccctcttggatttgtgctttctgtgaattggataaagcttgtcttctatatctttgtttaaagatttagaaaaatgtttaaccagagagaaccaaaaacgagctataaggcacaactctaaatatttctaatgagaaaatgatgtccctaacctctcttttttgttcccttttaaggaggaaactagtcactagtctctataacccagaatcacagaaatgtctaagtgtttttttttttttttttttttttgagacggagtcttgctctgtcacccaggctggaggcgcgatcttggctcactgcaagctccgcctcccaggttcacgccattctcctgcctcagcctcccaagcagctgggactacaggcgcctgccaccacgcccagctaatttttttgtatttttagtagagacgcggtttcactgtgttagccaggatggtcttgatctcctgacctcgtgatccgcccgcctcggccttccaaagtgctgggattacaggcttgagccaccgcacccggccagaaatgtctaagttttaatagaaagagctcaaagatatcaatgtgtgttggtgttcttgttttttatgagactgcttaaggcacaataattgctaatttcatttatttatacaaaagttgaactcatattacatgcagcggacagtgttgtccttctgccttcaaaacacataggcatatacactaccaggtaggatgtgataactgccctgtgatgggtttaaataaaatatgattctcctgcaatcggaggaaggaagtctttccagatgaaatgatgaggtcttacggaatcctgaatgaggcatttcttgaggggttaataaatgggaaggatctcaataaggatggaagcaaagacattccaggcaatataaaatagccccttttaacatgaatccattgtcatttaatgtactgtgatataatgacccactctttcccagcagtcaagccatcaaccatccatttcaaattatagacacatgccttttgctttcctcatcagtcattcttcataattttctttccttttaatattttcttcatcttaagaatatcaggttcctgctgaccacatgtcatggctcagtaactttggtctcatgaatgactgtggcctctgctacctactttcacacattagatctaaatgagaccacacagcattttataaaaatgactttacttaaattttgaaaaatagtctatgtctcaagctcttagaaattttggaacaatcaaaaaaagctgctgctggaggtgctgattggtgattaaaatgtcactcgagggtgatttatcagtgagagaagaataggagttaaatggccatttgattacattaaatagtacccaaagagtttaacactgcaatttatatcctattcataatcctgtttaccatgtaattctgttaagacttcctcctggtgtcagtaagctggtcttccaaattcttaagacattactacagcaaaaggaagtaaaataaaatatgtagccacataaacccccatttaaaaatcagtttgtaatatactctggacttagagtttggcagcaggatggggtgacaaaattcctcagacaggactaaaggactagctttgcacttttacagaatctttcaaaaacctcagatggaaccaattttgtctttctcatttgtccgtagagcctctgtggtgctgatttgactgttcaagctaggaggtggcagtgcactgggtgtaccatttagcattcaagatactatgtggcctcaccatcactcatggattgttgctgaattgctttactggaaaatattggtcttcatttacccccagtagagacatttcctgatctgtggctttgtaagttgcttttgtgccagtcccttgatagcgcatggaaatcacaggctatgggattcactgatgggaaaactctggggtccttgcatatcccttcccccactttagtttttttctatgttaagaatggcaaatgatatcaaccatgtgagataatggagacacggtcagagatcatatagtgtttcacagcaggcttgaatattcacagcagtgctcagaggcatcaagtctgaattgttagctctgtggccagagagatctggcattaagactttaagagctaagacttgtccaggagtgatggaagttgaaattccatattaattaacaacagccaagtgtggtggctcatgcctgtaatcctagcacttcgggaggccaaggcaggcagatagtttgagcccaggagtttgagaccagcctgagaaacatagtgagatctgatctcttaaaaaaaaaaaaaaaccaggcatggcgacagatgcctgtagtcccagctactcaggagacaggtgggaggatcacttgagacccagtggtcaaggctgcagtgatccgtgatcaagccactacatttcagcctgggctacagcgtgagaccccatctcttaaaaaaaatacataaaaactatcttcacaaccccataaagtcaatattatgaatccccactgtaagatgatgaattcaaggctgagaaatttttaacaaatttaattatattgtagattgagcttctttctgcagacactaaagtgttcaaaaagtgagtcgttaaagtgtttatctttagttcagatgattaaatgaggtcttcctacaataagacatgtgaactaaaggtgacctgtgtcatgcattactatcatactgtccctttatataaaaaatccattttattttttaaaaaggagtcacttcctttttcccctcaaaaaattgatttttattttttgttattgagtagaaaaagccagactgtttatcccatggagaaagctggaggcagtaatatgggctgaaacgaacaagattgaggtccatgaacatgtcaaagaatgttataaggagtatgggataagggccattgtttcactgaaaaattaacagaagtaattgacacattaggaacacagaggggaattacacttatagaatgatttgagagacttttaatttacagatcagaaggtttaaatttttcttctttacagcagatgattaagcagatagccccaaatctccttctaatgtgctcaataatgattttgcattttatggttttagagagatctattacatactgcctaaacctaaatatccacttctaccttgtcttaaaacaagcatgaaaaactttagccttatgaataataaaatttattgttataatatatagacttatctttgtctttaaagagtcgcagcaaggaacaaagttaaaatgcaacagaaattagtggtagcacaaaattttagtagctaaactttatgttaatttctttcattttaggctttgcttcctttctgacaattttgctaatttagcaaagatttttctcaacataggaaaaaactaaagttggggaagggatgtgcaaggaccccagagtcctcctaccaaagaatcccatagcctgtgatttccatgcactataaggggactggcgccaaagcaacttacaaagccacagatcaggaaatgtctctgtgccactgacttgtgtacttacatctcacacatgggactggctttccagggatggccatcccagctaggctgccaatgaaacgtttgctcatgatgcctcccttggagcgtcctgtctttctttaccttgtgtcagactctgtctatctaggaccatcctatcttcctctcctcttcccagccctcccccaaccaaccaccaccacactgggtcttgcttttgggctcttcctagtgctgttcttggaggcggcatccccagccctagtcctaccgctgcgttccaccctgactaagagacttactgagtctgagggttgttttagacatgccaaagatcctaacttcagtctttggacaccaaagctccttttacctcttgtcatacttagaggagaataagataaaatgcagttattaatgcagttaatatttgcagcagtggttctccatcctggttgctcattagaatcacctggagtacttttaaattcagatgcctgggccccactcagacaaattaaatcagaaactctgggagtggtgactgggtgatggtaatatgaagctgaagagggggtcctctagatgaaggaggcaactcatcttggtgtgtttcccgttctcattaatagcgcagacccagtaatccctcataagaatggtttgcttctttctaggacagaggagtaggtctgaagccatgagtgtgaagtttatttgcagccagtgctttttcccaggccatgggactcagcccccacattgcacaactccaggaacaccgttcacgttatggtctgtataaacagcataaatggtgccctggaatttggtgtgctgaactgagcaaaaccaagtaaaggagtctcatcacctttggccaacacagtaaaggacagataagttagtatgtttttccacagaaataccttccaccatgatgagtttttgccgtgctcagggacatcacagtttgaactgtatttgtcagcctatctggatattgcgcctacagtaaatacgtttctacctctagacaaatttcttgcaaaccaatattttgaatatagcctatttgtgtcttggagactctaagaaggtattttagccaagactgcttgtgtgttccatactggtttcacttttaaaatgtttctctgacttactggtgtttgcagttcttatacgatgtaattttctacattgctgtatcctcctgcacatattttttcaacaaatgagacatctaatcagacattcagatactttatttgcagcctgtgatgtttatggagattttgtttttgaaccagtacttgaagcacgtttaatcccactgcctgagaacaccctcccacctgcattctccacaggccacccccaaattctgccaaagtgagcagatcaagtttggcttttcttaatgccattaagctcagtgagcaacactgcatcagagactccagcatgtgcagcagaatggacactggcacactggcatgggtgtgcagccacatgtggtgtctcactgtggggacatggcctgtgagccaccagggtggcccttgagtagctgtgggtcaggagatccccagaagagacagtcctcaaaagcccggaagcatgatgaacaaaaactctctgtgatttgccttgttcctttttgttactgatggccctccactactctagagaaaactctttagctgtgtgtgggtgtcacaggagagtcaattcagcctgaaccatgaggcatgtcaaaagatggctcaactcacaactttttataaattagtagactttaatttttgtgatgttttaggtttatagaaaaattgagcagaaagttcagagttcctatataccttctcacttcccaacccctactttccactattattaatgttttgcattagtgtcgtgcatttgttacaatggatgagcaattattattatctaaagcatatattttacaatagggttcactctttgtgttgtacattctatgttttgtttttgttttgttttgagacagagtctctgtcgcccaggctggaatgtagtggcgtgatcttggcccactgcaacctccgcctcttgggttcaagcgattctcctgcctcagcctcctgagtagttgggattacaggtgcctgccaccatgcctggctgatttttgtatttttggtagtgacgaggtttcgccatgttggccaggctggtctcgaactcctgacctcaagtgatctgcccacctcagcctcccaaaatgctggaattgcatgtgtgagccaccacacccggctgcattctatgggttctgacaaatgtttaatgacatatatccaccatcacagtggtagcttttaaaataaattttagaaaaatttttcttcaatagatctggaatagaaaggggcaggaagggaactaactttggctgagccttgctctatgtgtgtgctggcaactttgatttacattgacagatagtatcacatgtaactagtgtaacaaccctgaaaggtgtcaattattgtcttcattttgtagatgaggaaacagagcccaaggaagaataggaaccttgctcaaagaaattatggaaccaagataggtgcacaggtctggtagagctgattaacaggctggcctctgattttctatcacttcctctccaaacctgcatcaaagaattaaactctctcatcctccttttttagcactactgaatcataacattatttacaaagttatttgtaagaaagaaaaattatgaaaaatgaagtgtgtgtaagtcatagctgaagacctcaaaattgtgctaagatcctcaacaggaaagagcattaagactcttattagactccttggctaggcttgatggctcatgcctataatcccagcactttgggaggctaaagcaggagtatcacttaaggacaggagttcgagaccagcctgggcaacatactgagaccctgtttctacaaaaaaatttttttaaattagtcaggcatggtggcgagtgcctgtagtcctagctactcaggaagctgaggtgggaggattgcttgtgcccaggagtttgaggtggcagtgagccttgatgaaggaactgtactccagcctgggcaaaagagcaagactccgtctcttaaaaaaaaaaaaaaaattatcattacagttcgattaagcctctttgttggttttaggtgttgcgctttttttttctttactacatctcagtatatgatactatgctttacattccccactttgcttgcatcagtgggtaaagcaacaaccaattgtctaacctttgacaaatcacttagcctctttgggcccccgtttcctcatcttgatcaccctatggtagagcaaggaacatggtttcaggcacctgggctccccaagctgtcttctgggattggaatatgaggtactttagttaagagaatttgccttagacaaattatttatctatttccttagctgtaatataggaataataatagacttgagttcatacattgtagtgaaggttaaatgagttacaacagtgccaggtacaaagtgagtgcataatacatgcttattattgttattttacgtaaaatttggataagctccttctaattctagaattgtatgatttttcatatactgtaacttaggctccaataacatggcactttttgtcatttaccataaaatttcttaggtcatcgaaagcagatctttacatcagacctctttacaaaaatattcatggtggttgatctgttttctgctgcagacatctgtgagtttgagttttaatcttgagcaaggaatgcagatgagatgatcaaggttacctcacagcttgaggagcaatgctgaatagttttctgaatgtctgagcagcccttttcacaatgaagtgtttcaccctgaatagtggaagtttctttaagtgtatactggtgagtttgatgaaatcattagagcattttgctcctatgctatcacagcgaataccattctggtttttgttgttgttgttgttttaagccaaagcaagtttattaagaaagtaaaggaataaaagaatggctgctccatagacagagcagcactgagagctgctggttgcccatttttatggttatttcttagttatatgctaaacaaggggtggattattcatgcttctttttttttttttttttttttgagatggagtctcgctctgtggcccaggctggagtgcagtggtgcgatctcagctaactgcaacctctgtctcccccagtttaagcaattctcctgcctcagcctcctgagtagctgggattacaggtgcacaccaccactcccagctaatttttgtatttttagtagagatggagtttcaccatggtggtcaggctggtctcgaactcctgacctcgtgatctgcccacctcggcctcccaaagtgttgggattacaggcatgagccacggggcccagcccatgcttcccctttttagaccatatagggtaacttcctgacattgtgatggcatttgtaaacagtcatggtgctggtgggagtgggagggtagcagtgaggacgatcagaggtcacttttatccccatcttgattttggtgagttttggccagcttctttactgcaaactgtttcatcagcaaggtctttatgacctgtatcttgtgctgacctcctctctcatcctatgagtaagaatgcttaaccatctaggaatgcagcccagtaggtttcagattcattttacccagctcctattcaagttggagttactctggttcaaatgcctctgacatttcccccctcccttttataagagaatccttaatcttaagagttgtagagggatgaagatctgtattctgtaacttcttcaggctgaataggggtgatgatattcctgcctaactatgaggatctcttgtatttgggtagagaggagctcagtcagaaagcgtcagtatgtcaagggccactcataactctggagttccaacaaaaggtgatatctagaagattaataaatgtttaagaaaacatctagtaggcttattctgcatttctacacaaagagtacaacagcaatatattccacaacagtaaggcaaaataagtaaattatcccaagtaaactaaattagaagatttttcatgagctgggcaactgttggaaccaagcagatatggagttgttagctgattccaatatgtgcccagaattagaatattgatccagatttttacattacccatccttcttgtttcttctgagcagcagccaaagatcactggttggttcacaggaataagcagtcagtctaaattgcagaaaaatactcaaaaaacaactgatgagactagaatctaatcaggtgtaccatagtttttgaaacataatttctctctccagtttcccattttcactaaagacaagtcatggtaagaccgatttgctttattatacttggcctgattatttgtatgaagtgcagcaggaataattatttttcacataggcttttaaaattgactttaatggaactctgttccgtaaggaatctcaaataagacttttttaaagctgagaccggccatgggtttgtaccctcaaatacctgtgagttgggtaaattcctctcctcctgaggtcccaagataacctggagctcctgggcctgtcagaaagtgacattctttgtttaccaccaggtcaggaaccctgtacagaaactgtgtagacaaggtatgaggccatttttcccaaagggcttttattggctttaccagtcaagtttaattccttaaaggaaagcgcaccattccagtcaaagccttggtaaaataaccaatttctccaactgtgtcctgttacaaaagaaaacagattcttattgcacttatgcaaataactatattgccataagttaagaatactcacaactagtttccaaattctggcaaaatcaggtagagagaaacaaacatgctccaaattctgttcataggagtatactttactcaattgttaaaagctgtaaatagcttaatagaaaagttttcttggttctaaaaaaacaaaacaaaggattagcaccgttttaagcaaaaagtaaaaaaatcacttcagtcttctattagttcagtccatgcagttaactcctgtcctgcttgatatttgtgaacatttcagctttccatgagagtcctgaaagttgctttcctctattctaatgtgacaattgccaaagttattagaaacctgcatttaagaacacctgtcaaagtcctatagctgattataagctaccttttgaagaggattaaaacaagacaacaattgtcagtggatgataaaatgccttagggcagccactattaaagccacaattggcaaggaaattttgtttacttctgtggcatacaacaattttacataacaattatagccattaataacatatgctgagtcatattagaattataggaatttttccattattttggaacacataccagtaacatatttatataaatacagccctaagaaagccaacattgttttatatttgacaatgctttctgtattatttttataccaaataagccaaatgtcactgttgtattagtgtactattaatgttaaatccaattcttaataaaaccttatagacaatgtatttaatcttaatcagtttgaaccataaggtaagattctcataaatttttataaccctttaaaatatttgtgaaagagaagatcagtgctctaagaaaaacctgttgtgcttttatttcaatgttcaatttatagaaaaactgattaatacccctttagctttagccaatatgttcacacacacaatctcttttacaattaattttttacaaaccttccacaacttgcttaaagctttatcctatctaacttaaaacaaccctttaaccttttaatctaggcaaaaaaatccacatttccatgacttcttatagtcttttaccaaaaacacattttactttctttacacagcttacatgtcaaactgtttttatttcccaaagattaattaagtcacacaaactaaaaggcattacactttttacttttctagcaaaatatttcatttaagctcctattatttttaagccaattaacaaaagctcttttatattacacacacaacacatataactacacagaagacaaaggactcatttcctgatccaggaattgaaccctgaacccaggccaccaatgtgaaaagagaaagcagggccacatggttacaagatcaagctcccaaggacataactgaccagttttgctggactgtcttagacagcaggcttatggggtcctaggcccgcattctatcctgaggtatccctctttctgacagaaagatatggaaagacaaattcatagcacaaagtacaacagattcactacagtttaagactagcctcacgaattctttttcccactaatcaaaactttacagaggagataaacagtaatttttaccattcattcaaccacagagagagagagagagaaagagagaagtcaaaattcttacccttttgctgacatgccaggcttcagggtttcctttctctgagtggccctactgacccggctggctgcaccacagctctgggggccaagccgcaacacgaaggaaggccagagtaaaatacatgtgacaaaacacagacattagcccctctgcttagcacctagtatcaaactgacaaggctcaaacgtgcccccggctggaccctgccattgttaatccaacctctgaccaggaatttcaactcgtggtctctgggcaagatggtcaccctgagtaatagtaaagacgggaaaaggaaaggagagagagaaaagcattgcctggggcagagtggggaaggtgaagagcccagggaggccagagaaagacccacccattgcagcgacactgaaaagttcaggcggcagcttgtcagtagaagagggatctttcatggcagttccatcagctctcaagtttcccctttagggggaaacttgtccccatgtcccatgatcctgtacatgcctaattctgtcacccacagccatcagcaaagagtgcaaggcagattaacccaaagaaatggtggttaacatcctatagtgccaaacccgttcttagctgagagggactttactgggaggggcctctaaccccctaaatcttaggaaagactctaactttcataagttgggtctcaaacccaagttcggtcaagcgtccttgccttttattaagaggggcctttaacccactctatcttaggagagactctaactctccttagttgggcttctaacccaatcccgtcatttactctggtaaatgcaccccacctacccaaagtcagccaatttgtgtgtgcaaatgattttcctttgggttggaagcctcttcagtatcatccctttggggtttgcagaataatgttactggatcccaccacttacccagagttagcctttgggtcggggggttttttcagtattgtcccttctgtagtgaccataaagatgttacaggaaaggggtcccaatccagaccccaagagagagttcttaggtactcagaaagttcttaggtactcagaaagagggataccttaggatagaaagaattcagggtgagtccatagagtaaagtgaaagcaagttaattaagaaagtaaaggaataaaagaatggctactccatagacagagcaggcagcaaataccattttgtattgtaaaatacctgattataaatctccctcccacaagacctcaatctcttaaagattaaagttacctcttattgaactttttcttgcacagtgcccctgtactttttctcacaaaaactccttgcttctgacataacacctacttgttgattctttgactatgctacattctttctctccatcttcaaacatgcccttacttttcctatgcacctttctcaatactaatttttctttcaaatttaactctttccccttctgggaagcgtaccctaggcccagtttgagtcaaatgctgccttcctatttagtcctataccataaaatatatctcaccattactgcacttaccacccttgctgttttgttttgcttttctgaggcagggtcttgctgtgttgcccagactggccttgagctccctggctcaagcaatcctcctgcctcagcctccccagttgctaggactacagacatgttcccctgtgcttggcattactgcctgttttgaatcattagtttatgtttgtctttctgaattacactgtacactctctaagggcaagaatttttttttgtcatttttgtcttcacaatcccagcacttaacgtagcacttgtccctaagtgagtactcagcaattgtttgtacaatgaatgaacagatgatatgtcatactcaaaaagccaagatacattctgaaaattgaattggtctcaaagatgaattcctggacatgatttaatacgaatttaaacagaatctcacttttacacagtttggtgttgttctgttgtaaattaagaaatgaagaattcactcaagaagaggaaaattaatttcagttggcgtgacactggtggggaaggccctaggtgtgagttttggtacatgcccacggtaggtccctgatgaagaatggggcacaccatgatgaatgtgagtgtttttcactctgcttaagttattcaattaaagcaacctgttgtgaaaattgtatgatacaacgctctggctgaaagcaacatgattttaagttatggccatttcctaactaatcttcagggaaatgtttttgatggtttaagaggctttgatagtcattaaaaacagaactgtaagttgagggcacacattttttccctctgcaatcagttttctctacctttgaaggtagttttagtagaaggcctctgtagaaacaggcagacgtctggtttccaagggatatcctggaatttgaatttctgaagtagacttattaggtatagatttatcgggcatggccagaaatgttttagataccctctggccattctatattttagtcattttaagtctcttgaatgatttctcaaagaacccgttttgttttgttttgttttaatgaaaaagaacaaaaaacgttttccataagtttgcagactttgggcttaaaaaggctcctttctgcaagacttcttagaatctttaatatgctcatattatattgtgaatttttagaaggtgattttagcgttctgtgcttcaaatgtatttgggtatggtgaactttttttgtggcaagcttttaacgtctccaaaatattcattttcacaagcacagtttgcaaaacatggcagggtagagtttgagctattggaaatctaaggaaggaaacctaatgaatttgtgttgtaggcaaaggtatgtctgtctttgcagccttggtcatcatggggttcagaacatggtatccccaaatagggtgccttggcacattgaatattttgaactggaggaatttgagaagtggcatgtggtggaaagactctctgaccttctcccctgaacagcaggttacagtacccttgtgtgagagaagtgccctcctgatacccagaggaaaggagtatccttagctccaagaatggagggacacaatggggaatctgcacaggcaggtcttgctcactttcccccagtttaccaccctcagctcacacatctttgtcctaatacattttcccataactttccactcttcatcaagcttaggataaaaatgctcacgcttaatgtttctttctgtcttcatttttttaatgaaggctcccacgtcacatggcacttatattcaataaattttatgttttccctttgttaatttgtctcttttcagtctaatttacaaggccccggacaacctaagagcatagaaggaaaggagttttcccttccctctactcatgacagtatagcctgagggagggctccctctccagagttctgagtctggcagcttcctgaagatctgggaaggaaatgctgaaaggaatatttctggaataagcatctgtgatttaaggaagccacctgggataatggacatagcactagtctagtgtcagaactgagattcccatccagccttggtttccaggtagctgtgtagtcttggtaggcatttaacgaccatgggtcttcctctcttatgtaaatgaaagaattcctagaagagaacacacaaatggctaagggacattaagataaaagggaaaaaaactaaaccttccacataaacaaaggaagtgcaaattaaaacagtgtcagatacatttcacttgggagatgaataaagattaaaggggcaatgttgaatgtgaggaaggctggtgagggtggaaattggtaccagctttccagaaagcatgcatatcaagagcctcagagtaagttctcacccttcagctttacaattccacatctggaaatcaatcaaaagacataaactagagaaacagaccgatttatacttaaggatttttttatcacaatctttgacatagtaactacttcaatgtagcagtgagatgattatagcaactatagtacacccatctagtggctataatgcacaaattaaaagcacaattgcaaggaatgtttagtaatacagaaaatgcttacaatagaacattatgttaataaaaagggatactacacaactctttgggggtattgaaaaggatattttttttctatatgtttctgtgtttttgtcctttaattaatgagcatgcctttctttcatattttaaaaaaagttattttcagaaaaagcaaatacattgataaatgaactgaagaatatggcctcgatgatttctaaagtttctcctaaaatcatacattgtgtgatgtaggttatggattagaaaacattgtagagaagaggaagcagaatgttatagacagagtcaacacacattttattgatttaaatgtgagtcaacacacatttaattgatttaaaatagaattatgaagtggcctatttgacttgagacctttaacctgggcttgtagtgtaagcagttggaacatgaagatgctggtagacagggtatctctcttaattatttgctcttaaagcagcagctacttcctttagagaacattgtttctagtgaaacattaacttctggaatagtatctattgctgtctggaaccataaaggaagttgttaaatttcctgcatactataggaataaaactttagggctagtgaagtgattgcaaagagtataaggttttggtgtgatgtgaagcagtgtatatataacagtagtggttaagggcaagggttttggagttggacaaaaccaggctctaattgcgatgacaaggtcaagctgatgacattgggcaagttacttaacctctttatgtctcattttccaaatctataaaatcattatctacctcctaaaaccatagtagggattaaacaatataatatatgtaaagtatcttgaagaaaacctactatatagtaaacacgtataaatgttggttttggccagacgtggtggctcacacctgtaatcccagcactttgggaggctgaggagggcggatcacttgaggtcaagagtttgacaccagcttggccaacatggtgaaaccctgtctctactaaaaatatgaaaattagctgggcatggtggcgagcacctgtagtcccagctactatggaggctgagacaggaggatcccttaaatctaggaggtggaggttgcagtgagctgagattgtgccactgcactccattatgtcacttaaatcactgtatatttatgtatgaaattaaaataataatagaactaattaggtttgttgtgaaaaataaacgaaaagatgcataggaagaatgtagcccagtgcttctgtatagtaagtgaaagcacattaataagcaaagtagaaaggaaggaatttgcacataggggagactaaaaattgtttattaaagaaaaaaaaatcttagaagtcacaggctctttctcatgattttattatccctgtctgagaacattcactctgaaaatcttgtgtttggcaagatcacgaagactttccatctttgtacagtaattgaacaattaaagctcgataagaggttatgggcttcttgaaagagaagaatctgctttacagttgtgtcttcccagtgctgctttgtagtatgggcccaccaaagaaatggcatgagattgtcaggatacaggggaaagggcacttggccagaatgcccgaggcttgtttctcccacagctctgctctcctgctgggacctcaggcaagtcacttcgaatgtttactttttattgcctatataacctcagggagttgtaaggtcagtaggtgccatggctctgaagtcttgataaagactatctaagtcttgatttcctcaattaaaacacaaagaagagaaccactttctctaagtttagacagctggttgttccctgaggacacagttctgatttccagttcattgccccttgatgaatcaatttatggcacatgtgatttggatgcaattcagttgtcctgtggataactatattcacctaaaagtttatgcttaaaactttaaatttgatttatattaataactttggaaattcatttgtatgaaaattttgatgatttaaaaaaatacatcataaaaagtcaattgatagcttcttttttttttttttttttttttttgaaacaaggtctcactgtctcacttcactttgtcactcaggctgcagtgtcactctgtgcaacctcgatctccaggctcaggtgatcctcccatctcagtctccccagtggctgggaccacaggcatgtgccagcacaccaacctaatttaaaatttttttttgtaggagtggggtttcaccatattgcccaggctggtcttgacctcctgggctcaagtcatccaccttccttggcctcccaaaatgttgggattaaaggagtgagccaccgcccctgtacattctattgataacttctaagtttagcttctgactagcattttaaagattataatgtggagtagaagtcagaaaatcttcattggctttcttcaccatcttgttgaggatttcaaaaatctcttccgtttgggtgggttcatcctgaagtggctattttcagttaaaatgccatttctctgttagcgtattttatttctttttccttttttttttttttttttttttttgagtcggagtctcactctgtcaccaggctggagtgcagtggcacgatctcggcttactgcaacctccgcctccagggttcaagcgattctcctgcctcagcctcccgagtagctgggatttacaggcgtgtgccatcatgcccaattcatttttgtatttttagtagagacagggtttcaccatgttggccagaatggtctcaatctcttgacctcgtgatccgcccaccttggtctcccaaagtgctgggattacaggcgtgagccaccgcacacagcagtttatttcttaaatgactttagggtacttgtaagacctaaagttgtgaaaaagttgttctcatagaagtagagagtagaaggtggttaccaggggctggggaggagggaggactggggaggtgctgatcaaaggatacaaaatttcagttagtccaaaggaaggagatgtattgtacaacatgactactatagttaacagcattgtattgtatagttgaaaattgctaagagagtagattttaaatgttctcctcataaaaagaagatatgtaaggtaatagatatgttagttatttgatttagctatttcacattgtatatgtatatcaaaacatcatgacacaacagtgtatgtatatattgcaaaacagctaaattaagtcattaacctggtggctcacacctgtaatcccagaactttgggaggctaagatggaagaatagcttgagaccaggagttcaagaccagcctgggcaacattgtgagactcccatccctatgaaaattaaaaaacaattagccagatgtggtggtgcatgcctgtagtcccaggtacctgggaggctggagctgaggcttgcttgagcccaggaattggaggctgcagtcagctatcatcgcaccactgcatgctagcctgggcgacagggtgaaacccctgtctctaaaacaaacaaaaatcatgttgtacatcataaatatacacaattttatttttcaattaaaaataagtaaaaacgaacaataaataattgtgtgagtcaaggggtaataactgcaagcctggggaagacaaaaatgttccattgcttatgtcatctttagtcaaatggtgataactacctagatcactaatgagaagagttttgggccacatatgaattctgcaaaaagcaaagaaaataaaaagcaatgatggggaggccgaggcgggtggatcacgagctcaggagatcgagaccattctggctaacacggtgaaaccccatctctagtaaaaatacaaaaaattagccgggcgcggtggcgggcagctgtagtcccagccactcggggggctgaggcaggagaatggcgtgaacccgggaggcggagcttgcagtgagccgagatcgcaccactgcactccagcctgggcgacagagcgagactccgtctcaaaaaaaaaaaaaaaaaaaaaaaaaaagctatgatgaattattgatatcttgataactatgctgggcataggagggggaaggcacttgccttgtgttgggtagctaccattgcaaaattccagagaggaagaatagtaaatattattttcatcaaggcacgtcattaccattgaccgttaagaatttccattgcattgagagctgtacagctgagatccattttttttcttgttgtgcacagattatctcaaattagtgacaggagtatcatgtttatatcaacatgaagaatacatgctcatatagttaagctgaatgtgtaattatgaaataaatactagctcacatttcccctccaccaattatgttactaaattattttcttctgttcaaaaaatttcccaaaaagtttggttgaagaaatctttatgaattttcataagaattcaaaacagcgtgttttttcacatttcagaaagaattttcacacagctttattggcgtttattggcttatacagatatactgtacttagaatacatgattaccatgtaaagaaaaaaggcaatggtgggaaaatggtcagggagagcagaactgatttgcagtcatgtcaggaggatttcgaaatgttaagaaacagctgagccacacaagcaagccaagacaggatttgtttcttgttttttttctttttttcttttttcttttttgagatggagtctcgctctgtcgcccaggctggagtgcagtggcgcgatcttggctcactgcaacctccgcctcccaagttcaagagattctcctgcctcagcctcccaagtagctgggaatatgggcacccaccaccacgcccggctgatttttgtatttttagtagaggcagggtttcgccgtgttagtcaggctgggctcgaactcctgacctcaggtgatccgcctgcctgggcctcccaaagcgccaggatttgtttcaaggatttgaatcaagtccgaggtggctaaaagtcagtttacaagctcccttggggaatatggccaggtgccctttctacttccacttctagctgcccccaataattctgccgaccctgagggtgcccatactagcaatcagagcaagctgtggacagatggattctgaggctctgacttagccctatgctgggactaagaaaataaaattctcaagatgtgctaggcttcccattagagtgttgtttttcatgtagaagttggctgtcactggacatagtaattttgtgtcagagacaagacagttattaccgtctcattttgaggtgttaaaagacccatcatcactgtgaaatcttgtttgcttcagaattttgctttgctttgctgttgttctgtttttcttctggccctttctcggtctgctcgtctgaattcttttctctttcccctcccatgccaccttcttgaagccaaaaataagagcagtattttccatggaatgtccacatacttggtgtttcccaacaccaagagaaaaatacaagagcaaaattagaatgcaaataaaaccaaacaaagcataccctttttgatctttattgcttctaattctgcagccttcagtctaggctcagttgattgaaggatgagttttgtttgattttgaatttggaaattgttactcttgtacttttcccccctcctaactgtgttgcttcaggttgtttttgaaatatcaaaatttagttttttaatatgtattctgttgtaagactatgagaaagaaaaaattagaatgtaaataaaacagactctatttgacatttattgaacctaattttgccaccttgccaccttcatccaggcccaattccttctactctgtttttcctgagaaagctttactttcttgtctctttgatatattttgtaataataatgttaacatttgtatgggggtttgtaattaagaaaatatttccacatagattattggtctgacaggggaactttggaggcaagatgggtgattccttttttttttttttttgagatggagtctcgctctgctgccctggctggagtgcagtggcatgatctcagctcattgcaacctctgcctcccaggttcaggcgattctcctgcttcagcctcccatttttgaaagaggaaagtatgttcataaaaatcaggattagaatccatggccaggtgcagtggttcacacctgtaatcccagcactttgggagctgaggcgggcagatcacttgaggtcaggagtttgagaccagcctggccaacatggtgaaaccccatctctactaaaaataatacaaaaattagccaggcgtagtggcgggcacctgtaatcccagctgctagggaggctgaggcaggagaattgcttgaacccaggaggttgcagtaagccaaggctgtgctactgcactgcagcctgggtgacagaacaagaatccatctcaaaaaaaaaaaaaagataagaagaaaattaaaaaaataataatcgggattagaatccagatattcaaaattcaagtctattctttcaacagcattgtggtgcagggagccataagaatagatatctcctctcttctcttgtctcttcctggcagataaacattaggatcttggactttgaccttatctctcagttaagggtttactatgatataattagagaatgaactattgtcccatatgctgttaggtaggaagttaaatctttagctgattagtgactaaacaaaattaatacaaaaacttgaagaagaagtgattattaaaggtatagttaagttcagtcatgagtcacacacacacacacaaaataataacagtgagttaaataggaaagaagtttacattctctcctgtgtaaaattctggatgaatggactggtatggtggttctgctttgcaaatggcccagagacccagggtccttctagctcacagctccaccaacctatgccatagcctcattttttcatgtgcaaggcagcaccttccatcttggcaacaagatggagggaagcataaagaaaaagggagaagaggcacaccgtaactacctcttaaaggaggtttctcagagacaccatgtgactgctcttcttcaattccattggccagaatctgatcacatagccgcagatagctacaagagagactgtgaaatatagtctttgttctgggtgactatatacctagttaaaatttttatttctatggaggaaggtgaggttggatgttgtgggacaaatagacattcctgtcagagatagatattggaagagagttactaagttatcataagtgaaacgaaggaaacatttgctatattattttaacaatctatctgagaggagcttatttggcattctaaattgtttacatgaaatagaagattttgatcaagttgttccattttggtccacattgcctttcttaagtcagtgctaaaccaaaacatatttgaattcattaaacacaaatttgtaaaatatggcaaagcctccaagatagctttttttttcctgttgagattgacttattcctatttatacccagattggctgtaaaagtgtgggatagtaactgagctatgatcaattacaaaaggtaaggggtgtggctggtctagagacaggctgaccagtgatacacaacatgtacaaagaccaggaaattgactctgaatcaaagtcttcgttttatgtgcctttgcataatacaagatatccgtggggtttcaaaggagatttgtttcagctgttggctgagtgggcggcaggagaagagaattccaggacaacatacatatgcctgcctctgccaaggactgttcttgcagagcctgaaacacactgctgaccaaccatttggagataactgttgggtgaaatcccaccggtgcctttgtattttgctgcattcttcagtttcatttggaattaataggtggattgccacactgagaagaaagatatatctgccctttgtataccttgatgggctggtaccagggaactaattatattggtgactttcttcaatttattttcggttaagcaacataattacatgatgacatatttacctctgagataggattgctttgcgctggctgtcagaagatgcatctttaatgagttagtatgttttgtccataaaaaatttgttcataaaaatgtttattttcaagttatctacatatatttaaaaagcctttaaacacaataagatttgtttcaaagtttctgtttatgtcaacacacatgcaattttacatgaatctcatatgtaatttttgtacttttttttttttttttttttgagacagtctcactctgttacccaggctggagtgcagtggcacgatctcggcccactgcaccctttgcctcccgggttcaagtgattctcctgcctcagtttcctgagtagctgggattacagatgcatgccaccaggccctgctaacttttgtatttttagtagagacagggttttgacatgttggccaggctggtctcgaactcctgacttcaggtgatccacccgcctcggcttcccaaagtgctgggattacaggcatgagccactgcacctgacctgttgttgcattttttaattgcatgctcttcttttcctttttttaaaaaaatattgctgtttgagtctgctcaggctgctataacagaaataccgtagacagggtggcttaaagaatagaactttattcctcacagttctgaaggttgggaagtccaagatcacctcttcctggtttgcagagggaaaccctcttgttgtaagcctcacatggccggagagagagtgctgtaatcttttcatcctcttgtaagaatcccatcatgaggactctaccctcatgaccttatgtaaacctaacgcctccacaaggccctacctcctaatcccatcacattggaaatcagggcttcaacatataaatttggtgaggggacacaaacatctagacatagcacccccctcatctttcttcagtctatctatactatattgcccctatcatattgtacctaccaacaacctaatgcttgtctgtccatatttttctccatgcccatttaattacatgttaatacaacacatgtctccatctacatgtatgcatatacatagatgcagcctttagagttgctttaccgaatggaagcatgcttttctccattttattttttctgactccacaataccttgtagaaatcccgtcaaattgaatgatttatctctaattcaaattctaaaagttacattccattccatggtataagtatatctacgctatttaaccatccccttcttgacatttactttgcttgcagtttccactatggacactgctgcaatcaacattcttgttcatgtattcttgtagacgttgcttttatctctgttggatagattctcagtgttgtgtggcaataatgaaacaaacagtgatggattttgatttttacctcacttcttctttcggtgtttgactggaggtgctgcctgggaaagactagttggccaatcatcaggaagtctcatggtgtggcattttccagagtcaagaatctcaacctcctcaacctcagtgttatgggcacagaaaatggactttttccatatatcccaggatgatgtgcctttttgtgacagattctcagtaacggaattcacgtggcatcttgatccatggctaatggtgcccgcttatgatgccagttcttttttttttttttttgagacggaatcttgctcttgtcacccaggctggagtacagtggtgcaatcttggcttactgcaacctccgcctcccaggttcaagtcgttctcctgcctcagcctcctaagtagctcagattacaggcgcctgccacgatgcctggctaattttcatatttttagtagagacaggggtttcaccgtgatggccaggctgttctcgaactcctgacctcaggtgatctgcctgcctcggcctccccaagtactggaattgcaggtatgagccaccgtgcttggcctttttgtttttgttttttctttttagatataataatattcctgggttaaactataatcagtataagggaatttaaggcattgttttctccaatttattcacttagttaacaaatatttattgatatatcaggcattgttctagacactagggttaaatccatgagtaaaaaatatagaaattaacatcttcgtgagggacatggcagtgactaatattaggttggtacaaaagtaattgtggttttttgccattgaaagtaatggtgaaaaccacaattactgttgcaacaacctaatataaaggatcaaatgcattatattaggtggttagaaagcactaaggttaaaaactaagcaggaaagtggtaaagaatgctaggagatgagactgacataattctaatggggttgttaggtgtgaccacactgcaagtgtgacatttgatgggaacttgagagtagagaggtggagggagggatatctgggggaagaacgttcaagtcagagacaacagaagtgagaggctttagtgggggagagaggagggaggaatggatcttgatttgtttgaggaaaagcaaagatattagagtggctgggacagggtcagcaaagggaagacaaacaggagatgagctgagagagagaagagggaaacagatcacatactgtcttctagatcatcaccagggcttcacctttattctaagatgagacactactggaagttttgagcagagcagtgacatggtataagtaacatttaatcaaaatactgactgtgatgccgagaaatgcctagaggaaaggcaggagtagaagtagggagatcaaataggatgctattgcaatcatccagcagagacttggtggtggcttggaccgggggatcacaatggaggtagtaagaagtagctggattctggatatgttttgaaggaagagtgtattaactttttatttttgtgtaacaaatcactataaactttgtggcttaaaacaatacaaatttatctcacaatttcccttggtctggggtcagattatggcttagctgggttctctgctttaggttgccaccaggctgcagtcaagatgttgacggccttcattcttatccaggggcttgacttaggaagaagccacttccaagctcattcagggtgttggcaggattcatttccttgtgacagtagaatccatggaggcttgcttcttcatgttcagcaggagagcccctggttccagtctgccgagagagtctcctgtataacaaaatgtaatcataggagtgacacccatcacctttgttcaattctgttggttggaagtgttacagattctgctggcactcaaggggaaggaacttttggatactaggagactggaattatttggggggtcacctaagatctgtctaccataaagaaacaacaagattttttgtctagatttagaatgtgtgatgaagaaaggaacaactgaaaagttggagttgctgttaattaaggtaaggaagactgagggagggaagattgagagctcaattttggcttcataaagtgtgagatgtcttttatacaccacccagagatgataagcagacagttgcatgtgcaaatctagagttaagcaagagggtccaggctagaggtgtaagtttgaggtccattagcacataggtggtatttaaggccaaggaatgagatcactaaggaatgagtgtagatacaaaacaggtcctacaactggactctagggtcccagcattaaagagtcagggagtctagaaagaaccaggtaaggagacaaagtgggatagagtgagataagaggactgcaggagtgtggagtccttgcagcctccatgtgttaattagtttaaatctcagaaagcaaagattcccccttacctcccagttttgggagacatctacctatcttcttgcctctcctctccctgaatgtgctgttgcgttagatgccaaatgtgaatggaaaaaatattgtatcttgtcaaagttcaacaaccatattaaaggggaggcagccaagatggctgaataggaacagctccagtctatagctcctagcgtgagcgatgcagaagacgggtgatttctgtatttccatctgaggtaccgggttcatctcactagggagtgccagacagtgggcgcaggacagtgggtgcagcgcactgtgcttgagccgaagcagggtgaggcattgcctcacttgggaagcgcaagggatcagggagttccctttcctagtcaaagaaaggggtgacagacggcacctggaagattgggtcactcccaccctcatactgtgcttttccgacgggcttaaaacatggcgcaccaggagattatatcctgcacctggctcagagggtcctacgcccacggagtctcactgattgctagcacagcagtctaagatcaaactgcaaggcggcagcgaggctgggggaggggcgcccgccattgcccaggcttgcttaggtaaacaaagcagccaggaagctcgaactgcgtggagcccaccacagctcaaggagacctgcctgcctctgtaggctccacctctgggggcagggcacagaaaaacaaaaagacagcagtaacctctgcagacttaaatgtccctgtctgacagctttgaagagagcagtggttctcccagcacgcagctggagatctgagaatgggcagactgcctcctcaagtgggtccctgacccctgacccccgagcagcctaactgggaggcaccccccagtaggggcagactgacacctcacacggccgggtactcctctgagacaaaacttccagaggaacgatcagacagcagcatttgcggttcacgaaaatccgctgttctgcagccactgctgtggatacccaggcaaacagggtctagagtggacctctagcaaactccagcagacctgcagctgagggtcctgtctgttagaaggaaaactaacaaacagaaaggacatccacaccaaaaacccatctgtaaatcaccatcatcaaagaccaaaagtagataaaaccacaaagatggggaaaaaacagagcagaaaaactggaaactctaaaaagcagagcgcctctcctcctccaaaggaatgcagttcctcaccagcaacggaacaaagctggatggagaatgactttgacgagttgagagaagaaggcttcagacgatcaaactacttagagctacaggaggaaattcaaaccaaaggcaaagaagttaaaaactttaaaaaaaatttagacgaatgtgtaactagaataaccaatacagagaagtgcttaaaggcactgatggagctgaaagccaaggctcgagaactacgtgaagaatgcagaagcctcaggagccgatgcgatcaactggaagaaagggtatcagtgatggaggatgaaatgaatgaaatgaagtgagaagggaagtttagagaaaaaagaataaaaggaaatgaacaaagcctccaagaaatatgggactatgtgaaaagaccaaatctacgtctgattggtgtacctgaaagtgatgagtgatggggagaatggaaccaagttggaaaacactctgcaagatattatccaggaaaacttccccaatctagcaaggcaggccaacattcagattcaggaaataaagagaacaccacaaagatactcctcgagaagagcaactccaagacacgtaattgtcagattcaccaaagttgacatgaaggaaaaaatgttaagggcagccagagagaaaggtcgggttatccacaaagggaagcccatcagactaacagcggatctctcggcagaaactctacaagccagaagagagtgggggccaatattcaagattcttaaagaaaagaattttcaacccagaatttcatatccagccaaactaagcatcataagtgaaggagaaataaaacactttacagacaagcaaatgctgagagattttgtcaccaccaggcctgccctaaaagagctcctgaaggaagcactaaatatggaaaggaacaaccggtaccagccactgcaaaatcatgccaaattgtgaagatcatcaagactaggaagaaactgcatcaactaatgagcaaaataaccagctaaaatcataatgacaggatcaaattcacatataacaatattaagtttaaatgtcaatggactaaatgctccaattaaaagacacagactggcaaattggataaagagtcaagaaccatcagtgtgctgtattcaggaaacccatctcatgtgcagagacacacataggctcaaaataaaaggatggaggaagatctaccaagcaaatggaaaacaaaaaaaggcaggggttgcaatcctagtctctgataaaacagactttaaaccaacaaagatcaaaagagacaaagaaggccattacataatggtaaagggatcaattcaacaagaagagctaactatcctaaatatatatgcacccaatacaggagcacccagattcataaagcaagtcctgagtgacctacaaagagacttagactcccacacaataataatgggagactttaacaccccactgtcaacattagacagatcaacgagacaaaagttaacaagggtacccaggaattgaactcacctctgcaccaagcagacctaataggcatctgcagaaccctccaccccaaatcaacagaatatacatttttttcagcaccacaccacacctattccaaaattgaccacatagttggaagtaaagctcttctcagcaaatgtaaaagaacagagatgataacaaactgtccctcagaccacagtgcaatgaaactagaactcaggattaagaaactcactcaaaaccactcaactacatggaaactgaacaacctgctcctgaatgactactgggtacataacgaaatgaaggcagaaataaagatgttctttgaaaccaacgagaacaaagacaaaacataccagaatctctgggacacattcaaaacagtgtgtacagggaaatttatagcactaaatgcccacaagagaaagcaggaaagatccaaaattgacaccctaacatcacaatttaaagaactagaaaagcaagagcaaacaaattcaaaagctagcagaaggcaagaaataactaaaatcagagcagaactgaaggaaatagagacacaaaaaacccttcaaaaaattaatgaatccaggatctggtttttttgaaaggatcaacaaaattgatagacccctagcaagactaatgaagaaaagagagaagaatcaaatatatgcaataaaaaatgatattgtggatatcaccaccgatcccacagaaatacaaactaccatcagagaatactgcaaacacctctacacaaataaactagaaaatatcgaagaaatggataaattcctcgacacatacaccctccgaagactaaaccaggaagaagttgaatctctgaatagaccaataacaggctctgaaattgtggcaataatcaatagcttaccaaccaaaaagagtccaggacctgatggattcacagccgaattctaccagaggtacaaggaggagctggtaccattccttctgaaactattccaatcaatagaaaaagagggaatcctccctaactcattttatgaggccagcatcatcctgataccaaagcctggcagagacacaaccaaaaaagagaattttagaccaatatccttgatgaacattgatacaaaaatcctcaataagatactggcaaaccgaatccagcagcacatcaaaaagcttatccaccatgatcaagtgggcttcatccctgggatgcaaggctggttcaatatacgcaaatcaataaatgtaatccagcatataaacagaaccaaagacaaaaaccacatgattatctcaatagatgcagaaaaggcctttgacaaaattcaacagcccttcatgctaaaaactctcaataaattaggtattgatgggacatatctcaaaataataaaagctatctatgacaaacccacagccaatatcatactgaatgggcaaaaactggaagcattccctttgaaaactggcacaggacagggatgccctctctcaccactcctattcaacatagtgttggaagttctggccagggcaattaggcaggagaaggaaataaagggtattcaattaggaaaagaggaagtcaaattgtccctgtttgcagatgacatgattgtatatctagaaaaccccattgtctcagtccaaaatctccttaagctgataagcaacttcagcaaagtctcaggatacaaaatcaatatacaaaaatcacaagcattcttatacaccaataaaagacaaacagaaagccaagtcatgagtgaagtcccattcacagttgcttcaaagaggataaaatgcctaggcatccaacttacaagggacctgaaggacctcttcaaggagaactacaaaccactgctcaatgaaataaaagaggatacaaagaaatggaagaacattccatgctcatgggtaggaagaatcaatatcgtgaaaatggccatactgcccaaggtaatttatagattcaatgccatacccatcaagctaccaatgattttcttcacagaattggaaaaaactactttaaagttcatatggaaccaaaaaagagcccgcattgccaagtcaatcctaagccaaaagaacaaagctggagacatcacgctacctgacttcaaactatacaacaaggctacagtaaccaaaacagcatggtactggtaccaaaacagagatatagatcaatggaacagcacagagccctcagaaataatgccgcatgtctacaaagatctatctgatctttgacaaacctgacaaaaacaagcaatggggaaaggattccctatttaatgaatggtgctgagaaaactggctagccatatgtacaaagctgaaactggatcccgtccttacacctcatacaaaaattaattcaagatggattaaagacttaaatgttagacctaaaaccgtaaaaaccgtaaaaaccgtagaagaaaacctaggtattaccattcaggacataggcatgggcaaggacttcatgtctaaaacaccaaaagcaatggaaacaaaagacaaaattgacaaatgggatctaattaaactaaagagcttctgcacagcaaaagaaactaccatcagagtgaacaggcaacctatacaatgggagaaaattttcgcaacctactcatttgacaaaggctaatatccagaatctacaatgaactcaaacaaatttacaagaaaaaaacaaacaaccccatcaaaaagtgggcgaaggatatgaacagacacttctcaaaagaagacatttatgcagccaaataacacatgaaaaaatgctcaccatcactggccatcggagaaatgcaaatcaaaaccacaatgagataccatctcacaccagttagaatggcaatcactaaaaagtcaggaaacaacaggtgctggagaggatgtggagaaataggaaaacttttacactgttggtaggactgtaaactagttcaaccattgtggaagtcagtgtggtgattcttcagggatctagaactagaaataccatttgacccagccatcccattactgggtatatacccaaagaactataaatcatgctgctataaagacacatgcacacgtatgtttattgcagctccattcacaatagcaaagacttggaaccaacccaaatgtccagccatgatagactggattaagaaaatgtggcacatatacaccatggaatactatgcagccataaaaaatgatgagttcatgtcctttgtagggacatggatgaaattggaaatcatcattctcagtaaactatcgcaggaacaaaaaaccaaacaccgcatattctcactcataggtgggaattgaacaatgagaacacatggacacaggaaggggaacatcacactctggggactgttgtggggtcgggggaggggggagggatagcattaggagatatacctaatgctaagtgacgagttaatgggtgcagcacaccagcatggcacatgtctacatatgtaactaacctgcacattgtgcacatgtaccctaaaacttaaagtataataataataaaatgaattaaaataaaaaaaagaaaccatattaaattgatagcctttctaagggtattttttctattgataaaaggatacactgattatgtaacaggaatattaccaagtgtgtgacatttacattttgcagagcataataaaaggcattttaaatttaagaaaaaaaacaaagacaacagcaacaaaaaacaaaacaaccagatgtgcattcttgcccaaataagccaacctaagtcagcttgattgtggacaatagagtcagttggagtgtgagaacagttttactctgggactgataccataaaaaacaggctgctctgtaaagtgtacacccctcaggtatcaggtgacacaagtcaggcactgcctcaaaagtgaaaggttgcaaacagtgacaagggaatggaaatagattagatgtggataatggaggcatttgttcttctacaaccttctgacaaacattcattttggtatctactggttatgcacagaaatttattgaaattattaacatggaaggcctttctttgggcataacaaaccactatttgttcacctaattatactgggaatttagggatatatttcagtgcattttactttagataaaatcttttcatttcttatggaacacagagaaatcatcatgaaattctaagtggataaagtggaaacaaagactctatttgtgcaagttgagtacatgggaatgtaattagcattgtagatagtataaatacgcatgtccatatgctgtgtcattagctgtgcgtgctgaagctatgtcacctcattcgtagtccctttcacacataaacagaaacttgaatgttcacttagaaaaaagcatattttctgtaattaccactcaaatgtttcttaggtgtcttcattgcccagcaaagtcagaagtgtgcccagtgtgataaatcattaaacttctttcttatccaagtagcactgatttagaatgaatcatgttttcaaacaatgtgttaataatcctatcagctctctgaaaaaaattagattataatcctcatttaacaaatgaggaaagggaagcaaagagtttgacaactgtctatgaactcagtgaacaaaagccacacttgttggcaataaggctggctgtttcctcctggaccacacagttgacatcccggttgggatatgtcaagtccggaagcggtatgtcaagtccggaagcaggagctataagcagggtaatgaaatggctgctttgcctttcagatgggtctagaggtcaagttagtttatttgtttttaatttagctgaactcataggctggttgaaagatccctttgttggtagcgatcttttgaatagccacataaaccttttggtctctctctcgctttactccaaccccttctcccatttgcaggattagaaaagcacttgggaagcccattaatcttgccggcgttgtcaggagtgatcagcgagttttattaaaagccctgggattgcctgaaaggcccccttgtctgactttgaaatgaaaggggcatgttaagatctcggggcacattgtcaggacccctcaccctgccccttggactatgagctgaccctccaggaggaagcacagaagccctcctttgttaaagggatttcgccggtggacagagaagagttgggccctgtcagcatgaactctctgagttggggggctgcgaatgccgtgctgctgctgctcctcctggcctgggccagccccaccttcatcagcatcaaccgcggggtgagggtgatgaagggccactctgccttcctgtcaggagatgacctgaagtttgccatccctaaagagaaagatgcctgcaaagtggaagttgtgatgaatgagccaataacccagagggttgggaaactcactccacaggtaggtcctatctgcgattttctgttcagtcgtgtgtatgaatgcaagtgtatgaaaatgtgtggggggacagagaacagatgtaaaatgtctcccctcaagccatcaaagacgagtattagaagatgttcacatttgaaatggtggacttgcaattagtaggcatagtattgcgctgcttttctatgtgaggtgaaacctatttttaaacattcttggctgacttcagattacaagcctgaaaccagcaggatttaatcctgattataataacatttatagaggaaatcaggttcaaactaatatggatgcatgtaatttttttcttaataatgcactgtttcagtaagtctttccaatttctcctctttcctgaagataactctggtatatctcaccagctgcttgaccttatagagtagctaattatacaggaaaaagcgcaaagcatcatgtaagagaattacattggagttattcctgccccgagttatcacatccattgccagtcagagtggctttggataagagatcaagatttcaagacatttttaggacatacctgtgaccttagcatagcaaaggtaaaacttgaagatgtttcatctattaacatcacttaaacattttttctgagtaagggaaaagaagtagaaaagagatgtgaagatacttcactttaaatattcactgttctttgaaattatctgcttaatttttttccttttaatcaaaatcttggagacctttatatttaagggtattctattgtcaatcttcttgtagagtgaagagttacctcctaattcattgggtttaaaaagtctatattctctaacactgtttttgcttaaagtaggagttaccactatacataattttaaaaaattgcttctgattttattacttgttcccactgtcctgtaactttgctcccagtgcaaacaatcttgagaatattcaacactagatgctgctgctgcttctggaaaaatggaccattctcttttgctgaactatgaactttatttccttttcatttggctaaagaaaactaatccacgaggttattgaaaagtggtactaggtattacagagagagaaaaaaagacttagatggatactagctcaactggtgtctctagacactccatttaccacacttcaagttatagacccattctgaaacacatcagaattctttggaagagggtctcactttgcaggtatttctgatgtggtagtaaccaaatgtctctgcctagttgcttgtaagattttatcgtcagtcaaagagctttagatgggtatctaaaacatgttagaattcaacaatggctccacatattagccattgtattcccaagtgtttggtagttgcagtgtctcctcagttactcccaattatacttgcattctgaatgtgttttgattggcacttacgagtcagggaaaaagaagatacctgggattgctcatactagaaccccaatgtgctacataggatgaggaagcaatacaaataagctcaggagtgggtgatagagacccaactacagggactggggtcgaaaggaaaatgcaggctggttgcagtagcttacgcctgtaattccagtactttgggtggctgaggcgggtggatcacttgagtccaggagttagagaccagcctggtcaacatggtgaaactccatctctactaaaaatacaaaaattagccaggcgtagtggcacatacctgtaagcctagctactcgggaggctgagacacaagaatcgcttgaacccgggaggcggaagttgcagtgagccaagatagtgccactacactccagcctgggtgatagtgtgagactctgtctgaaaaaaaaaagaaaggaaaatgcagcctgtagagttttgagagagggtaaaataggacacctgatcctagaggactggggtgtttgataaagcaggaacccagggctgtactggcacatatgggtgtcttataaagactggtgattgataatatggtacctcttccaatcaatatatttttaaaaatcattcaacatttatttagaagtgggcctgagtatattgtgaaaaagagaagaaggaaaattcccactggtagctcgcaggagcaagctgtctaagctgtcttccagtttggacctcaagcatgcatgcccaactgagcaaaacaaaagccctgcagatgaccagattctccttagtaggcaatttggagataatctattgttacctaagccagcctctgagagctctcctctccctacctcaaatggcctatgactccttaccgtatatggcagtctctctgagagaaataaaattgtccccattatatatctttagtgatgttttaatggtcctgattgcttggcctgctccaaggcactgaggagcaaaaagggatccaagtgactagaactaggtaaaaaacatttgttcacaagaatcaaggattggaataggcctgcaagtcatctccatctcacactctctgattttaaggtaaaactccagttactagaaagacagtatagaggagaaaccacaaattgccttggttgctgagaaacacctctgaatatactgattccctagcctgctattgctcattaagaaaaagtagaatcaagtcatgaatacttagtgtatgtatttccagaggcaaatatgacatctcaaatggatttatagcctctaaagtcggtatgggatttatatcttctaatatttattctgtggtaaaggagttcattaaaatatggagtttcagtactttttttggccaaatattaaaactgtgtgtgagagaaatctatatcatgggagaactttgtttctcaaactgccaggtgattgttcctatttgttattctcataatttcaacaaaaacaagattcctaagtctgttttgttttgttgaatttgtgcttggtttttaacgcaggctggttcagtccttccctaggggttcgttccttatggagttttagaaattaagcatagctaagtgcatgtgcacacacacacacacacacacacacacacacacacacagcctaaacattattctttaatagagcttagtaataagctgaaagccaagcttatgtgaacccatttctagcaagacgactgtattaacaacaccctgctgtgtaatgaacagtttcatgtgacttgcacagaaaatgttttgtttaacatctgttcaattagtgttttcatttcattactgaagtttgtcttaggatcaacaggttcattttcctgttgaatatttggaaagggatttcagttgatgcacaccagtgccttctgttcagataaccctcttgatatagtcaattagatgaggttgatggcaatatgttttcctcatgttttaggacaagactccctcacacatggcacttctcacacctagcccaaagcaagaaatttgctgggtggaaagcaccccaggttagcactaaacttgcttttttgaataggaaatatagcggtaagaaagtatctctactttgaaccattttactgtcattaaagtgagtaatgagctaggaatgtgtgacaatttaattataaattgtaattgaaaagcagttgaagtggaaaaaaacaaagctagacagtaattagaaaaggatttagctctcctttgttttagttagtaaatttatggacaattatggttgtcgccttttataaaaggaaaacatattatgaaacataaaacagatgtttcttttaacaaagcagactgtctctttattaccatgactatttgtcaatgatatggggaaggtctttgctttatctccttcctagttgtcaatttaaaagaggaatcaatgatatctgcgggaaaagaaaatcgtttgtattagtggtaaagtcttctctgagtgaattatgttgtctgaaaatgtttgaggctgtgaaaaggtacagacgaaacaccacgaacacaatggtggacatgcgtgcatacctcaagggtattagaactctaccagagtcagattgggcagaatgaagggcatgatatgggtgggagagatgattcttcctctaaaaatcaggttcccaaaatataacagttaacaatctcctaataattctgagtgagttgagacagttcattataattttatttgaatagaggaaattgcttttagatttctgtttttctcatctgccatttctgctattgcctaactaatgaaagcagttttttgcaagtatgcaagacacaactctgggtcatgttaggctctgattaaccacagtagtgtccatagtcagtggcttcatctttgaatatgagaatactattcggaaaaaaaaagaaatgaaaggagaacacagatatacagaaagaatacagtgtgtttgtgggtgggttaaagcatgccttttcatgcagacacacagaaagaactctctaactcaattgctgtgaacccctgaaaggggtaaataaaatttcgaaaaatgaaagtatgttttaaatgcactctaggtggtaaaaagacacttatttagagacgtaatcatcccttaactaattttcttgaactgctttggttttcacaacttagatattctcaaaacaagagacagctgtataagtaggatggtgactgggtatgggggtagggtagaggtggtggtggtgaagacacacacactcacacacatacacacattactaacagagcatattttctccaggcagtgctctcctggcaaaatgttaaatcttgtaccaattttctcatagatatttatccaattcttcatgtgaactaggtctttgactgccatttccttcccaacgaagtcaagtatgttcacaatggttgtccaattcttgatgaagacacagtgaagctcagactttacaggtaagcggcacgggaacatcgctcatttgctgccaagtaaccattctgtgttcttatgagggcttttcttgtggatatgtattgtcatgaggggagttaatagattccagacaagaaagtaatcaacagaaactggaggcctgagtggatcaggcaagatttgtagccaactttcagttatttccacttgtgtcatcttccctaggattcttctgtggcaaatttttagccgtatcctgtttccctctagtgtccttatataggtatctctggtgttccaacccaccacttatggtagaaaatggaaattataaactacaaattcttaatgaaaatcagggagaaaatatattccaaaaatgaatgaaattcttcttttttgttaccagctgtttagttacagaaagtgcaatatcttccatttttaaacatattaaatatttaaaattcctttttttttttttttttgagacggagtcttgctctgtcacccaggctggagtgcagtggcgcaatctcggctcactgcaacctctgtctcccaggttcaagctattctcctgcctcagcctcctgagtagctgggactacaggcgcccaccactacgcccggctaatttgttgtatttttagtagaggtagggtttcaccgtgttagccaggatggtcttgatctcctgaccacatgatctgcctgtctccgcctcccaaagtgctgggattacagggatgtgccaccatgactggcctaaaattctttaaaaatcaactatggagttaaacatggaatgaccgtaggagacagcagttcttctcctacgcatatatataagaaaaatgaaaacttatgttttacataagaacttgcacttaaagttcaatgcaacattattcataacagccaaaaaatggaataaatccaactgatgaatggataaacaatatgtggtatattcatggaatggaatatcattcagccataaaaaaacaacgaagcactgataaaggctacagcatgaatgaaccttgaaaacattatgccaagtaaaagaagccaggcacaaagtgtcacatattgtattgttccatttgtatgaaatgtctagaactggcaaattcacagagacggagagtagattagtggttgccagaggctggggaagggaaatatgtctcttttggggttgatgaaagtcttctggaattaggtagtcatgatggttgtacaaccttgggactacactaaaaaactctgagttgtatatttttaaaagatgaactttgtggtatatgaattatatcccagtgaaaattaattttaaatttaagctcacgattatggtatatctgacttcataaaagtcactgagaactgatgtatgtggagtaggcctttatagggttttttatttggtttttattgcttttaagaatatttggttagatatgttggtgtgaatttcctttaagcattagactaatgtaaaagacttttgtacaagacattggaacagtgaaccattctacaaacatttatgaccacctattacaggccaggctgtacgttgagcataatcaacaaaaggatgagaatacacagattattttagtgcttgtagtctaaggcaaaagatgagcaggtaattatgatgcagaacaagcgccaaaagagagtcacaaaatgctgtgttgagaaaatgaagcggcactcaaggattccttaggaagatatgaaatcagcatacagggccatttgatctttctaagactttagagttaaaaaacaaataacttcaaagaacttgcgcggagcgggtgggaagggtagtggggagttgcagggaacatggggatggttaatgagtacaaacagtagttagaatgggtaagacctagtatttgatagcacaacagggtgactaccgtcagtaacaattcaatggcacattttaaaataactataagattataattggattgtttgtaacaaaaaggttaagagggccaggcgcagtggctcatgcctctaatcccagcactttgggaggctaaggtgggcagatcacctgaggtcaggagtttgagaccagcctggtcaacatggcaaaaccccatctctactaaaaatacaaaaattagctgggagtggtggcaggcacctgtagtcccagctattcgggaggctaaggcaggagaatctcttgaacctgggaggcagaggttgcggtgagccgagattacagcactgcactccagcctgggcaacagagtgagactctgtctcaaaaaaaaaaaaaaaaaaaaaggataaatgcttgagggaatgctcaataaatggataccccatttattaagatgggattattacacattgcttgcctgtatgaaagtatctcatgtaccccattacatatatatgtgtacatatatgtatatacgtgtatatatgtgtatatatgtatatatatgtgtatatatgtatatatgtgtatatatgtatatatgtgtatatatgtatatatgtatatatgtatatatgtgtatatgtgtatatatgtatatatgtgtgtatatatgtgtatatatgtgtatatatgtatatgtgtgtatatatgtatatatgtgtatatatgtacatacatgtgtatatacgtatatatgtgtatatatgtatatatgtgtatatatgtatatatatgtgtatatatgtttatatatatgtgtatatatgtatatatgtatatgtgtatatatgtatatatgtatatatgtatatatgtatatatgtgtatatatgtatatatgtgtatatatatgtatatatgtgtatatatgtatatatgtgtatatatgtgtatatgtgtatatgtgtgtatatgtgtatatatgtgtatatgtgtatatgtgtatatatgtatatatgtgtatatatacgtatatatatgtgtatatatacgtatatatgtatatatacgtatatatgtatatatgtgtatatatgtatatatgtgtatatatgtatatatgtatatatgtgtatatatgtgcatatatatgtgcatatatatgtgtatatatgtgtatatatgtgtatatatgtgtgtatatatgtgtgtatatatgtgtatatatgtgtgtatatatgtatatatgtgtatatatgtatacatgtgtatatatgtgtatatatatgtgtgtatatatgtgtatatatgtatatatatgtgtatatatatgtgtatatatatgtgtgtatatatatgtgtatatatatacatacctactacgtacccacaaaattaaaagtaaaaataaatttaaaaaagaaaaaaagctgatgaatgcttgcttcttctactccttccttgggtttctaggctgctgggaggctggaagagtatacatgaaatgcagggttagaggagcttcttcccctcttggtcttcagcacatttgaaataaaatattcaggggagtaggcagcagaaaacagggagcatgtttgttcccctcttactgcttctccttctccagcccctttggcaagctacctgagcccgttatgcctgagtttcttcctccataaaatgggattaacaatgtctggatatcctaggtttttataaggattatgttatatactatcatagagaatttagcataatgcctgggccataataagagcacatcaattagaagctgcattattgatgcatgcatatcactcattaatcttctcccttcaaaaaaaatgacacccctctattttagactcttcaaacaacctgagattaaagttgctaagtggatggagggaatggaagtggcaattgctgaatatgctttttacatgccaagcactgagctgggcacccaaactaggctgcaaatgaccacctatgtagtggtatttctgaagggcaaaaaggcctgaatgcttcagaaaccactcaccccttcactcctgaattaaaagtcaatccagaaattatataggcttgagactcttaaattacacatgtgctagaagtgagactctgagatctcagcagtcattaaatatccacgtgcatgatgagtttgagagcaggtgttgaaagaaagatgttgggaggaagaagtggcaggaaaaggtgttgacaccagggtaaagagatgaagggaaaagaacagagaggctgggagtagagcaagaaatgaaatccaaactcaatctgtggcacaaatttggtgaaggccaatctttagtcttccagctgagtacatgggtatcagaaatacctgagcaccaattaatattgcttttgccctgtgttctccacagatttactgaaagagataccttcatagaaacttttatcctgtgggtctatctcctggaaccagactgtaacatcatccatatgagtaacaatgtgctggaggtgcctgaattcaatggcttgtcccaagcgattgataaaaatctgctcagattcgattatgataggatggctagcctggaatgtaccgtcagcctggacactgcgagaactcggctgccagcccatggccagatggttctcggggagcctcgaccagaagaacctcgtggagatcagccacacagttttttcccagagtcccgtatgatgtcttttaatgcctttctgggtattaccaaaactgacaaaaatatccatgcatgctcaccttccaccatgatgaagagttctagttaactagtcattttagctggctgaacagtgtcagttagtggttaagagcacagactttacaatcagaaagacctggttttgagaacttcatctgttctttattttctgtgtaattttagttattaacctgtctaagcctctctaaaatgagaaaggaaaatagctgccctgtagggttgggtaaggataagagtaaatgaggttatacatacacacagtacttaacacagtgtctggctcacagtaggtactcattgtcagctgttattagtaatagcaacagtagtagttggtgcatttatggagtattattggattatgagcaaatttgaagtaaagctagtgggtagcagtgatagacgaaattaggaagagtttatgggtaacattccttctgctattcactcaatcaacctattttgggcacctcctgttctctctagaaactatgagaagccaagaaatataagggataatcatagcaatagtagtaatactttgaattttggacagaatgacagttaacggcacatttgttctattttgtacgtctgagaaatgagactccaaaaaaaaaaaaaaaaagtgggtggctgggcatggtggctcacacctataatcccagcactttgggaggctgaggcaggaagactgcttgaggccagggtttcaagaccagtctgggcaacctagcaagacctcatctgtacaatttttttttaatttgaaagtggcttatgagtattatatactaaacaagagtggaaatacatttggttagagatgtgaagactgttggagagacaattatggttttcagtgagaaagagcatgttggttcaggtggtcaaagaatgtttaagggaaggcttagtaaaaagaccaggtggacctggaaggatacgcaggatttgagtgcgtgatagccacatggggaggggatttcagtgagtagacagcctagtagagattgtatgatagagacatggaagctgattctgtaaaggaaagactggagctagactgtggaaggcctgcagtgagtcactggtctatttgtcagagatgttcaagcctcagacaacatattttattattttttctctcagtttaacttttggtgggtgagggcacgatgagacaactggtcaaccgtttttcagtaaaggaaactacaagctttcagaataatgacaacccactcagtgaatgattggaaggtacatgagtgttcctgaggcagtgagagggaataagtattcatgggacggagtactggtttctaaattttacaattgttatgtttaagtgactctcttaatccagtgctgtacattctagaactgagagcaaaactgaagtgtccaggtgggagctgtaccccaggattaaagaaaataggaagcctcaaagtgagctgtgaggagttcctgctgatgggccttcgttatcagcatctggatcccccttcacccaacattgattatatctccatccaactggacctcacagataccaggagcaaaattgtgtacaaggtagagtttggggttatgtgtgggtgcccccaggattcacagtaagagagccagttacacaggcttactcatgctcgcccccatgccagggagagttcctgtgcttttgggggtaaaactgccagcgactcattggaactgcaggcttgttggttctgctagtaagtgcttaaaacagtaggttttgtataaaatttcccttctctggttctcttctaggtccaccatcagtacagcaacttgggaaggactggggctagttacgtgctaaccttcttcctcctttactcccaatactcttcagcttgtcatttgaccttttataacaccttctctttgatgcttccttttgtccttcttgaaatcagggggtccactctgcaaggtcacaggaaactagggggagggaggagaatctcagtcccatggttatgtttgtcacagatttgtcactcttccaggctttgggatgaagggctagctcatcaaggagacaggctcccaaagacctcctgcgtcttccaatctcttttaattctcttgtttttctcctattgatctctatatattgaaataatgacagaaagtggattccatttatttgaaatatttaacatgcagtgctgctgattcatgaactctataatttgtttattggggaaaccggggaaactgcacctgctgaaacagctgagatttttttttttttttttttttgagacggagtctcgctctgtcgcccaggctggagtgcagtagcgcaataatgtcggctcactgcaagctctgcctcccaagttcatgccactctcctgcctcagcctcccgagtagctgggactacaggcgcctgccaccacgcccggccaattttttgtatttttagtagagaaggggtttcaccgtgttagccaggatggtctcaatctcctgacctcgtgatccacctgcctcaccctcccaaagtgaaacagctgagattttgtgctgaggaaagatgatccaagatgatgtttggaaatacttctatctttcacaatctggcttctcactgggatttctcctaaggggcccagtcaaatattgaacattattaccccaaggaattgatatgacaaggaatcataaagaaatgataaaacaaaatcatagaattaagatctggaaaaaaactgtgaggcagactagtcaaattgatcaggtaaatcacttgggtagcttttcaaggataaatttctgagtccaaataatagttaagagcatggacgctgggcccagattgcctgggttcaaacgtccacttaactaactgtgtgacttttggtctcattttcttcaacttaaagtgggtttatagtacctatttcttagagtaactgagaggattaaatgataaatacttattatgtgcttgacataaaacctggcacatagtagcactatgcatattgctggttttaaaagtcacccagtaaaaaactcattagccaggtttgcaaaaccaggctgggtttagctcaagcttcctattttatagtggtggccccgagaagtgacataccttgttcatacagacctaaacactaggtctatagacaactaatagatgttttctgtttgttttaacacaaaactcctttcacttttaatgatttattatatccattgaaaaaaaattggagccatttttctttttgatcaaattttctcatttttttcttactatattgaatacgcctttatttgtttatattttaaaatctgttttattgggagtttatccctttaccttcttgctttgtttatcattaacctattccatagcttatttggcatgtcataaaacagattcatttatgaatataaaagtaataggctcactgcagagaatattaaaaaaaacacagaaagcaagataagaagaaaataaatatagctgtatttttaccatttttacatacacacacatgtgcatgagtgcatgccagagttggttttgttttatggaatcgcatttatactatatgtgaagttttgtatcttgttcttttgttatttttatggttgtacagtcaattctcatcaagtgaccaaatgatccttcactcataatttcttctagatttttaaaggtcttcttccttacatttgcctttttaatctacctcaaatacaattttattatatgatgaaatacaaggaacagttttttccaaatagcccaaattttcaacactattcattgaacaattaacttgtttcccattgattttagatgatcttctattgtatataaggatataacgtatacaatttcaaggctagctcttttatttcttagatttacctacttattctttgtcagtctcatattattctaaacataataggcctataattttcttacagacaggttcttccttatcacttctcttcaaaattttcatggccattatcacctagacttagttccaaataaatataattaaatcatttatgttagtttaaaaaaaagcccctaaggatttttatcagtatccaattagaactataaattatttggggaaaattagaataatggaacatttacaatattaagtcttttcatccagaaatgaagtatctcactttattgaacaaaggttcttttataggtttctgtaaagttcgtagtttccttcatgtaaggtgagcatacttattaagtccagtcctaggcactttgtttttgtgaacctatggtgaatagaatatttttctcccattatatcttctcaatggttattgatgataaacagaaaagctatttttggaataattttcttttatctggcttctttcctgaattcaattattttaagaagttctcaattctttgggcttttaaagaccataattatatctttcactagtgatgataattttgttctttcttttcctgtaattattcttcttatttttgctctattccccactggtttgagaagaacaatattaaatataatgttatttgtaagaatctttgtcttatattttttacttttatcaactgcccacattgaattcatctttgaaattatgtggtctctctgctttttccattaatgatcaatttgtatcacccttttccttttaatctttctatgtaattttaagtgcctttcttgtaaggtacatataattggacatttttgttgaatttcagactatttgtcttgaataaggaaatataaactttatatttgtggtagtaatagatacacttttttctatcatgttttatgctttcttgctaattaaaaaaatttgtcttgcaaaataaatgatgttttctttgcctttatcttatttgacaattccttatcacagttgatgttttatttggacttaattctaaacttaaaaatattcttaagcctatatttgtaatatgtacggtgaaaaaatgaagtgagctctcttggctccttcctatgtatgatgataactgatccaattgatcctttctcctggcaattgctttgtttatataatttgcaatttcagttctagcatatgattgttatactttattacaagcagtaagctctttcatcatttgtatccactttattaacatgtttaaaataacgtacttatttagacttgactctagactcaattggtcttagcattaagcaccagtccttctaaatcacaatttacccctcttgagttttctaattatgcatcttcaaataatacttcttcccagtgacacacgaagattagatactctaaaccctgggacatctcagtatcgttcacctgccttcatcaaccatgcagtgggaagggaaggggttgattgtcttctcctctattcctctcttgcaattctcttttctctgggcattgctggttagtttcttaattttcagactggtggcaggggtggttttggggaatgggagagagggatcttatttgatcaggcattgatgacatatgatttcatgctctctgagcctggtagatgtctcaagctgcatctttgtcttagggacaaatttatggtttctctggagagtcccattcattgatctatcactcatagctctcttaagaggattatttctaacctgagtgatcacttgcaatttctcctgcagctcctaggatttgattctatctccagcattttcctactggatttttgtcctctcaagagtgcactctgaagttcagggtccaggagatcccagaccagccctctgcccactaggcccttaactggaaacatttatatgtcccttgttgccacaaacaagaacagactgattttggcacagccatcattttttttgcttccagccagttagcttcctcagatatgagccctgcatcagctctctgtgtgtgtttcaactgcaagaaacacattttaagggacaggagatatggcattgctctgctcttcctgctccgtgccaatgtttggtgttgaaggtcaggaaagtgactgaacacaacgcagcaaagcactcctctctcctaatcaatctttttcttacctttctcaatctttttatattcttatatgggcaagaaagttctggagtctggaattagttccagacaacttgctttgtaaattctgcatattttactacctgtcttacattcagttgcacatctaatctcttttattggaactttagcattctgttatacacagattacaactcctagcccaatggcaagtgttcagcagtatgggactaatgtgaatttggtaactgagcctggttctctcagcaatgggctagatcaaatcctgtgagaactagcatctacagctatgaggattcttttcttttctttacaaagtctcactctcttgcccaggctgaagtactgtggcatgatcatagctcaccataacttcaaactcctgggctcaagtgatcttcctgcttcagccactcgagtaattggctataggtgtgcaccaccatgcctgtctaattttattatttttactttttttgtagagatagggtctcgttctgttgcctaggctggtctcaaactcctggcatcaagcaatcctcccacctcggcctcccagagtgctgggattgcaggcgtgagctaccacacctcaccctgtgaggattctttctgcccatagcacttgttgagatcttagatcttgtggcacaatttcatggtttctttggagggtctcttgctcatagtgctctcattttgggaggatgcatgcctagcctcagtggccacttgcaatccccaatgcccaacccttgcttgaagatccagggtcttaactagctagacaaccaagcaactattcttcatttgcatgagaaccaaatcataaagacatatttccttcatccttctcctgccccctttaaaactacatgacaggaggtgaggaaggcggctggaggaggttgttggtgagtgccagattgctaagtgcctactttggctatttcatttgtcctcacttaattcttggtagtctagtattaatattttcatttacagctggaaagaaaatgagactgaagagttaagtaacttgtctaaaatcacacaaattaaaagtgttggagatagaatgataaacacagttccttctgatgccaaagtaggtgctcccttcttcacctggctgcatgtaagagtcaccagggagctcgagaaatactggttttctggtcccctttttggaacaattaaacaagaacctctggagacagatcctaggtaccagcatgtgtttaaagctccccaggtgattccaatatgcagccaggcttcaggtcactgctagacgctaggctgtggctgtattaaatattatgctattagccctgtatgatatcacctcattcatattatttcctcctttatattttctctatccttcaaaagtcagagagtgcgtggctgcctgtctatatcagagctggaattccgaatcagattccaaaggctgcattcatggccgtgtttattctggaagtggatcagttcatcctgacctccttgactacatcagttctggactgtgaagaagatgagacccctaaacccttgctggtgttcaacattactaaagccccgctccagggctatgtgactcacctgttggatcacaccagaccaatctcctcattcacctggaaagatctcagtgacatgcagatcgcctatcagccaccaaacagcagccattctgagaggagacatgatgaggtaagaaggagagacaaagcttccagcctagttagaagtcacagggttatttaagaaccccctaccctaaaccctcaggttcctttgtacattcattgcctcagaaaagaatcaatcactgtaaatcaggatgcacactcactgcccagaggagccaggcaggtggggtcaatgagcaaaccccactgaggggcactgtggcaaactgaagaaagagccatcccctcaggaagcagctgccactcagctcatgcccaccactgccctgcaaggatacaagtgtgcccactgttgctgtagcactcatgtgccaagagaaattggaaaatgatacatttttggtaaaatgcttaaattcttgaatatagaaaacaattaaaacttgtagtgaaacgtattgtgctagctaccaaatatttctgagggccacatttgacccagggctcaccagtttgagaactgcagcagccttcgacagccttcctgaatcacagagaccattgaagttagagatgacttttgtttacaattcttttatttttaacaaaatttttttggtgtgtttaagttctggggtacatgtgcaggatgtgcaggtgtgttacataggtaaacatgtccatggtggtttgctgtacctatcaacccatcacccaggtagtaagcccagcatgcattagctattttttctgatgttctctctccctccacccccaaccccgacaggccccagtgtgtgttgttcacccaaaatatggaacactttccgaatttgtgtgtcatccttgtgcaggggctatgctaatcttctctgtagcattccaattttagtatatgtgctgccaaggtgagcacacaattcttttattaataaattcttttattctttttttttgtgagagctttttatgggaatccttaattttaattaataacacggactcaggataggacattccgtagtcttatttgataactaatttcacagtgaaacacagtccatcgggaaggtcctacttctatctaatttccttttgctgcaggttccacctctctcctctgttttgtagttagtgggaggggaggacagctggttaaagtcttccacataatagtgcttcacatgcttaaagaactaccagcaacttgattcaaacagggtggaaattgtaaacgagcagactgatagagacttgagctcaggtttattaaggaaaatgatcgtccctggggttatctctattgtaatttcggcattttcagcatgtagcctcaagggaagacaaaggacttcaggctataaacgctatgctttgccttctgcttttatttcccccttttcatcatagtctgtggccccccatgccttccctgttaggaagtaatttctcattgcacatccaatcttagagcactgcttttctggcctcttcctgtgtgtagtttctggcattgtataatgtactcttaaagcagaacctgtgcgaatgtgtgatttttttcgttagacagtaactctcaattttttcagtggagatcacacagttttcaggttgtgtggactggaagccctgggccagggcccaaccgaatgcattacccctccaaaaaagacacctcctgcccatgtagtttcctgttcagtctgttgctttggcagccttgaatcagtttcttttgttatttagtgtttgctgatatagtgctgtttgattatttatcttatcctcttccatggaccacatgttcttcaaaagtagggagtatgccttgcatttctgtgttatacctcattcttctctgtcaacatctggtgcaatacatacacagcacataataaagatcaaaacttatcacgcagcccctacttacttattagttatgaatttcatgaaagcaaataaagttgagatatttaaaaatatgtctagtgaaatacatgtctctagatcagggtttcttgatagtagcagtacgacaattgccattttgtatcagataattctttgtttgggaggttgtcctgtgtacggtaggatgttagtatcctggcctctacccactcgatgacaatagcattttcccacacaccgacttctgaaattaaaaatgcctccagacattcccaaaagtcctgtagtgggacaacatcacccctagttgaaaaccacttctctagatcctccacctttgagaaagatttaagtgactgaatgtgggaaggggttggtctcctaagcaagtgcagagacacttctccagcatattaccaattttagattaataaattcttttatgtagaagaaaatttaaaaataccgttaaagtaaggaacaagatctagaacctgaaaaagtcaaatcaggatgtctaaatgagatgtgggaactgcagaaatgtgaatccccgcagaaaactgaatccactgtgtgtgggtataacccagaattaatgctactttaccctgtaacgcttcagtgtgtggctcctttgcctctgtttgtttacaggtagaattggaggtatacgacttcttctttgaaaggagtgcacctatgacagtccacatctccatcagaacagcagatacaaatgccccccgtgtatcctggaatacaggtaaagctcaatataaggcatagagcaacatagccctgaagggaatacaagaaagtagatgggtcaggaaagaaaggtagttttattcctatgtcatacatgtggcaactgaaacccagacagattaagggcatcacatagtagcttttgttgttgtttttttattcctcctggcagcgtgagaaatttaaatccaggatttctgcgtcctgaggccaagttctttcctctgccggagataagacaaagggacacttttcaactgaatgaagcaaaaaactgactatttgtgatattgagctgtagtgggactgaaatctccaactcaaattgttccaagggattggagaaaggtttagcttttataatctatagtctatttttatgttgggctgcatggaaactaaaatatgtaaataagagctttaactgctttaaaatatggctttctatgcctctcaattctgagtggacttatgtgatatatatatgtatatgttgatcagatgtaaatgtggaatgtaaatggagatcttttccttctcactgatcccatcaataccatttgaaacatacttataagcagtggtggtagatagtattaaggaaaaaatatctgtgtctgatttaaatcctcaggtggcagcttaaacgagctgcctcgtgtgtgtacacatagatatgtgtttgtatgtgtgtgagtttcagcagagatagagaacatcaggtgagcagccttgatttataattctggctatacatcctactgtacctctgtcaagggggtaatgagagaaaagatggaatcagtaacctaaagtttaggaataatcacatgttgcatgggctcctgcctgagtgtagagatggaatagtctgtacgtgtatgtgtgatcggtgacacccaggtttgctcaatgtcattttggctgctttgaacatcagaatcccttttaaaataaatgtttgcttattatgaacttgatctgtgccatcgttgaaatttggagaatgcatctaaaattattatttcgccgtgaagatataaccaatgttaatattttgctgtatatatttctaggcttctcgattgttcctctgctgtgctccgtgatgccttgtcctatgcactcctggcttccaaacccttattgccagtcacagagattcttcttatgcacttctgtccatttcttctccctcccaccctccctccctccctccctccctccctcccttccttccttccttccttccttccttctttttctctctccctctcctttatatatgtattagcccaatttccctagaaaacagaccccgaggcagatcagatgtactaaccctatactaaaagcaagagtaaggggagaagcaaataaaaacgcatggctgagctggtgtcacagctttacaataagataaagcagattgctctgcagtgttgatgtctccagggagaagatgcaactgctgtgtctggtaagagttggaagtggggttgggaaaaggtcaacaatctattaatggtcagttatttcccatctcctgtgtttaatgggttaaagtttacttcactggctgttaactccccacatgcccagattgtgttatctggcccctcttagcagccattgcacacacttcctgggtcccctggtgcagggcctgatcagccacaaggttggtcctgccgccactagagggcagtggaggtagccggctgcatcagaagatgaggcagtggtggcaggagggctttacaattttggagactgggaaccctcatggggcggctgcagctagagaacagtcagttggtcgaggccgggatggcaggtgaagctggcagatgtgagagaagcataagataagtccagcagcacgctaccttgcaattcgaccagcttgctctgctccctttcaggattatctgtaatctgttgtaatattggagttaatagtactaaaaataaaaatagtactaaaaataaaagctacattccagtttcttgaaaagcttttatagatgcaatattcagatggtttcatgagtggaaattcactcatcttttcttaagcaggcacgttggcatgtcatagaacttgccaatacccttttcttatctttttttaaaaaatttaagttctggggtatatgtgctgaacgtgtaggtttgttacataggtatacatgtgccatggtggtttgctgcatctatcaacctgtcatctaggttttaagcccctcatgcattagatatttgtcctaatgctctttctcccctttcccctctacccccgaacaggctctggtgtgtgatgttcccctccctgtgtccatgtgttctcattgttcagctcccacttatgagtgagagcatgtggtgtttggttttctgttcctgtgttagtttgctgaggatgatggtttccagtttcatccatgtccctgcaaagggcatgaactcattattttttatggctgcatagtattccatggtgtatatgtgcctcattttctttatccagtctatgataccaacacccttttctcctttctttcataggtctgagtctccttgaggggcagtctcgagccatcacttgggaacagtttcaggttgtcgacaatgacgacattggtgctgtccggctagtcaccgttggtggcctgcagcatggatggctgactttaagaggtgaatgatccaacttggtaacctagcaaagaatccaaaagtattttcttcaaaagtagatatatttaacagatatatgtagcatctcttgggcccaatttctcaatgaaattgtcaaatgcagaaaatctggagatcttgaaatcattgacttttgtgttcaaatgctcagatcaatgtctaaccatttatgaatggtaccttgtacgtggctcattgtttaaacctcagttttgctttctggatgccatgcatggcttcttgtaagtatactccttaactagttatttttttcccagttggaggacagaatgttttttatttctctgcttcaaagaagtatattgaaaaattaggccgagcgcagtggctcacgcctgtaatcccaacattttgggaggccaaggtgggtggatcacctgaggtcaggagttcaagaccagcctgaccaatatggtaaaactccgtctctactgaaaatacaaaaattagccgggcatggtggcgggcgcctgtagtcccaactacttgggaggctgagacaggagaattgcttgaacctgggcggcagaggttgcagtgagccaagatcacgccactgcactccagcctgggtgacaaagcaagattccatctcaaaaaaaagaaaaaagaaaaagaaaaattaatgcttaattaatactttagtaataatgatgttatgttattagtagtagttgtcatggtttaaaagaaataaatttataattctatgggatgatagttaacaaggtaataatctaataaaagtaatatttacactttatgataaaataagtcattccttataatgaactcagaggatttaattcaattatcttcttagtttccctaactgtaatgcagaaagataactctcaccatcatttgtgagcagggaattctggaatcaaaaacaaaataataaatgtatgataaatcctcctgcttaatctcaggacagtgggaggccagtttaaatctgggtataccagtcaggttgggtgttcgcttgtatgtaagagaaatccaagtgtagtggcttgaaaattagttattttcttcatgtatttgaggcttgaagacccagaaggaacaatgaaagaagtcatgatctaagtttgctgtatctaacaagttttcctaggagcacaatacaacaatttccacttagatttctttatcaaactatgtcacatacaactcctcagtgcaagcaagtcgggaagcctgagtatttttaaatgaccatattgctatgccaaatacaactaggattctggtagtgaggaagaagcataaagtggatcttggtcaagacagtgttaaatcgtttattcctctaaggtctttaacacagccacgtggtgtgaagagaataatggggtgcacctgccattaagaattgtaagtctctggccgggcacagtggctcacacctgtaatcccagcactttgggaggccgagaccggcagatcacttgaggtcaggagttcaagaccagcctggccgacatggtgaaaccccatctctactaaaaacataaaaatagcccggcatggtggtgcgtgcctgtagccccagctactcaggaggctgaggcaagagaatcgtttgaacccgggaggtggaggttgcagtgagctgagatcacgccactgcactccagcctgggcgacagagggagactccgtctaaagaaaaaaaaaaaaaaaggaagagttgtaagtatctgaagaaaacaaagcaatgtttattaatactacagcaatgaaatggagagtgggagaccataatgcattgatggtctgggttcagaggagacacaaaatagtgtgatcatttattaagctttactttgtgacagacactgtagaaagcattctgtatactttaacttgttatctcatatcaactttatgatattagatactattattattcccattttacaaatgggtaacctgagacttagaacaactgatttatctaaggttgcacacctagaaaatggcagaactgggatttgaacccagactgttagatattagagctctagctcttggtctttgagccagtaattttcaaataggcttgataacactggttgttgcctccctcccacccacccctgaatttctgattcagcaggtccagggtaaggcttgagaatttgcatttctaaaactttccagatggtactgaggctgctggtttgagaccactcctctaagaactgctgccatgtaagatggtagcaattagctgaagaataaccaacatttattgtaggcttactgttgcttaagttctctcattcttgctgtggattatgaggtaagtatttgtattagtaagggttccctagagaaatgaaaccaacagaatgtctatctatgtatgtatgtatctatctgcctacctacctacctacctacctacctatctatctatgaggtgatttattctgggaattggcttatgtaattgcggaggctgagaggttccttgttaggctgttggagaaccaggaaagcccaggaagtcatgggtattagtctgaaggcccgagaaccagggaagctgatggtgtaacccagtccaaagccaaaggcttgagaagatgggcaaggggagtggagaggggtgagtggggtagggaaggtggagggtggaggcacaaatgagggtgttagaggatggctggtttatgttccagagttcaaaggcccaagagccaggagctccagtgtcagagggaagaagatggaaggaagtctcagctccagaagagacagagcattcccctttcctcttcctttttgttctattcagtctatcaatggattggatgatgcctgcccacaatgatgaatgtgatcttttctcagtctgctgattcgaatgctaatcacttcaagaaacactgcttcacagaaccacccagcaataatattttaccagttgtctgggcattccttagcccagttaagttgatggaaaaagttaaaaccatcacagtagtattatccatgttttatagatgagtttcataaattaaataccttgctcaaatctgcacaactgataaatgttggagccagtattcaaaactagatatgttctcccagaacccactaacaatctgtagtttttccaggtgagggaaatacgggctgcacactttccttagcagcctctactgtattgatgctttccccacagctgctgcttctgcactcccttgctcaatctgctccatctctgctctctccctcaggggggaaagggtttctcttcaccgtggctgacctccaggctggagttgttcgctatcatcatgatgacagcgactccaccaaagacttcgtggtcttccggatatttgatggccatcacagcatccgtcacaaattccccatcaacgtcttgcccaaagatgatagtcccccgttcctcataaccaatgttgtgattgaactggaggaggggcagaccatcctgatccagggatccatgctgcgagcttcagatgtggacgccagtgatgactacatcttcttcaatatcacaaagcctccacaggctggggagatcatgaagaagccagggccaggactgataggtaagttctgggcagttaagatcatttgaatggaattcactcttccatagagaaccttctatgcatccttctgggtttgctgaaattgtgtccgagtttgtcctaaggtgaacatcaagtttctgaagtaagatagtatttttattcccatttcataatgaggaagcctgagatttaggaaagttaatttgatctgtccaaggttgtgcatctacagatttccagagctgagcctcaaagtaaccattacactatgaaaaattaagtcagccgagcaaggtgatagaacaaattagtctaaaaggagattttttgactattctagattattgataatttcatgaataacatttgtttacattttgttagaatcattttgtaactacttcttaaagtaggtagatccggagtttgacaaaatagggatcaagtaagtagttagtgttactttgtatatttgaaataagagtaagtttcttgaaaatatttttctaatgctaatttttccatatatcaagacagatatagtgactttagttttcctgctttattatttattatttttctgctttattatttatctttgatgaaaacatttaatgcagattccttgggtacatagaatgtactagacagataagacttttgaagataagtccaatatcattgtccctcgatatttgataggcttgtacaaaagtatgtggtgttttatggacccaataggctatcctgtccatggcttccttcagagggatttgtttaatggaatcatttattatcgtcattttggtggagaaatctttgaagattcttttcaatttgtcctgtgggacagccatgaacctccaaatctttcagtgccacaggtaagagactgtttctgaacactttcccaaagtcttgtgcacaggtgtcaattctaggagatgtggttagaaaccacatgaaaataggtttcaaggtttaaaatttgaaaaacaatcgattaaacaaaattaagcagatttctttgcaataggactactcaaatgtttcctttttgaaagacttttatagatatctatgtattcagtgtttcaaggtcatttaactatgggacccttttatgtagagcaactcacaaaatttgcttgtctcccgacactcaagaaaacatttattttatatgtggtgattaaattataggctctagagttaggttgcatgagtttccctcttgatcttgacactgactgactggtcaacccatgctccagtttccttgtctgtaaaacagataataatagaaccttcctttagagttattgtgaaggtgagataatgcatataaagtactgagaacattttggttcatgggaaacactcaataaatacattagctattatttattgttgtctttaaagatctaagagtctcttctaccactagaggatataatttaaatgtgtagaatgcagaaagaagtttaagcaaacattgccatatagaaattacagaaagtggagtcagggtagtgtctggacaactataatagagtagactccttgaaaggagaggctggttgataatagagattttaaaaaaggacagctgaaattaagtaatcacctactgatatggtttggctgtgtccccacccaaatctcatcttgaattgtaactcccacaattcccacgtgtcatgggaggaacctggtgggaggtaattgaatcatgggggtgggtttttcctgtgctgttctcatgatagtgaataagtctcacgggatctgatggttttaaaaacgggtggtcccctgtacaagcttgcgcgctctctctctgcctgctgccatccatgtaagacgagacttgatcctttttgccttctgccatgattgtgagacctccccagccatgtggaactgtacatccattaaatctctttcttttgtaaattgcctagtctcaggtatgtctttatcagcagtgtgagaacaggctaataaacctactatgtacgtacattttgctaggcattttgtacctattatcttggaagatagcctgtatatggatccaagcaaatttccaacctgttctagaatgactgcttaaagcaagggtcctatttgtcacataatgccttcccataatgtcatagacactgacattagctaatgcatagatgattgagctattcatctgtgtgctaagaagagtataacagaaggagatgatcaggaagaatgattccagagagctcagaaatggaaggcaataggtaatccctattaagaaggaatagagaatgaatgagaaaactcagttcatctgctctttgactaacaggtcaattccttttcaaataacacctccctctttttatcaatgtattatatgtcatttctagattaagtttttgcttgaaaccttagtttatttgatagttcaaaaaggtaacagttaataggatttacttctaagtcttctgtgtatctatccaatctgagttatgtttctgactaggataccgtatcacttttagtggcctatgggcctttttaaaaatgaaaaattcaggacttcttttttcttctttcgttgttatatattttataaatcatgctcttcatatacacaagtatagatgtcagatttctctgtaatgaaaactttagtgcagcataattatttctgaatctgggcaaattggtcaaactaaactctgtagatctagttataagtttattccctgtgatggataggtttctaaagatgcttatcatgtttttctctgctttcatcttcttaatttatgttagaaagagaaagagaaggggacagagggagatctacaaatttgctctcttcattaccatatatctttggcccctaaatgtttatccagctcagatgtgtgtcctacctctctatctgacatctttacatgtatgtatcatcagcgttttaaacttatgaccaaaatacatctagcatgtgtccctaaaaacttgcacaaaataactagctggaatctctgaagtcatccctgactcctttctctaatgtcagcacaaccaatcagtcagcaggtttactaaatctgcttgacgagtttttctgatctatctctacctccccacctcactgccattgcttcagctccaaccttcatcttttctgggctagattatcctcaacccctcccatggccttttacaaatagaggtgattaaccaaatccttatagttgcgataaattaaaactcattaatatagtagcagtattcttagtgaaattaatctagcatctgtttttcccattctccctcttctggttggtggtaactttgtcttagtccctctccagactatggacttgctgtcagctctaacatcagctgttccaagaatcctctgacgaccccattccacaaaccctcaggcaggatcagcttgtccttttacatgctctggcatctgtttacacatatctttgttgttgaactttctgtaaagtaagaccactatttcttttattggatcagctctgatctccttgacagtagggacccggaattattcatttcaatgtttctagacctaggtatctgactcattgtagacccttacaaactgcttattgatcaccaaatgaattctggttctttcaacatttactgaaactaggaggaaataagacccaaacatttggtagggactagggagggagtgagatggggcggtaataagtgtaaagctttattcagagtttctagaaataagtgtgtgcatgccaatgaaacaagtattgtgtgtatgtgtgtgtgtgtgtgtgtgctggcaagcatttttatatttaaaactccgatatcagtgaaacttcaatatttgaggaactcaaatgattacctggtctgtttgatgtttacattctcaatttggacaagtatctagtcatgtcctacagataaaaatagatttaaaatattcaacaaaattcataactttcagctgctcaactagaagtccagataaaatgattacttgatggtagctttcgtgatcagaatattccatggttttgttttattttgacgttgtaatggaagtacagatgagcaatgccaattttgtctacaacaatggcattcagaatactcaatttgaaaatgatgagaattccttttgaaattgacacacacagcaaaactaaattatgattaagctttttctatgacataaaaaaggctagaacttcagctcagccacctacaagctgtgctccctggggcaaatcatttaacccctttggggctcaggtttttttctctgaacattgggaataataaccatggctattattagtgaagtgctatctggatcactcaagatagctagtagcacagtgagtactcagtacttagtaggtgctcaataaattaattccctgtctctatcctttcatgactgttgccaaagtttacagcatgtttatccattatgaagcatttcaataattaaaaattaaatccggttatcaaaataaacacaatggcagtcatttttctattctcctgcagtctgtgtcatgattttttccccccaattacagtgtttcgctaatctacaaagttcagaaattctctgtgggacttcccagccatagtgtggatcagtgaggctccacttaattggaaaactggatttaataaggaaacaatagttattgtgccttcaaagagaccattttccatgctaatttattctccaatgtgttctttgtgtaagaagaatgtacagcatgcttttttatacccctgtaataattcttagtgggcacatttgtgtgtgtgtgtgtgtatgtgtatgtgtgtgtgtgtgtggttttaaggagtggagagagtttaatatacaagacggggcaagaaggaagggagaagacagaaggaagaggctcccctgtacagagacagaggtgggaatggggctctaaagctgaaagaggaggtccccaagtatggtggacaccagccaggtatatatgcagaggctggaggaggtggtgtctgatttgcatagggctcaggaaataggtttgaccaggcatgtcattcatgtagcccgcgaaaaagctggtcctcccaccctagccttttaatatgcaaatgtgggcaccctgatttctacacatgtggggatatgtgggggcggccatgttgccaggagcatatgggccaagggcaagaaggccaagggaatcgccatgttgggtggacccagtttctaatggccggcatttgcatatcaaaggttgcccacctgactaagagctggggctttacaagaaacttttccggatatgctttaaaagacgaaaactacccaaggaccccttttcctctctatctgcataaaataatttctttttcttaataactcctaccacattcctccctgcggcaatatcacactaactgcagttagggggttttgggcgaagactctttctggctacttcctacttaaaaggggcgttgaatggggaacagcagttagggctcctcctgggattgatttaagggtcctcggaagaatggcatgtccacatgcggttcagtttgcagcaccatttggagtttgattgcttttaggcgagaagaaacaatttgagtcatagtactgaatatacaacgtccaaatatcaattcaagacatataagcaagagagggcttaataaaggggttaaccaattccagaaagaagactggaatttattaaagagggattgtagccgcccagggctgaagccggcattttccctgagcctgttaataattttgatttgatttttaagtacctgtagattttcctttcctttactaggtgttaatccaaaagcagcatgtttcatttaaaagtgcatcactaaatccaataaaaaatcctagcagacttagtgatagtaaaacttttacgctttctttttgtcagtaactattatcccagttataaggataataattaagcaaaatactacagcaatgaaaactctctgtccaatattttagtttgaaggtgctaccgtgtataaccctattgcaaatagtagagtgaggacagcaattcccacaagtgtggtgtggtagataatttccatctaaaattttacttgccaagatagagaactcccctttgggggtctatgaagttccttggttttattttcccaaacaaagaaagctcagagttatgggcaccttactcacttttcattacccggcagaagttgcaagataattgcccagaactagcatattgattcacattttgacgttacccgtcccttttttcttttttccaagctgcagatcaccagttgattcacaggaataagcagggttcgtctaaaacgtaggcaaaaagctgaaaaacaagagactaggatttaatgacaaatgtatgataagttttggagcaaaatttttctcttcagtcttcacttttggtaaaaagtaattatcagtaaactttagtcttatagttggcctgattatttgcataaagtgcagcaagaatggttatttttacataggccttttggattggctttgatgaaacgctgtttcacaaggaatttcaggtaagacttttaaagccgagcccagccatgggtttgtatcctctaatacctgtgagttgggtgatcctttcctcttgaggtcccaagataaactcatagcttccagacctattagaaagtgacattcttcactgaccacaggttaggaactgtatagacaaggtggtaggccagttctccctaaggggctttaattggctgtacatgtcgagcttgattccttaaagggagacacaccccttcagtcaaagccttgataaaataaccagttttccaactgtgtcctgttgacaaagaaaaattgattcttattgcactgatgcaaacaactgtattgccataagagtacttacagatagtctccaaattctagaggaatcaggcggagaaaaatgaacatgctccaaattttgtttacaggagtataccttactcaattattaaaggctgtaaatagtttaaaataagtttccttgactctgaaaaactaaacaaggatcagcaatattccaagcgaaagttaaaaagtttgctttaactttgtgagtgcagtccacttagttaaattttgttttgcttgatatttgtgaacatgtcagttttttaggagtcctgtagattctccctccatttcagtgttacaatcttcaaagctattacaaacctgcatttgagaacacctgttaaagtccttaatatagcttgattataaaccatcttttgagaaggaacaaagcaagacaacaattgtctgtgaatggcaacattcccaggatagttacagttaaaaacatgactggcaaagaactttatttatcttcgtggtttacaataactttacccttaattatgattgatagcacatacttaggcattagaattttagaaaacccatacaatttttgaacatatattagtgttcaccaaaatataacttaaaaaagattggacatcattttggcaatctcatgtgactaaatatgtcagataatcctgtttacctcttttctgaatgtttcaggggccctctgaaccattcaaaaagccaggcatcaggaaggataatttccagattgccataaattattttgccaaaatgatgactcaaaaggcaaaaacattttattagtctttactatgatatgaaaattcggtttaaagctaaattttacccttgcattagtttatttgttcaagtgaaaccttatagattattccattttatctttatcaatttgaccatgaggtgaaatttttacaaaccttttgtaacccttttactaaaggacagagtagtgtcttaagaccttcttgctatgcttttatttcaatgcttaatttaagaaaagaccatatagataccatgggagaagaaggtgtagtgcttctaccatgcacttcatttcaaggcaacccaaagccaattggcttattttgtaatcagcccatccctgatgggagtctcatccctcagtgtggggtggagatgttgccttattttccaggtggctaagagcgtgcttctctgatttataactactattagccatctcttacagtgtattttctacctagttattactcaccaaagctctctcataatgcgaagtaatttctgatactcccaaaactcaaaaccatcagataacacaatgcaaaacagaacagagcctttgattttgagagggataatttccttttaattcctggggttttatgaggaaaacagaggatcccccccaactgccccacaaaacggggtctgtggcacctcctctgtttttcccaaggagtcccatgctaccagaagttatcttagagcctttcaggcatgcattaagagtggtaagacaaaaaatggagaaaaataactcagttgactgagaagaaaagagcctttttccagaaaaacaacatccaaaaaaagaaaaacataaaggccttttaaatatacctctaacttgaatatccactcttaattaagctgagcactctttaagaaaatccttttaaatcccttgttacttgactttagctacaccaagcagtaaagattttcagcttttgaatgttacaaaaaagtaacctcacagatgaaatcaatgagccttaattaggttatgacttaaccatgagtgtgcaaggtattttcaaaggagtgataggcagcttttgaaactaccattacaaaattgtgactgagacagtgaaagagatccgacccaaacaactccattttatttttagcccctaagctctcctcgaccatccctgggtgtaggctgaaccgactttggaaggagcctggtttataggctgtagtctaaaacaaagatgataacagccgcttcccaagatatacttccctcttgcctggggaagaccaagaaactagccacaagattagaaaccatggcccaggagccatgcagctggaggctacaagattttgaccctccctaaaccactcttaagatcagtgcttaagatattttataaaccctgcccttgatggatcggctggcaccacccagagtgacaaactggcttatttgattttgtggcccttacccaggcactgacttagcacaagaagacagccaccacggtaaaatggcagagactaaaacaaagtattgccacatggttaccgattatgttcctaaggacatgaaacaagttggaggcccatagccaagtttgttactgaccgttctgctgggctggctggaacagcaggcctatggggtcctgggcctgcatcctaacctaagataccttttcttcggtagatccatacagaaagacacgcaaagcatacaagattgtttacagcttaagaccaaccttacaaatcctttttttattaattatacatttactgagaacataagcagtgatccttattacccctttttcaggtttgcacagggagagaagccaaaagcccaactggtgagaaatttttacccttttgccagcatatcaggcatcaggcttctgggttccctccccgctagctcaactctacatcaagcattttaaggtttggaaaattagtttttcccaggttggaagaacattataaaagagatagaagccattttaaactgcaaaagaaggaaaagcattgtagaaaggaattcaattagggttgttaagaggtattgcctctcttcctattgggaattgtgtttcccctgtttctttgccttccctattttttctcttcccttttggcctactataggagacatattgcttatctccaaaattctcttctgcgtgcagagctgcctgttttagctgcagtgagggtttgccaactctgtgtacggtcaaatacctaagttacattttggaaagcttctatatacctattagggtagttagaaaatcggcctaagtctgcctttacttgcctaaggtcctgcaatgagaagggaacttgaaggggccccaaataagggggaccctcagatgacttccctgaaagttacctttttaattttgggaaactgttttccctgggcctgcccaatatggctgcaaaagaaaataaaccactttttcttcaaagtttcaaggtcgaaggagtcccagtgcttcaaaatatgttccaggggagtgcatgttgaagacaatctgttacccatctagaaagagaagtgagaataaaagcgtcgttttcgtctccttcctttcggtatgtgatccaggatggagatgaaaacagtagagggcgtccccccagctattctctgtccgtcgctcttggattcccggcacccgcttaaatgtgccgcacatgacttgcaggcgtgaccctccgagccatggcgccagaggaactgagttttgggccttagtcactctgtccccaagcaatcagttctctgccttttatttccctttgacctcctagacttgcgtggcctgtgtgccttccaaaaaatagattccaagaaaaatcatgtaattgggcaaggcccctttaagggagggagcaagctagattgaactctgtatcctgctattatagcccaggctaaagcatttacccatagaaaaatggttctggttaacttccagaattaaaatacccttcctaattaagtactgtcttaataggagacaaaataggtgccttaaaggaatgtaggaaccaaatggccattttcctgccagtgggacaatatcgagattaaaatttggctgcagaagacgttttactcttaattgttaaaagcagaaactttccattcacagaagaggcctagagcctgatttctaccaggtggcttagaaataccatgtgctcgccagagaagtggtatcaagtaacctcgctgtaactttgttcctagactgtaaaaatctttgcacatttcatgcagagaaagagtaagaggctgcggacagaaagggaagaagagttttgcaacaggatagttgaggttctctgccaacacccagaatgggctgttggaggctgtgtccggtccagaggcctttgaatcacacctggccagaaattctcagttgcctcagaacttttcccagcctcacgtgatggcaaggtcaccagtgaaaagaagctacttcaagcatgaccaacattcccaatacctgtgggtaatggggggttctccaagttctccccagcaagccttatatccgtgacttgagtacggtagccaacaataagcgtatatactaggttgatggatgcctgttgagttatttgatttattttaatatagaggcgaagagtgcctcagaatgacagaacagattttaagcttgctcccacagtcgccactctgatgaaggaaggctgtacctcagattcctgtacctcaatgcaccaaagtgatatggcttcgatgagtgaaggaacaccaagggtcttggccctcatgccggtttagataaaacgacacggacacacgtggagtggttttaaggagtggagcatttaataggcaagaaggaagggagaagacagaaggaagaagctcccccatacagaaacagagcggggggagctccaaagccgaaagaggaggaggtcttccggtgggcacatttttttaacatgctttatgatggcctaagttgatatgtctttacatatttatgcatgttcaaacaattattattctgtgggtgagaaaagtcccattttaacaaactccattgagaaataaagtgttctcaatgtactgaaatctgattgtaacaaaagcattattaaacacccaatcccaggcaaacagtagaaaactagtgctcaaatcaattgctgggctcttgcttgctgccttcccccgtgtccctccagcctgcttatggctacagacttataaggaatcagaatatgaagtgataaatcagtacacaaaatgacaaaacctggccttggtcttcatattcaggctcacaatataatactccaccagctggtatctgactttcttgtgggaatgggttcttaatcctttctctgccctgattctttgatttctgctagctctttcttttgcatcttcccttgaaactatccagtgctatttctcacccccaggaactacttacactgttagttttgcccacccactttcttctctgacttgtggtaaatatgcaccccccaggtacctgttctctcctctgggcatgtttcatttctcccttccacttcacccatgtgcttttgtgtcaccttcttccattctttcctcgttttctggtcctctctctgcatctctcatctatccttatttttattctccctttttcttctaatattactctctcctggattaagatctcttaaggcttaaggtctataaagctgtctaccaagtagaatagagttggaaatgtttttcaaaagcaagttgagtgagtgaagctgtcttagtccattttgtactgctacaacagagtactacagactgggtaatttataaacaatagaaatttatttggctcatggttctggaggctgggaagtccaagatcaatgaactacatcttgtgagggccttcttatgacatcataatacagaggaaaacatcatgtggatgagaagagagcaagagcttgaacttgcagcctcaagcccttttataatgatcattaacccattcatgagggtggagccctcatgacctaaacaccattgggcccctcctctaaacactgttgcattggtgatgaagtttccaacatatgcttgttggaagacacattcagttcatatcagagactttatttgatgacagtcatggcaaccaagatagaaaaagttcatggagcaggctgtggaaaagacccatgatgccaggcaaagcaccattttcagacagtaattaatagcttttccacaaccaatgatggattattataaaagaaatgttataataaaagctgtttggcaagtcctccttaccctctagcatgataccaacctgtaagtgtagttttaagacttaaaatctcaaacaggacatgacttactcagtttgcaaacattaataaagtgcctcctacctacaaaaaaaattgtgctagatgttgtggagatacagagacgaatgtagtatttattgggcacctactatgtgccagacattttacctacatagtaatatttgatccttataacagctctgtgaggttgtattatgcttaacttactaataagaaaattgacactaaaaggttaagtaacttgtttaaggttaaatagctgctagtaagtggtatactcaggactataactgtaccgtcaaattccatgtggtttacaccatattgtaatgctggcctcatggaactttcagtctgggagagagactcatttgtaaactaacaatacaaaacattagaataagtatgctagttgagggatgtctaagtttgtttaatctgctataacgggataaatgactaatttagaaataatagaaatttatttccataaataaatttatacataaataagccataacattctaccccggcacctcccccgccccgccacaatttatgttcttctcccatacaaaatatactaattccatctcaacagcccccaaagtcttaactcatttcagcatcaatgcaaaaaaataaagtctaacatctcatttagtacatatttatgtactaaatcaggtatgggtgagactttaggtacagttcatcctgaaacaaatttcccctcgagctgtgagcacaataaaatcaaacaagttatatgcttctaaaatacaatggtgggacaggtataggatagacattcctcttccaagagggagaaataggaaagaagaaaggatccaaaactcaacagggcaaacaatattaagtcttgaggcttgtgaataatcttctttgactctgtgtcctgccttctggacatgctgaggctaggattgggcccccaaggccccaggcaattccacctttatggcttttctgggtacagcccaggcaacagctgtcagaggttggcgtcaggtgcctgaggctttcctggatggcgttgcacattggtggtctctggggtggccctgaccccatggctctgctgggcattgccctagtgggtactgtctgcagcagccctgcacctgaggcaactctctgcctgagtcccgaggctttctgaggcatctcttgaaatctaagtggaggcagctgtgttttcacagctcttgcactctgcacacaagcagagttggtatttgtgccaaggcctacttcttgtgttctccagagtggtggctcaagtggttcctgggcctgcttgagccacagctgggatggccaaggattgcatcagaatgcagggagcagagacttgaggcagtgctgggcagagaccccacaggtccctcccttgaaaccattctgtcctcaaggccctggcattctgaacctgtgatgggaatggtggcctgatgtctaaaataccttcagggtcatttttccattgtcttgataaatagcagctggtttctttctattcatactaatctctctatcatataggcacttggtcacaccttttgtggcctctcctaaagatgcttttttattctttatatggtcaggctgagaatttttcaaatctttaagttctgcttcccctttgacaaaaaattctggctttagttcatttctgtcttctagtattttactataagaagtcaagaaaagccatgcaacgtgctcaactgtttgcttagttatttcttccaccacgcatcctacctcatccctgctcagttctgccttacataacgtgttagaacacaggcaccatttagccaagttctttgccactttataacaggaagatctttcttccagtttccaataagatattcctcatttccatctaagaccttatcagaagggcctttactgtttgtatgtctaccaatgttctgattatgaccacttaggtaatctctaagaagattgaggttcttctgtctagagcacacctcttctgagccctcaccagaattgccctttatgatctattcacagcaatataggctttttctagcctacttctccaaattcttccagtctgtacgtacccattacccagttctaaagctacttccacattttcaggtatttcagtacctaactctgtcttagtccatttgtgctgctatggcaaaatacctgagactgggtaatgtataaataatagaaatttatttctcacagttctggcagccgggaagtccaagaccaagttgccagcatgttttgtgtctgatgagggctgctctctgctttcaagatggtgcctcgttgctgtatactccagagggaacaaatgctgtgtcctcacacagcgaaagggatagaagatgaattcattccctcgagcccttttataaggcacaagttcattcatgagggtaattagaccctcatgaattcaacctcatggtccaatcactactaatggccctgcctcttactaatcttgtattggaaattaagtttcaacttaaattccagagaaaacacaaacattcaaaccataccaaggggtaagtaaaattcaggaacaattccaactgaaaaattggagaaaggtctaagaagagccgttaagggtgagaaagactcaggttgctggataaaacaggaggaaagcattctagaagtgtggtcaaggaccagtacatggtcagtccattgtgtataattagagtgttggattgatgttaaaaggtagtaaaagatgttgaaaggtggctgggtggtggctcatggctgtaatcccagcactttgggaggccaaggagggcggatcacttgaagtcaggagttcgagaccagactggccaacatggtgaaaccccatctctactaaaaatacaaaaattagctgggtgtgatggtggaagcccgtagccccagctactcaggaggctgaggcaggagaatggtgtgaacctgggagtggagcttgcagtgagctgagatcgcaccactgcactccagcctgtgtgacagtgtgagactcctcaaaaaaaaaaaaaaaggttgagaaagagtgtatattgaaagtcttggatgccatgctaaggagtttggatattctataaataattccacactttctgagaagttgttttaagatttttgaaggggtaaattaacttatttcatttgtacttttttgaagataacacgaggtatgaaaagtctagattagctcttggatttagggctaacaggcagcagttgcaataatgtaaggatgaaattatgaaaggtaggccagtagcaatgggaatgacacttgggcgtgggatgtggagtatggtcactgcataggaaattttataagtagaaagtctgggacttggtgatgtgttatatgtgggtggagaaggaggaaccaaaattcatgtcaaggtttctaagattgatgactgaatatagggaagtattaaagaaagcacaggttgttggtagaagagagatgtaaaaataaaaccaggaacatattttgtgttttatgtgcccattctgtagcactcatgactggattcactataattgtggtatatatatatatatatatatatacacacacacacatatatatatatatgtatgtatatatatacttttttttttttttttttgaaatggagtctcattcttgtcatccaggctggagtgcaatggcgtgatctcagcccactgcaacctcctcctccaggattcaagtgattctcctgcctcagcctgccgagtagctgggattgcaggcacccatcaccacacccaactaatttttgaatttttcgtagagacggggtttcactatgttggccaggctgttctcgaactcctgatttcaggtgatctgcccacctcggccttccaaagtgctgagattacaggggtgaccccctgcacctggcctgtgataataatattcttaaaatataatattaaatgagtagaggatttccattttttggctcatattcttaatagctcctgaatcatttgacagaagtatattataaatgacagttttagaaattatcttaactgtgactaggtgattgtggggcattttctttgttgtttttttggtatttcaaattaatggtacagacatttttattccaggtggcaacaatccatataactccagtggatgaccagcttccaaaagaggctcctggagtttctcggcatttggttgtcaaggaaactgaggtggcctatataactaagaaacagctacattttatagattcagaatcatatgacagggagctggtctacacaataactactcctccatttttctccttcagccacaggtatctgaaaagtcaccatttgggctactagttctaggattgcaaagttgaaagtgtcaatatagagcaatatatatatatatagtactgtggtttacttgctccattggtcaggcatgaaattatactcaattaagcgtttacttttttctcaaacaacttcctatctccctttgaaagctgtattagttggtaagtgatctgcagcttgtagtgtcttcagcattggtaggcttaaaacagtctttaatccactttttgaaagacaatgcttatttttcttttagtacaatttattgaggtcttcctaacattagttttgcatattactgccatgaaatcgttacattctatgatctcaatctagaaaaatggcatgaatatacgttatgctagtatcgtatgcatgagagcaagaaaccatttttaacatgagtgtaacaattcccttacatgatgccaagcaaaagattctgtacataccttttgcagtcatgacaaggatgatgttgatgaaactggacttaatgctagaatctcccaacataaagagagaatataaagatagagcacccaatttcttctcacaatgaagtctttcagtttttgattgtgggctattcgatttcatttttcttacctaaaaatgagctgatgtgctcctctgtatttctctttagacacttggatgctgggaaattatttatggtggacagcataccaaaagtagttaagaatcctacggccctggagctgaggtcattcactcaggtatgaggatatgctaaaatgctgacaaacatgatgcaagtgtgcccttagaaggtatggcatgcctagtattgtgcctgagaatgttggtctttgacatccacaaagacttgacatctttatacttgctacttgtatgtttccattaagtgtgtggcatctatttcaaagtacttgatcaagttgaatatggtttcacaatcttttcagtaattttactgaaaacagacttttgtattgttttgccatcagcaggactctagtttgggtatctggtgtatacgtttttattccacaaaattcagtttattcagtatcttactgtattagtttccaagggctgacaacaatataccatgaactgggtggtttaaaataaactgccaggacataaaggactatgagctttattttctcatagtcctggaggctagaagtcttaaatcaaggtgttggcagggccatgctccttctgaaaccctgtaggagaattcttccttgcttctattagtttgatgcaaaagttattgcagtttttgccattgaagtaaaaatagagcttttggtaatcttcaaagtgatgatggtggcatttacagtgttcaatatcaattaacatgatggttctcttggacctctaaaagcttttgatccttgcaagtcagcacccacatatccatctcaacttactttgcagcatgctgtgaactatatgaaagtggcctacatgccccccatgcaagacattggtccccattgcagagatgtccagttcacattttctgtcagtaaccaacatggcggtactttgcatgggatctgctttaacattacaatcctcccagtggacaatcaagttcctgaggtatgtacaatgttctatatagaggatgaaaaggaggaaaagaaaggagagacttgaagacctactagaaatggtaactttcctttaggctagttttttaaacttataaaagaaatttccatctatggtgtagtaaaaaaaagaagaaaaaagcagggagaagggagtcttttactcccatgggactttctatgtaaaaggtgagatttttcagctactaaatttaacattattttcaaagctttatcaaattctttttcacttcctcttctttctgctgagtttcacgtgttgatcaagggaaggggattaaattatgggtctcttagccactggaagggcttatttaccctcactgcagcccaactatgctgctctgtaatctaaagaagctctttaattttccaaaatgaatcaagatggacccttctgtcatactttgccccactgccctgtgtttgtgtaagcctgaaaggacttgggtcttttcattaaaaccgaactacaaaggcattgctaccttgtgcattttttctgggaagctgggatttgcattgagagtatgtcccatacctacccggttcccctgcccaccttcacaatgctaggcttaattagtatggtcattattattcttattatttcccttaaaagcaggaagacaaaatagcattacccattcattatcaaccagaagggaccagagcctacacatgcctcatccttaaggaaagaggtcactttcccgggtgcctacttggactatagcctgcactggcgttctctttcctgactcctcatcatctctatacctgcccaaggttgtggggcagaggtcttaccctgagggcctaaaagggctgcccaacctgcagaagttttgatgggtgtattagtctgttctcacgctgctaataaagacatacccgagactgggtaatttacaaaggaaaggggtttaatgaattcacagtttcacgtggctagggaagcctcacaaccatggcagaagggggatgaggagcaaagtcacgtcttacatggtggcaggcaagagaacttgtgcagggaactctcatttataaaaccatcagatcttgtgagatgtattcactaccatgagaatactatgggggaaactgcccctatgattcagttatctccacctggccccatccttgacacatggggattattacaattcaaggtgagatttgggtagggacatggccaaaccacgtgaagaggtcaaaacaatatatgaaaataatgaattgccaacatttaaagatcagaagattttccatcaaggctgattcctagcttcccttgaaactctggcagatctaataaaatttaacccgcacaccctacagcagccattgcatagggcgtgctctccagaccatctaagcccccatccaactcaccacacttatttctatcactggcctgacctcccacacctgtggacttgccatctttggtagaaaacctgccaaagggctcacacggaggattttaaactaactccattctttgacacctttcctatcagggaccagatcatattcccggtggtgaaatagtttagaatgcttatggagtcaacttgattagattttattcagaccattcttttctatgtatgagatacaggccatcaaatagcctagcactaaagaagccaaagttttctctaaaacaatcatggagaaatgctcctttatgcaaagttattcaagcctcttgatggagaatgatgatctgagaaggaaactaaaaagtgtaaaggaaaaaagttaatttcactgaatagttttgaggagttgaggaaagaatggcagggtagcttctctttttttttatttttactttttacagtatatggggcaaatgaaatagtccctcaaaaagctgaggatattagaaacaaaattaaattagcagcttcagtgagacccaccacaggagttgatcccttatgtagaattcctgcagagagctggccaagtgataaccacgggaggatgttgacaccatgctaacctgagtcccagaaacctgagcactggatctgggcaagaattaaaaagctaatgactaatgagtcgggggaaattagccttatgcttttatttttttgaaagttgccctaaaatatatatttaaaaaatcacctaatgtagcaaagcatattccttgaaacattggaaattgaagattccatattgggatactaattcaatacagctcagaaaaatgaggttggcaagcatggacctttgttcgaagacaacactcctctctgagtaagagctccctctctttctttctcctacaaacagtgaaaatataggtttagcaaagtgaaagtgagacacttgggagaggtcagggtgggggtagttgtagggagagaagtctatgtttttgcattggtagttgattaaagaatagaaggcagtggtctcagaattgtaggtctcataatttccatgatgcaaggggctgcccttgtggcaccatgaatgccccaggtggctgtggcctggagttggtaccagcactgtgccgtggtgtccagaaggacacagcaggctcttgagcagaggctgcagcttcacttgcttccttccctttcctcttccaatttgttgtcatcctcctttaccagctctttcttcagggaacatcctccctgctgggaccagcagctgctctgagaagagtaggtgcttcctaggagaactgctgcatcctcccatggacagggcaccttactagaccacctgggaggggtcctcagagcccgtgatttggtaccccactgtatctgcttgctttcacttctgcgtagcaatacaagcgtgggggtaatgataggttaaacaaagttagcaggttttcctcctgcaggatctcagagccttgaatatgcttatgtcccttataaacctccatggtaaggatattttatgtaacttttttctagacttatttggccatagaacacttattgctccctcccaatgaggtgataaaatatcccaagccattcaacttgcttttaacttacaaatgaattattagtcgagcagtgagtttttctattatagcaaattatctttgtggctttaatatttaagtctaatgtttgaataaatctatttcctctggaatcttcaattttgccacactacttccatttctaaaatattcactgtgactgaagttctaaagctccaatccatttcccaagcctttaagaatttttaggatgaaaagtagatgaaacctttccttcaggggaatttgacatagattttgtgtattttttagactaagctgtatgtgtattgaacagtgatgggaatggacctgaggatgaaaattattatttcctcagtttagcagcacagatagtaatgattgccaattctactatacaggctatgcaataaatgaaaagtagatactttcaatcttagagatctgccttgtttccttgtaacacattaatgcttagaattagaaatagtaaaaaaaaatttttcagtcaaaatgtctagctatgaacttatcctcttaccacattcttgaaaaattagtttgcatgtgaagataatactggaagttttacagtgatgtaatgagctctgtcttcaggggtcatggaaaaaggctttgaatgtttccttcctttcttctttctaggcgttcaccaaccctctgaaagtgactgagggaggtcaaagcatcatcagcacagagcacattctaatttctgatgcagataccaagctggacaatattgacctctccctgcgggaattgcctctgcacggaagggtggagctgaatggatttcctctaaattcagggggcacattttcttggggcgatctccataccttaaaagttaggttagaacatttcatggtttttttatttacatgctttagtttcttatctagatcagttgtgaggcagagtaagagaaagaagtttgtccaatttcttaaaggataccaacatgccacttaacacactcaacgggtcagttgaaaattacaaatgatcaatttttcctttccctccagacattttatttccatctgacttgctataccagtggaaataactttatggatatttgaacaataaaaatttaattgccgtgaatattaaattggcagtaactgcacatatcacaggaggtaatagtcaaactagataaagagagactgaaataatctgtgaggctaatgtacataattgaacttgtgtcccagagaagcaaatttcataacccagaaactctgggatagaactctgttgatcaatgtccttaatgtaaccttattccgttctactagggcagggatctgcaggcaaacaagcagggtgagctgagtaggcagggcgtaaactaatacttgagtctccaacagggatggcacaatccctggcctcatggtcctagagaaactgcccttacctgaaggtctttcatttcctctacctaatgcagttctgtaagaaactttcctacaaaatctagtgaaacaacttctctggaaaacaatacaagctattcaaaagcaatggtcgggtagacccacacactcacttctcacctgtaaattcaagctataaatgggagcattagccctttagataaagtatgataggagatattatacatcagatgcttagctctgcacttgactagaaagttgaccagaaactaagatttgtacagaagaagatgagtttaatcctgacagtttagttccaccattgatttacagtccacgatatcttgatctttgcactcgcactcctatccttgttaaaaaaatgttttttgagatttcagctctcagctgtctgttagatagagagccctgtttaggtaattcttgctacggagtgaatgatggataaacagtaccaatatttgctagaactatctgttcaagcatactgtcagaggcttacaattatggtttttgaaaatttaatctgcatagtaatcaagtctgacaaggtatccattctcatattttaattgaagaactaagcacaaagagattgaggaatttgcccaagttcattcagctagtatatggaggggtcagattttgaaagaatatctgtttgactccagtcatcctttggatgtgtactcttagggccatttgatccttttagggattttagcatagtaaaatagaattagtaaaaaagaattatcactcaccaatatagttttgatgaaaattgcagggagcatggcaaaataaagcatagcgggtagtgcgtgagaggatcatggagggtggggaggatgtgggacttccccaccataggaagggaatcctcaacctcagttcctaccctgcctatgggtgaaactagtcctcagtaaaatacctttcagctctgactttttccccatagttaaagattatacatgttcaatatattatattattttttaatacaacttttattttccattcctaggactcattgatatgtttaaaatttggctcaattcacttcagcagctccttagaactttccaagcatcactgcaatgggctggagagtatgtggagggcctataattagacaatgccttcaagaaatgtggctgagaattagtggaagatagggctaaggctagacaaaggaaaggtattttttaagtctaagagatttaagaatttatatagattgagaggaagatagctagtcaatggaagaggagaaatgacaggaaagaggcaatacataattcattgatcaaggttttagagaaaagctgaatagatccagagcacaggcggaaggattagcctagccttagaagtagaaaaggggagaaaaagatcaaatccacagtgtcccacttttcctcatctactgctcagtctgagggttctcctggccctagtcagtgtattctgcaagcgtacagacctataccaaatggttcctgttgtcacagtggcatttgaagggctgctttttaatttgaggacaaattagaaatgcatataacacatttttccagggtggagcaattttacattcaaggatgtatgagtagttaaatatgtgacttcaggattatgctgggtttttgttgttgttgttgttgctatttatttatttagtgaacacatggccaaagccttggaagagctcatgtatcatgcatctcaatttactctcacactgttcctaagaggttggtgacaaatattatccccacaggtatcaacatgatggaactgaagttcttcaggatgacctactcttggaggtcaccgatggcacaaattcagcagaatttgtactacatgttgaggtgggtagaaagtttcttccctgggttattgtcttagtctgttttgtgctgccataacacaatactacagactgggtaatttataatgaaaagaaatttatttggctcatgactctggaggctgggaagtctaagattgggtagctgcatccagtgagggccttcttgctgcatcaccctatgatggaagggcagaaaaagagcaagagggagccagacactgagctatgagccttttatgatcagcattaatccattcatgagggtggagccctcatgacctataaacctcccacctcccaacactgttgcaagttttcaatgcatgcttttctggggacacattaaaatcatagcaatcatacagacatagaggatcttgttggaaaactctcaggtcctgacagaacttgaaacctacggcctccaaagtgagaggatacctgcttcgatccttgtatgtctcaggcctgccaatagaaaccaaagttgtaatgatgaagtagtagtactatgctattgtctctctctaatctatttagaggtagaattactctgacttcaaacatagatatttaattttaaaagtaatttattctatgtataaattatttctaatatctttgaactataaaactcagaaatatttgtttagcagtggggcaggttaggctagtatcactggggttttcctgtttacagataaagccatgtatatgtgtgtgtggtgcctctttgtgagttcctgtaccatatagtcctagcatgaggatttaatcatatttccccctcttgacaaatgaaaaatctgcacataaaattcgagtgcagagcgggcaaggtggctcacacctgtaatcccagcactttgggatgccaaagcaggctgatcacttgaggtcaggatttcaagaccaccctgtccaaaatggcgaaaccctgtctctattaaaaatacaaaaattatctgggcatagtggcttgcacctgtagtcccagctacttgggaggctgaggcaggagaatcgcttgaacctgggagacagaggttgcagtgagccgagatcatgccactgcactccagcctgggcaacagagcgagactctgactcaaaaaaaacaatttgaatgcatgcccaagggacttacaggaaccccctgaatttctttgttgagtggcatgcaagtccaagagcataactcagaggatttgcaggtatttatagttggtaacaaaagaaggtctgaagaaaaatataccatgttccctgaagagccactaattattttcattgttctagattatttttctttctgttggaatttttcagatctttgtgatatgaactcattactatattggtaataatgtctttgtaagatattttagtaactaataaaggatgttcacatctataattttaagaagcagtgaaggagttatccccattttatagctaaggatatttaggtacaagaaggttcaatgacttgcccaaaatcattgactagacagtgtagtcttgggctggcatctccactctttgttacctaggtcagtgttctttcctcctcaccctgccacacttctacatcactaggtgattataatgatcatactggccagtagttcctgtgcacctctctatgccaggaacaaggcaatctcttcctttcgttttcccacttagtcctcataatggcctttgggatctgaataaagagcagtatgttattgcagcttcaaaaaggacagttttctttgttggcagacttacagagagacaaaactttctgagttactttttttgtctgaaaagcaaatttgtggggaaaaaaccccaaccctatcttccatccatgacaataggcagtgcattttgggaaaacaatctgtttattgtttctttttaaacacaagaggatggtctttaaaagccaaacagaggcacagccaattttttgacaagtgtttgtgattttttttttacccagaaggaatattcttaattctattgcctttggactttattattcatttgaaagctgagactcttttgtgaacggctgcaagatggtcatcactgaatttgttggtgatattcctcagggtcaagaacaatactggagaaggtcttaaatgaattcactcaggggacttgaacaaagatggttttttcttaataagccaatagaaaagtagagaatattataggcttttaaagtctttaaataactagcctggagcttttgttacccattcctctatccattaaatttcatgtatatttgttttagagttttagcctgtttaaataacaaggtagtcaggacacatatacatagttgcattcactcattcatttattcagcaaatatttaataagtgctttctttgccaagccttaggccagatatttagaatatgatgatgaacaagacaaacaaagtcactgttcttctagaggtcacaggccagggatgaagacaggcattaaacagattatcaccaagataattaattgattaaaatttagatggttctatacgtaaataggatgctaaaatagagtaaataatagaagcccctaaattagctgaatagttaaggaaggatttcctgaggaatccccatgtaacctgaaggaggagttaaccaagcaaagagttggggacagaattcccagggggaagagacgtgggcagtggggagagagatgatgcagagaccctgtgatggtggggaatgtgtgtcgggataaaactggagtggagtggcaaaggcaccccatagcatgggataaggccagagaaatactagcagaatcaatgggaagccactgaaggtctccgaaaggcagtgacttaaagtccacacgttaaaaagatcactttggctgagcattagggaagaaggtgtagggttgagaggattcacagggcagacgtggcagccttgcagcacacaccaagttgtggctgtgaactcagaggggggttgtcctcactcccttttagaagatatgcttttccagatttctacacgatctttttaaatttagagtgccagcgtgatcccatgtcgcttttctttcctttttacttggagttttattttcgtgaaagtgagagaaaaacattttgtcgggatgaaacctggcattgattgaatagttacggagtttcatatttaactcaaactgtttgaaatgcagctgctgcttattataagtccagagaaacttcctgggtggcaggaagttgagggtggaggaaagctttgtaatcaccaagtaatttgaaacaaaaataactttgatgcagtaaatgaaaatgccttggaccacaaggaccagaattcttctggaatatgtgtgagtttaatgaaagaggataggggctttggtgaagaatgccttatattacatttgtattttttctgtctagaaacaaatgagagttttgagtcctgaaccataaccatattcccccattcctacctaaaatgtctgtcacatggggcatttcttgcaagatggtttacatgggaaaagttaaaagacacagattacttggccaaatttcacggctgttgtttcatgtgtctgtaagatgaaaatgcctgtcattctgactatgagcaatggattacctgtcaaagaatttgtcatttctttctttttctgaaaacatgcattttttccattgcctaggtattccctgtcaacgatgagccaccagtcttaaaggctgacctcatgcctgtcatgaattgctcagagggaggagaggtggtcatcacctctgaatacatttttgctactgatgtggacagcgataacttgaagttgatgtttgtgattgctcgcgaacctcagcatggggtggtgaggagagctggagtcacagtggatcagttctctcagagagatgttatctcagaggccgtgacatacaaacacacaggtaagcagcagcatggtgaccagtgagggaatgcaagcaacatgagagtctccactcctcagtgtgggctcccataatcaaacagtcagaatggttacttccattaaaaacaagaagcagctgcagcctggcctccatttttccagcatgatcaccatatatggaagtatttctgattgtgttattataacgaatttcaaacagcggagaaaggcagatattacttgctttgttcctgacgctaccacacagaccttccattcaccctatgattctccttagcgtttttggtcagtttgatcatcgtagttggtgggtctataaatcatgacagaaatgcctgaagcaagctcctaaggtaattacattattaatttgcaaagcttactgatcaccacctagctcctaagaagcaactggtctgctttttgagttcctgaaaagtaacgataatgtcttacccagtatatgacttgcccacagcaaatgacagcgtgaacacaggttagatgtacagaaaatgttcatttattagcactgcagttacatttttggcattgctttatgttgtcacccaggtggcatttgttccactaaaaaatattaattcaacatctgatatctgtaacttatagcactaagcactgtggggtacacaggaatatgacctagaccctgctatgaaagactttgaacttaaatgggtagacaaaacccatttgcatgcaaagatgacagtgtgactgacactgacacactgcacatcatcacatcatctcaccttgcacatcttctgaggtctgggttggggaaacttccttggtaacaatgctgcatatttcatctgctggcttttgctgtactgtagtgcaatttcctgtctactcatccatatgcctctttaaactgcaagttccaatgcaggaagtatgatcaagtatgtaaggccaggtgagtggtataggaaataagaactttcagaattcaaatcattttcttatttgaagagattcaagcagtgaggcatgaaataaattcaaggaggagggatggagatagcaaaggattaattcagaaatgggagaaaacattctgaaataatatttgtcctatatactttggaaaacagtgatttattggaacaccagatgtctcgggacattttaatcacttcaccagacatcttttttctttaaatggtatctctctatcctcttatctgtgtttagtcttaggaaagctttcctgggtgattaccttgtcctgaggagcgtagttcgtatgtttgatgtccctcaggagttcaccactaggtactcatttttgatttccccagtggatctgaaatagactggcagaaaagggatccaaagaccaatgattgttatttattgcttaattatttaacatctctggcaggctcatgcagcacaggtaaattaggggtgagaagaatctgtcttcttttccagtgccttgttctaagtgctaaacaacaggtatacaaatttctaaatctcctgtagtgtagcagccatagacgggactattaactaattttttttaaaataaaacccagtaggacattggggcaaattatttcaaatagacggcttttggttatgttactaagttagaaggaatactcgattcaaagggtattttggtatttgaatgttaacgttttcttgtaatgattactcacttattcaattggtagttacccagccctgggctgagatcaggataaagaatcacagcattgtaggatctgaggtttcagtgagttttctggcccttctcttgcttctacgtgttgatttagaggccacctaagaataattttattagcattactttatttgctttctataagtataaaaataatacacactcattgcagaaaacttggaaggaatggaaaagtacaatgaagtttttaaaaatcaccttattacatatctaaaagagtcactgttcacatttcagtattatagtattttattctctttattctggccataattttaacatagttgcaattatgttgtaacatatgcagctttgcagattacttttatcatttagattatcacctgaaatgtttattaaaatatatattaaatgttagaaagttattataaagatgttttagtaatagaataacatcttactatatgaaagtccattaataatttgctattccccaattaacattatctggtcccagctacttggaggctgaggtaggaggatcgcttgagcccaggaggtggaacctagagtaagccaagatcatgccactgcactccaacctgggcagcagagtgagaccctgtcttccctcaaatttttttttaataacactatgattaacatttttaagtaccaatcatgtccttaggctatattccatttcaaggtaaagaatttcactacctatgttgtaggctttttagtggcttaatatttggcctgctttcccagctatttctgtaaatatatcctatgcttccattatagagaaattgtggttactcaatttgcaatttgccttctctgtttttaaagctgtcttctctttctagagtgacttttcatttctctcccccattgcctctccctacagatcttctatcccatctgtcccaatgttctaccttatctgcttggcaaactcttactcatcctttaatgctcagcacaaagccagcaaaggcatctggaaactttgctgactttccttggcacgtatgccctgcccctacgccattgtcagctaaaactcatcttctttcaccctcagcaccttgcacacgatcaggccggaatacataaaattgccatttaacaggtaaaaaatggtttaatagtagcaatttcatgtgattctacataatacatacatacatacatacatacatacatacatctgtgctattctaaccacactgcatttccttctctaccattagacagtatcggtgcctgacgcatagtgtggtcttttgacatttgacattcttttgaaatgtcttttgaaagttccaaaatgtgtgcctttttctctgctggtgtgctggaaacactaattatcacacagtaggtgttgaataaatatttactgagtgaattactaatgaacacatttttaagccagtttgcattttagatatatgaataggtgagaggtctcttatttttgactctttctcacattgacggctgattgtttctttctaattctctcaacttcaattcggtttttccttttaagcccagttttctcatcctttgaacacttggttgctcaataatataatctctagattttccttgtcatttttaaacgggaaataatggcaaccacagagctctgcagatttgaccagagtgtctgctgaaaagggaggatgtccctgatcttttgtaccctaggttcatcaaaactccaagcattaattcctccctgtattagtccattttgaggctgctgataaagacatacccgaaattgggcaatttacaaaagaaagaggtttaatggacttacagttccatgtggctgggaagcctcatgatcatggcagaaggcaaggaggagcaagtcacctcttacatggatggcagcaagcaaagagagcttgtgcagggaaactcccatttttaaaaccattggatctcatgagactcattcactatcatgagaaaagcgcaggaaagacctgcccccataaattcagtcacctcccactgggttcctctcacgaaatgtgggaattgtgggagttacaattcaagatgagatttgagcgggggaacaaccaaaccgtatcactgccttcttgagattttcatggtgatgcatgagaattaccaacagcacatgtgcaaaacttttctgtgtcctggatagcaagcactcttactccacgctcttagtgggtaacccaagagcagattgccctgttgctgataaactgtctaatcctgacattttgttccttcttcctgtcactgtctaaactggggacattttgaatcctacagatgtaagacctaaacagtgaaaagaagaaaatgaaaataaatgcctcttcttttccacagactgttgctatttttaaaaacatcctggctaatatataataagaagaatattgaaagaaatggcaaaaatgtggcctacttttgtatttcacctattcaacatcctcgtttctcataactgctctgtggttgatggttgttcatttaaggtggttaatgtaaatggaaagacacttaccaaagggaaaaggttgccttctccctctccctgaggttggtcataacatgaaatgattataagggaagaatgaaaccttcactagtgaagctttgtgcccttgctcattcataaactgtcagacccttgttggcccagttttgtccctccttatcatgatagatggctagtagggagttcaccagaggcaacagatgggcaagaatttttgcattattttcatgactatatttaatttcatagtgataaaattgggttttacatttattttatccacataacttcttttccttgctgtttcaatgcttgtagaagaggtgtgagtagatttcatcttggtattctatattttttaaaaggcaggtttcagctatagttgtgtcttccaggtggcgagattggcctgatgccttgttttgacaccattacattggtggtttcggatggagaggctggcccttttgtgaatggctgttgctacaatggacccaatccatctgttccacttcatgcgtcctttccagtgtatgatctcaacatcacggtatacccagtagacaaccagccaccttccattgcaataggtgacaatgtgtttttttgttccagtactattgtctgacctagtgtcatacctgtggttcagtgaaataatacatttcatttatagtctaaaaagaaaaccaccatatggaattgtccttcaataattacctcaacacaaattttgtggaaaacccaaatctgttaagattatggggcaaaagaatttacatgtttaaaaattttaatatttctgtatggagagagaatacgtgtgttggggtgtgtgtgtgtgtgtgtgtgtgtctttgtgtgtgtgttgggacaaggacaacattgcaatcctcaaatattctgattttatttcacatgggaaaatgtaatttgcttgctgaagagagagtaatttattttatccataataatttctattagaacagagtgagtataccggagagaccatttatatacatttaaccttatttgctttttagaaagtcatcttttcataggcattatgtatatgttctgtctctcagaaaaaaatataagcatacgtatgaatgttattgtaatttgcaaactacctcccaagcagtgttctggaaagaaagcattatcccagcagaataattaagcatcaagccacgaaaaaactcttcgttatgagcaattcataatagctctcaggcaattaacgctctgacaaacagaggtaccaactgatcttgaagagtacataaactacgtttagtggcttaacattaaaacagttgggcaattcttactttcatttgtcacttccatagagacacaagggaaaccagagttccttgagaatgactaaagggctgtgctggaacagttagtatttctgctggctttctgttatcttctgacttgcctggacaagaaaaaaatataattccataggtcaaagtaaattcactcattaccactcaagattttcactttaaagagaatgatgccaaagaaaatgaacatctcccatggaaatgtttttgcacgtgggaggcttctctgaactagaatttcagtcactgcattttgtcctacccagtctgtttagaggatttcatgctaagttgtaattgtgtttttatttgtatgcaggtcccgtgtttgttgtagatgagggctgctcaacagcccttactgttaaccatttgtccgccactgaccctgacactgcagcagatgacttggaatttgttttggtttctcctcctcagtttggctacctcgaaaatatactcccttctgtgggttttgaaaaaagcaatattggcataagtataggtaagctgtagcttcgtcaccagcaatgactcccttccttatatttatggaagcgattggccaggtcatgcttaataactttgtaaggactttcaaaatgtttaaagcaccgggcgtggtggctgatgcctgtaatcccagcactttgggaggccgagatgggcaggtcacctgaggtcaggagtttgagtccagcctgaccaatgtggtgaaacccctctctactaaatataaaaaattagccaggtgtggtggcatatgcctgtaatcccagctacttgggaggctgaggcaggagaattgcttgaaaccaggaggcagaggttgcagtgagctgagattgtgccattgcactccaatctggacagcaggagcggaaactccgtctcaaaaaaaaaaaaaaaaaagtttaaagcaccatatgtattcaatgaattattattactattatagctgatgcttttgaatcttaccatttttcatttaaatttttattctgacttcccccttgcatgcaaatttacttcaaaataaatggaattttacttatggaaaatacaagaataaacattgaagaaagaatggtttaaaaggccctcatagcaacacaggataccatgagagagtgaatctagcgggagctcacaaggtctcattctcacaaccttttagcattttgaatagatattggtggaaagggtgaggaaatatactatgggtgtaacagagagaaagcctgaaatgttgaagcagatgacattaattttaaagccaaaacgtgtcccagatacttaaataggtcttgtatttcaggcaaaaacagaccaaccaaaacaaaaacagaaagcaaagacaaagtcttccaaagacatataaatgattctccaaaccccttttgaagaatgtccattttaaatatgaaagagactgaatataagattaattgcattcaatgttactcagcttttctggtgacttaatgcacatctttaagcattttctctttggatttaagcccatgtcaaaatactaaaacagcaggttagctaattccactcaatccagcaccttgcttgatatgtacctcttcaagtaggcagatgattgattgactcttgttttgcgtttacgtgacggaggtggtctctttttatactcaagtgtgacagagactattcatgcaaaagtagtcatttaatcaagggaaggtctccgacatttattctaagtatctgaagtattcttgaagtccctgtgcatactggttaaaaagtattactcttcggttctccatgcaaattttattcttctgtatgatctgtggatatctgcctttatgttgatggttggctgttgtagcagcccttgatagcaagatacttaggtcaactgctatgatctcttatttgtattactgagaaattgactattattgggttaaggattaaggaccaataacttggaaaaattttttttttatttatctgttccatcttggtgtgctctagattcatttcagtggaaagacatgaacgcttttcacattaactatgtgcagtccaggcatctgaggatagaaccaactgccgaccagttcacggtgtacgtcacagatgggaagcatcactccttggagataccattttctattataatcaaccccacaaatgatgaagctcctgactttgtagtgcagaatattactgtaagaaacatatccaaatgttccatttctcttttatcattttgatttttattttcaattagtccatttacattgctccaagtgcattaacacattgcattggtgaggagtggggaaggctatgttatgtaatgcaatcatttgaaaattattaatcttcctgcctttcctcttttgttggcacatggatttctctggagagcccttcagtaattatgagagagaaaaaaaatctacagatgattccatcgatacctacctccattgtcttgtatcttgcctagggtcggggcttctgaaataataccactgggaagttgtcccttgctcttctctggaagtagtcatggtttttttgttttttgttttttgagatggagtcccgctctgtcgcccaggctggagtgcagtggcgcgacctcggctcactgcaagctccgccccccgggttcacgccattctcctgcctcagcctcccgagtagctgggactgcaggtgcccgccaccacgcccggctaattttttgtattttcactagagacggggtttcaccgtgttagccaggatggtcttgatctcctgacctcgtgatccgcccgcctcggccttccaaagtgctgggattacaggcatgagccaccgcacccagccaaagttgtcatggttttacctgcattccctagagagactactggagagtgaaaaatatgaagtcctgtgtgttacgggcaagcagactttaagcttcgcataatttttttttagataaccatattttgctttcttgtgagaaaatgcatttattttgtagatagctgggcttccatcaagttatgctgcaagaagatttgaggttttagtttaagttattataatccattccaaacctgtctactaatcaggtttggcattttatgtatattgatctaaaatttttgttgtcctaatctcaataatctattcaatctgcaagaaacaaccacacgttttagtcaagctctatgaagaaggatattataacatattttaagttgctttattaaagttcttggagaaaaaggcaaggtcctatttaaaatgttttcataagtataccattgtaagttgaactatgatgccactttaatatttaataagtagggctagataaaagaaaatcagcatccttttagcacaagtatcatatatggcaagtgtttttttgttaacacatgttcaataaaatgtggttgcaggagggtgcccttcaaagtcagtaagagagggtgaaatgaaaggatgctttaggccaggcatggtggctcacgcctgtaatcccagcactttgggaggctgaagcaggaggatcctttgagcccaagagttcaagaccagcctgggcaatgtggcaaaaccccatctctacaaataataaaaataaattttaaaaattagccaggctggtgacacatgcctatggtcctagctacttgggggctgaggtgggaggattgcttaagcctgggtgggtgagtgtgcagtgagccatgattgagccactgtactgtagcctgggcaacagagaagactatgaggaaggaaggaaggatggaaagaaggaagaaaggaaggaaggaggagggtaggggaggggaggggaaaagaaaaagagagaaagggaaaggaaaagaaaaaagggagggagggaaagaaagagaggaagagaggaaggaaggagagagaaagaaagagaaagaaaagagaaagaagaaagagggagggaggaagggaaggagggaaagagagaaagaaagatgaaggaaggaaggggaaaagggagaaagggaaaggaaaagagggagggagggagggaaagagaagaagagaggaaggaaggaaagagaaagaaagaaaagaaaaagaaagagaaagaagaaaagaaagagaaagaagaaagaaagggagggaggaagggagggagggagggaaagaggaaggaaggaaggaagttttcacaaattcaaaccatacatgtccttcaaggcttaattgccttctcagtcatgaaaacatcctgatctctgcccttttgtgattcttgtttatgaatatctagcagcactagacattttcttccttgagttatagttattgatggacctttgcagtcttacctgacttgggttgttgagaatactatgtagcatagtaacattgcagattaccaatatgcatgtgtagaatttatatactcttattatttagattttgctatatttcaaaatgggcaacagaaatacttttttgttctctcaatcctcgtgagaaaaaaagattgaatcagctaagtaacatattgtcaagttctaaatgactagatactacatgaaatgataaacatttaattgtctttgtgtttaaaggattatgaaacctgaagtgggtgtgagagggaatgggaagagtagttcaggaaatttggaagtataagaatgggagggagatgagggacccattatgaaaatatacataattatgcatccagtagcatcctttggcattgttgttgatttcagtggaaatacagaagtttttactgcgataacaaaaataaaaaccaccaaatatgcttagtgtatgtagcaaatatttgtatcacttataaagcagatggaaatgtaagacttgtagaagcaaggagatccacgaggattggtttatgaaggtgaaggttctagattcagttttacaactgaacttttccatgacttcttgaaagcaaacaccgtcttggttgcatttttcccctgacctttgacttatgaacaatacatattttaaaaattatatgtcctttgtccttcatggaaatgaataaagtgctttgaaatcttcagaaaaaaatgtaagggagattaatagatctgttacttcctttacattcatattaaaccagcaatttctttttaggactcatcctatataaatctcatagaaaatttgaagtaggatatattcaagtgatttctttaagcagttttccaaagaaagacaagttgtcttttatgcattgttgacttttctcatgtgttcttgctcaggtgtgtgagggtcagatgaaagagctggactcttccatcatcagcgctgtggacctggacattccccaggatgccctgctgttcagcatcactcaaaagccacgccatggcctcctcatcgatagggggtttagcaaagacttctctgagaataagcagccagccaaccctcaccagaaacatgcacctgttcacagcttttccatggaactcctcaagactggtatagcatgttccacttccatgcatttgttattgttgattgaataatttaacccatacttatatgtgaaatctaaaaaggtcaaactaatataagcagagagtagaatgatggttactagaggctgagggtgggaggattggggagatgttggttaaaggatatgaaatttcggttagacaggagaagtaagttcaagagatttattgtacagcataattaccatagttaacaatatattgcatacttgaaaattcctaagacagtagattttaagagttctcaccaatcaaaaaaatgagtatgagaagtaatgcatatgttaattagcttgacttaaccattccacagcgtggccgggcctggtggctcacgcctgtaatcccaaaactttgggagacgaagacaggtggatcacttgaggtcaggaatttgacaccagcctggccaacatggtgaaaccctgtctctactaaaaatacaaaaattagccgagtgtgatggtgcacttctgtaatcccagctactcaggaggctgaggcacgaaatcgcttgagcctgggaggcagaagttgcagtgagccgagatcgtgccactgcactccagacttccagcctgggcgacagagtgagactctgtcaaaaaacaaacaaacaaaaaccaaaataaacccatttcacaatgtatacatgcatcaaaacaccccattatatatcataaatatatacaatgtttatttgccaattaaaaaataaaaattttaaaataatttaacctagaaaaggtaataatacatcacagaaataggggatgaagaaatagcattcacctactttattcatttgtctctcaagggctctctctaggcttggattaatgtaggacaggaagccctaggtagaggtagtaggtaattgaaaaggcaacaacatgttttctttcacttttagactaccattaaaaatgatatttgagtttttattgtattttcactcaaacatttaatgctatagtaaaaaaaatcctttttaaaactattgagatcatgaaactacagtttaagagactggtctgccaaaatttccacagttgaaacaaatatagaaccacatataataatgctcattattttctgaggggataatttactctttagagaaatggcacattgcatagcagcctgaattattttttaattactcttttaaaaaattcaatcttatcccacttttcacatatgaaaatacttttaaaaatctgagaaaagtgtgcggttcctgaattactgcttcctcccattctccttccttaggtgttttcttttcccagcctgtaaggtccttccccctcctttgccaggctagccaaggctgtgccttcagaacgcacctttctgttaacctctgcttgagccccacccaaggtctccaaaccactccttctctgtgcttgtttcatcttagcacttgtttaacatttttccaacttcttttagttatttgtttccccaactagtgtgtaagctttctgccccaaaggtttttttgtaattgttgcaaaaatcatctcaggtttaaatttaaaaaatgcatttataaccaaacactgcatgttctcactcatagttgggaattgaacaatgagaacacatggacacaggaaggggaacatcacactctggggactgttgtggggtggggggaggggggagggatagcattaggagatatatctagtgcgaaatgatgagttaatgggtgcagcacaccagcatggcacatgtatacatatgtaactaacctgcacattgtgcacatgtaccctaaaacttaaagtataataataataaaaaaaaagaaaaaaatgcatttatatatttctcagcttttatcaattgcaaagaaatacattctaggacataaatgatgatattaccaaatcaataaaccacatgctacaaataatagaatacattgtttaaaatttttttttcaaatttgaccaaggaaaaaataataataattcaaattttactctcaagaaagtcaattttttaaaaaataacatttgttggttattatctagttaaataagaattatatgatcattgtgtacagtttggacacagtcattttgaagaaaaaataaaaatttcctacataaaaattagtatttgggttgatattttggagactttctcagaaattagattttcacctctattttatctgtggttcatttatggctacattttttaaaaactttagcatattctcataaacatccccccaaacaaatatacaaagtttataaaactcttcccatattatgtaatctgtttttcttcttaccttttttttttttggagacagggtcttgcactgtcacttaggctggattgtggttgtgcaatcacagttcactccagcctggacttccagggctcaagtgatcctctgacctcagcctcccaactagctgggaccacaggcacaagtcatcacacataccactggctgatgaaaaaaaagttttgtagagacagggtctccctgtgttgtccaggctggtctcgaactcctgggctcaagtgattttcctgcactcgccttccaaagtgctggtattacaggagtaggtcaccataactggcctcttcttacttttaaaacatggagaccgggtgtggtggttcacacgtgtaatcccagcactttgggaggccaggatgggtggatcacttgaggtcaggagttcgagaccagcctggccaacatggcaaaacccagactctattaaaaatacaaaaattagccaggtgtggtcacacctgtctgtaaccccagctacttgggaggctgaggcatgagaatcgcttgaacccaggaggtagatgttgtagtgagccaatatcatgtcactgcattccagcctgggtgacagagtgagactctgtcacaaaaaaaattgttattattaaaaacgtaacttttgataattaccttataaaatcatcatatagacttattatgctgtaattttttaaaagagatgactttgtcacccaggcttgagtgaagtgggatgatcatagctcactgcagcctcaaattcctgggatcaagcattcctccctgcctgagcctcttgagcagctatgactacaggcgtcacctggctagtgtttcaaaaaaaaaattcttttaaagacaaggtctcattatgttttccgaactggcctcgaactcctggcctcaagcgatcctcccacttgagccccgaaaagttgttaggactacaggcgctcaccactgtactggctcctgtgctgtaattttatacaactatctttaaaatacaactttaaaatattttatacaactttaaaatatccagatagttttcagtttcttgatattaaaacttatatttcagtaaacattttatataaatctgggtgcacatcttctagcattttagtagctttgaagtaagttttgaaaatgtgaaatgttaggcttccaattttgttctttttctaggctgttttggctgttctgagactcttgaatttccatttaaatgttaggtagatttaaaaaaaacagttacattgttaatatttaagttttgacctattaagaattcattttgatgattggctcgaggtagggatataactctataattttccccaaataattaactttctcagttttatttaaataccctgcacctttgtttatatagtttatttaaaaatatattctttcctaactgattttaaataacacccttaatcaaatactaaattatttaaataaaaagtctttaataggctaagaaggcactcttttacttcataaaacaagtttaatttcaccctactgcactgataaatgaactcttgctaatacccctgccttgaaaattaagacattatctgtgacatatgtcatgatggttcaatcataaggaagatttacttattttttttccttcttccaggaatgaggttgacgtacatgcatgatgactcagagagccttgctgatgattttacaatccaattgtcagatgggaaacataagatacttaaaaccatttcagtagaggtcatcccagttaatgatgaaaaaccaatgctgagcaagtaagctacctgaaaagagtccctttcagatttctatacaattctatgaaatctacaatactaggtacaggtgtgtgtgtgtctcccaaagaagcaagtcttcgctagctcctgtcacagcttgcccctgccactcaggcatgaggaacctttagtgcaaatgttagttaaggtaacctctccttaacaatcagccgtttaattacttgattttcttctaaacatactaattagttgtaaagaataagaatgactgaacacacagtatggaatgaacaatctactaaacatataaatacatgcacttacaccaacgtgactgcacacctaccaaagtgcaattaatatatagattcaactaaagtctaataacattaactgcagacagtccttacaacagatttgctgaaacttgtaactaagcgtggcggagggaaataaatcaacccacttctttcattatcttggtacttttttgtccaccagttctctactgtgttccatatgggtcaacaccccctcccgcctcacatcgaaatcatcattttctaaaattctgagcgatattattcaattgtaaactttctcagtatctccctgtattagtctgttctcacactgctataaggacatacccaagactgagtaacttataaagaaaagaggtttaatttactcacagctctgtagggattgggaggactcaggaaacttacaatcatgacagaagaggaagcaaacacatccttcttcacatggtagcaggagagagaaaaacaagtgcccagtaaaggggaaagccccttataaaaccatcagatcttgtgagaactgactcactatcacgagaacaggatgggggaaactgccccacgattcaattatctctacctggtccctcccacaacacatggagattatgggaactacaatcaagatgagatttgggtgaggacacagccaaaccatatcactctctctgtaagtgctcagagtttgatcatagggtatagagtattcattagttctatttctatagccccagccatttcttttacaattggcagctatacagaactgtacacagtctacagaactgaacagagttttaggggaccaactcttctctagagctataagtaaaaaagcatctggttcttggaacctccttgatgacttcacctcttttttcaatagtgcaacagtaagagacatgttgtagatagtctgggtttttatcagggagtgaataacttactgaaagcacccaaaccccccaaatctcttccactctgcagaaaggagggcctcaaacaagtcccttccttatctgccccatatcctgctgttccctatgagccactgataaggttcttaaaaagcattatgggaaatactgatgatagatttttggagggttgcatctcatacatcagtttgtctaaaagtattcaccaaaaaatttctattttcttatttcttagctaatatgttggattagtatagcctttatttataaatatgaaaatatgaaggctgtcatagtattacagtacctcctttttgatgatctcattttaagaggcagggaggtgaaagctggcagggtgagggccccggggcatccactggagaggggtaaaaactggcatttattaagtgcttactataggacagacagtatattagattctttcacatatattatttcattaaatcctcaccaaaattgtggaaaatgcatattattatcctgactgaggaaaactgagaccagagaggtaaaagagcttacactaggcacccactcaactccatttgactccaaaggccatgctcttgttactaaactcactggaatagctacatctacagaatcatcaaacctccttcaaccctgcttcaaaaaccctcccttttctgtgcttcctctttccttctctcctgtggataggaagtaataacactctctttctcttccatgtgtgtccttgggcatatcacctctttccttctcccggaaactgctccattattttttcctccagtatcttcagtctctcccttttcatttcctctgttaacaagacaaagggatatggattgtggttaagagagcaaatgctggagtcagattgactcagttcagccacttaccaacagtgtgatcttgaacatgttgtttaacttctctcaatctctctgttaacctctctgtaaatgaggacaatagtggtatcctcttaataggattgttgcaaggattaaataaaatatgtaaacatgcttgaaagactagctactacgtggtaagtgctactaagtgttattgttattattacaagcagatatcctaattgtaaaaatacaaagacaagctagtcccccattcatttcactgaggaactttttggaagagttccatttctgcccactttctccaatctccactttattatttttttctttctttcttttctatttttttttttttttttttgagagaaagtctcgctctgtcacccaggctggagtgcagtggcacgatgttggttcactgcaagctctgtctcccaggttcacaccattctcctgcctcagcctcccaagtagctgggactacaggcgcctgccaccacgcctggctaatttttgtatttttggtagaaatggggtttcaccatgttggccagtatggtctcgatctcctgacctcgtgatctgcctgcctcagcctccaaaagtgctgggattacaggcatgaggcactgcgcccggcccaatctccactttattaaagatgctcccttaaaagttactcttggctttcccgccaaatctaatggctcttctaaccttcctggactctttgagagcatgtaacaccatttctttgctattccttttagctactgtagaggatgctttgggtcctgcagatcacagcccctcagcccatctctgattctggtcctgatcgtggtggaatttgccatgtcagtgtcccacctcaggtgtccgcagtgcctcactccacttttctgcctcagggctttcatgcagcccatgtccatgctcagcagagagcactctggggacagcccttaacctcgggagctagtagataagataaatgctccagcttcctgtccattaggagcacagtttgaatcacatctatgtggttcctcaagatacccagcaggattgagccccaattccccatagcagtaaaacaccctttgttgcctttttctccttccctttctctcctactccctctctcctgcctcctggaatcacttcacaaataaattaccttccttgtcctaggatccttttaggataacctagattatgacacaccttgtcctgtcttggcttccagacattgaattctgacactgaattgcaaacatttcattctgaccagaaatttaattctgaattcttcctaccaaactcttcatcttcttaatgacattggcttcccgttttgattaatctgtctgaccactaatctccataagccctcaaccaactgattgcttagctttctggaataatgggattcccattctctagtaaagaggtgtgcaaatgtcaccacccactgcgagggaagatgtcagccctgggtagcaagatactcaccctgagtgaaagttgttggaactgaggtgttcaggttttggcatctccgcagaggagcataacactgttgatgccagttgctggttctcaagtatccttcatctgaatcccaagaaattcaggcatcccaatttttctcagaaactaagctgtaaagttggacagagttaggccccacatgatgaccacaactgagagctagaaaccctggtggaaagagatccctttctcactttggcgagaccagggacaatggccatataggctgtgaaggcagcagcaccgcacagtaaaggagctatagaaaccacagcagtggtggctctggtaggatcagcagcagctctgccccagcctactgttcaagaagacaggagctgacctggcatctgtaacactgggaaaagatgaatctacaacaagaacacatactacccagaacattacttagaagaggaagagtaatttagagagtcccagattacctaactatcacctaactcagaatggcatatcatcaatggcactggaacatctgtaggccagtcaatgaatctctttaattgagtttctgtctgtaaaattagaacactcatacctagccctcttacttcatggagctgttgttgtgagtgtaaaatgaaatactggaaacaagatcattttatagaataaattataacttacaaaattgtaaagtttggtacatgtaatcaattagaagtgcctaattacctcttcccacattcattagggctgacccattgtcttttcagactttcacgtgtgagggtagagagcctgtttcattcctctcactagtcatcttcagtgctttgaatattgaatgtcattccttaattgttgaagattgggaactgtgatagtcaatataagtgtcccctactaaaggaatatcttctatttttatatcaacccagacatttttctttttacaggaaggctgaaattgcaatgaatatgggtgaaactcgtattatttccagtgctattctttcagccatagatgaagactcacccagggagaagatttactatgtatttgaaaggcttccccaaaatgggcaacttcagcttaaggttagtgacttcttacttttatttttcaaaactaacgtagcaggtataaatcttctcaatatacacatttctatgatgggatttattctctgatagacatatatttgcctagaagtagaaaatttaattttactagttcagggtgaattcatgctgttctaaagtctttgtcaacatggggtaaattcaacaaatattaagattcttcattgctccctctcccgtaggattatccctaaattctgagggagggaattactggggtaaaccaagctgtctgctttctgaggataatccaggatcttttgtgatatcttcatttctaccagatttttgacttgtgattcatgtaactttcctctttagcatccatcatctcaattataaaactccttcaagtctacagtctttcttgttctctcaatctctctctctctctgtgtgtgtgtgtgtgtgtgtgtgtgtgtgtgcgtgtgtgtgtgggtgtgtgtatttcagctaaattctagatcattctcaggaaaatgaaaactttcattattttttcatgataatcaggtccaaggaaacttggagggctgcctctagctcctctggccctaatgtctctgttaaaacattatctgaatcccagcactttgggaggccaaggtgggcggatcacaaggtcaggagatcaagaccatcctggccaacgtggtgaaaccccatctctactaaaaatgcaaaaattagccgggtgtggcagcacacacatgtaatcccagctactcattactctgcaggcggaggcaggagaattacttgaacccgggagaggggggagaggttgcagtgagctgagattgtgctgctgcactccagcctgggtgacagagcaagactccgtcttaaaaaacaaaacaaaacaaaacaaaacaaaccattatctgagtattatcacctcctgccttctcaatgatttgccacagtgagcatctttctttctttccttccaattctcatctttgtcgctgagcaggggccatccttatgtcttctccagggagactacttactccacaaacaatatgccaaattgttctgtattctatctgacatgaacttaaaagacgaaagttcagtgtcttcatcccactgcagtcccacctccccttgcagcaccagaacccttattgtttaggttcagatgggcaaagtcttggaccaaaaaggcagtgtgggagaaaacttcacgtgggagtcatcccatcctgctagcataacagattttaacaactgccaaatttgaatcccatgaactgcatgacaccgtaaattaacattcctggaattgtatatgttctcaaaattagatgctttaatggaaagcaaataagcatggaaacaataaagggaggattctaggggtaggtcacctgggttttactgctaactcaatagcttgctctgtgatttgataaaatgtccttgtttcactttaggcctagaatagcaaaatttcagtctgattcagactgtgtgcatgatgcccaaggatcagcccaacgtgaattatatagatcagtcacctgagaaggtcagttgagtaatcagtccaaatgtttatttcaatggtagattaagactagcaaccacaaccaccaaccatccccattgcaattatttgatggaatgcttaactttccatctagtggaggcacagtcctagaaaagcagcaagaattcattctatgtggaacagcttgattgtcatagattgtaggcaccatagagaatcagagtgaagagcaatcactgatttaaattgaggtacagctgtgtccttatttcatttcaaagagtaatgaagcagaaatgcagtgagagctcacacatttgggtggcttgggaacggaactgttttggatatgtgaaaatgcagatgggtccaggttcccagtatggctccacacagttctctcccagctccctagcagttctccgagtctttccaagaccaaggaccaggactccagccctcctggactctcccaagagttatcgttttcttattgacttctcttagttttcgccatcttgaatctgacttttattttctttctatttctgggtcttcaaatgattttattaagtcagtcttacattttggagtgcaagtaaggaattacatggagacaagagagaggaaaagatgtcttcttctgtgcttacttccttagacaagattagaaaagggaaaatgtgaaatacaattgcaggctttcccgtttaaaacctgaaagagtctgttttaaaaattatattggcaaataggtcttatggaaacaaactctagcttaattattatgatgtaattaacttccatccagtgagcgtgagggcagaacataagtctacaaacatcagatggataaacatattaaagagaaagaaacgttatcaagtagaatgacataaaggcaagtggtagcacaatggcaagagaggaggacaaagctcttttgccaggaactgggagtctgtggaatctggaagtctgtattctatctgacatgaacttaaaagatgaaaggtcagtgtcttcatcccactgctgtgccacctccccttgctgtaccagagcccccattgtttaggttcagatgggcaaagtcttggaccaaagtatcaaggggaataaaaagtaaatgatttacatttctgttttagactcttaaatgagacagtaaaaccacaggataatatcatataataaattttaagatgactttaaaaaattatgtctgatgactttttatgagccattcctagggaaagctatgtaccttaaatgaacaataataggattattaataagataataaagatttatgattacattttctaacactgtcagttgttagccacccccctcagcataagaacctttttaaattcaaaatgccacaatttctgcatcaagctctgtacaaaacatatgcttaaataatgttggcttacttttagaagattctgataaaaacaatatacgatatttgcagtttatattttttgatgacttaggatataaatgtaggtagtgatagtgatccccatcattttctttctttagtaaggctggaaacatactggggagtaaatgcatctgttctatttttgttctgtctacttcagacaagcccagtaatgagccatgttgaaaaaaagtatatttgactagttgaacatgaaaagaactaaaaaatggaaactctgaaagaaatacatttaatttctaaagaatcccttccaagagctcgattacccacctcctcttattaattggaatattcaatcagctatggttgcttatgaggaacaccttggaagtaacaatgctgttgaattgtttgacttcgtctgaaaccctttggttgaagccggtgtttttccaaggtctcaaattattctaatatatttctttgaaaagaaaaaaaaatcaggtaaagtggcaaaaagtagtctggaatttccctgaaatattatttatattggaggtttttaggggatacagaaaatgtccactaacgtacgttgggggaaaagaaaaaaccatgagcagctgactaactctggctccttccagatagggagggactgggttcctctctcccctggcatgaaatgcactcaggaggaagtggatctgaacttgctgagatacacacacaccggggcaatggattcccagaatcaagatagcttcaccttctacctttgggatggcaacaacaggtcccctgctcttgactgtcaaatcaccatcaaggacatggaaaaaggtaaaagcacgtctaccaaggtttactgggatcaactttgctaactggtataagtattccacattcgtttctttctctctctttccctcccttctttccttttttcctgccactcttcatctttgaaattctatcatttgtgtttagatcctttggcttctcacctgctttgcctgggacctatgtggttcacagaagtagccaatccattcgttattttaaaaagtttattggaaattcagccttgcacacaatatggctatacaggctactttaactgttaggatttttttgctttaagtaaaattttaccaagttgatgtgtaactctagttttatcttcaggaagtgatctatcactggaaaatggagtttcaaaggaaaagtacttctaaaacaataaaataataaatgaaaaatacattttaaaatttaaaaataataaagataaactttgtcattagaaaggctggaagttgctgcttctttcactttgaaagtgctaacatatactctttagggacaaggaaagacactataagatcaacttcttgtgagttaattaagcagagtcagttgtataagtggtgaatgggggagagttaaatggaagatggaggagagtttgtttaaaaagctcagcaaggaagagtagaagctcttgatacccaactgttactaccctgtaattttgcttcagcttatgtgaggatcatatctcattcatctgtattatcccaggatctagatattcccaggatgaagcataatcttagatcctcagtacatgcttgattgactgaatgcttccctttttttgccttggctgccaggaagctcagaggtaaattgaatgcttaagtgcaataataaaaaaaaaatcttgctttatgtgtggcagaattataattgtcctaaatttttaaaaaattaattcagtttgatcttgagatgtttacattgagctgtgtaataatatattttatttgcttatttcctggttgtaaatgtgttccttaaagaagtctaatgagtgatttcagataagctagatgttactgtacacatttatctctccctgcaaaacaactatgttcatcataaatgtatgtccaggcaaatcgtaatacaagtaatatattagggcagacaactagtgtattagagtaggccaccttctcattggctcagcacaacacaactttacagtgacataggagagctctgttccacatagtcatctagggactctttatatctagacattcccttattctgaaggccttagagtcactcaagaagtgagatatggaagaaaattaggggatgtcatgcactaggtgtgaaggttgtgtacctctcttgtacacattccagtggctgaatcacagccacatgccacattaagagaggctgggcaatagaaactttagctttgcacccaggaagaaaggaaataaagttagccagtgcgttgccagactctgctgcaattgacatgtgattattttctaaaaggatttttgaaaacctataccgagtagacacattatcctattaacattttcagttcaaattttttcttctttgtttcttcttacaaagtggtgttttgtcactgtacagttttttgttttgttttgttttgttttgttttacttaacatgagttttttcaggttgctgcataactttgtagccataattgtttatctctaaacaagactatactaaagagttagatttaatcacaaccttaaagttgagcatttggttgtttccatttgggagctattataaataacattaagcttcccaactgctgtgttgctgtgttttctgatttgcacagtggcagaaatgatgttgagatctttcagataagtttaggaggacattgtctatagttgactctaacctacactctgcccttacagtgctgaaaacttgcatcaaggcaagagctggttgctcttcctcccctcaggtccatttcctgctcctggtgaaacctctcgtgggtgctttgtgtttcccccacctaattcattcttcttacttccttgatgtattcatcttgcttctgtctgtagcatctgtggctaaggttttgatttaaatttagaatggtctttgattctacgtaggactgaagttgcaaagcattttgagataaaagcatagtatatgaaaagaccaatttagtaatctgaaatagcgttttccaatcatggcaccattgacattttgggatggaggattctttattgcaggtgactcccttgtgcattgtaaaatgtttagcagcatcccaggtctctgaatctagaagccagtagcaactcccagttatgacaaccaaaaatgtctccagacattgccaaatgtcccttggggagcaaaattgcctgtcgttgagaaccactggttaaaattgtaccactttgatggtttatttgtatttcttatttcttcatgaggctgaatatctttaaaaaaatttttttggccactgtgtttttaagttcagaaatagcttggcatttacatcacgtgtttttctttttggatattcaccctttcagtattagttcacaagagctccctaggtattaaagacagggaacaaaataatgcagtgtttaagagcttgtgctctgggctcagatggcttgcgtacgaattctcactcaatgttttattaattttgtaaccacaagcaggtaagttagcatttctataccttagcttcctcatttgtaatttgggcatatgatatgacaatacctcacaagattagtgtgaaggtgtaagggtctttagttctgtacctgacatagagtagaagccctatatttgagatatgatcacttggtaatggacgtcaggtgaacaaaattcaattatggtccctagtttgtgaaactgcatcattggtccatgtgtgacccacttctaccttcctcagtcatacatttaaaaaaaatagtggtgaattatgcataacacaaaatgtaccatcttaaccatttttaagtgtaccagttcatagtgttaaatatattcatgttgttgtccatccaatctccagaattttttcatctcagaaaacttaaagtctatacccattaaataatgactcctcatttccccctccctggcaaccattgtcctgtgttctgtctctatgagttttgctactctaggtacttcatgtaagtggatatcttttcatgactggcttatttcacttagcataatgtccccaaggttcatgcatgttgtagcatgtgccaggactcccttcccttttaaggctgaatggtattacagtgtatgtatatgccacattttgtttatccactcatctgttgagaggcacttgagttgtttgcatctcttggctattgtgaataatcctgatatgaatatggttgtataaatatacatttaaaaaatatatcatgaacatttgtgcaactaccacacaattgaaggactggaatattaacaatagacatcttcctacgttctccagaaaaaaataccattctaaattttgtatttcttcttacttttatcattttctcagcttgctcatataactaatgaatgttaataaactacatctgtgttgttccatgtagctgtagttcattcatttgactactgcatgaaattcagttgtgtgaacagaacacagtttgtgtatacattcactttttgaaaaggcatttgggttgcatgtaatgctttcaattacagacagtactgcaatgaccatttgggtgcatgtctccaagcgtagcagggcaagtgtttctttcaagtacatagctggggtggaattgctgggtcaaggtatacgtgaacattcgactctttacaaaataatgccaaatcttgtaccaatttacactctttccaaaattgtatgcaagactctcttgagctatgtcttcaacactttgtacagtcaggcttctacatccttgccaatcaaaaagttatgagatgacaatttatcatgatatttgtatttccataattactaatgagcttgagcatttaaaaatatctttactggccacgtgaatttcttcttctgtgaaatatctgctcatgccttttggttaattatttttattcataatagttatataaacctttctatgtcgtattaattttgatttttgcacagttttggcctttgtcttctgcctttgccttggacataatgtgttttttgatatgattattgaccataacctcttatgtcatgtaggtgatattgtcatccttacaaaaccactcgtggtgtctaaaggtgatagaggtttcttaacaaccaccacgctcctggctgtggacggaacagacaagcctgaggaactgctctatgtcatcacctcccctccgcgatatggccagatcgaatatgttcactatcctggagttcccattacaaacttcagccaaatggatgtagtggggcagacagtttgctatgtacacaagagcaaggtgactgtctccagtgacagattcaggtgagccccatggaaacttttcaaaccccttctttggattaatacttacagaaaaggagatctgttaatgtgcttcactatagtaaccatttcacaaaatacatgtatcttataacatcacgctgtataccttaaatttatagaatgaaatttgttttttaaaaaaaggaaagaaaaggagaaaaaaatgagtcatttttcagctctggtgcagctgtgtttttcttttactgtcttgttgtatgtaaggtgaagccacacgattaaaatgacagaagcaaagcaagaaattagggcctgttattgaaaaatatacacagtaaacagatctttatgcaagttctgctacgaggagaaatgtgaaaagctgaggctcccagctaaagatagatctggaaaagtcatttccctctttttggagtatgtttttctgtctgacgaaaagggatttattagtaaacatttggcataaacagagactgccttttgacacaatgtgttctggtaactgtatcataaatcatgttgtcataaagtagatcatatttccccatagaaacaatgttgtaattgggggctgcgcacctgttccagaattccgtatcaaataaatcattggaatgaataacaatctggtgaaaaggcaaagatacaacattaatgaaaatctacattcatttaaaatatggaaatttgtttcaagtcacataaagcaagagccaagtccagaagatctataatctcgcagctctcaaagctggttgatcctgaggtcctggagagaaacacagatccccaggccgggcatgagaactgggaaatgttggactttgaacgaaccattgtatacaatccagttttgagttctgtcagttcagaaggaggcctggagagcactggtttgtctattgtacacccacacttttggttcctggtgcaattttcaccacgtcacaatacagtcttctaaagagcactataaaataacataaatggagcatactcctatattattcaatgggttcccataaactatcaagtatcactgtcacacccatgttcgaatatcactgtcctctatcttacttttacctatctaaattcaatatatctgctctgataaacactggttagatgtcagtaaagaggatgctgctcacctttttagcattaaaatgatttttgaaagctgatttggataatccaacaaaacaaaacaaaaaatcccagaaagctggaacgaatatcttatttttttctcttgataagtgtcccttaacaagcaggtaatcatttaattgatcaatattttaactagttcagtctttgagtgttgctaggcattcactaaaatgtgagatgtggggattccttttcaagctggctcttttgtttgagagatggagtagtgaagttaagatacaggcttgggggcaagaactgcctgagtgactcacaactctgtgacaatcatcaggttacacaacctcctgtgctcttgtttcctcttctttgaaatggaatgatgctcgtagcacctgcctcacaaggttgcgggaggtttatatgagcttatgcatgtaaagtattagtagaacaacacctggcacataggaagaactaagtaagtgttagctactactcttactgtcgttgttgttgtcattatattctttccttgacgaccttcttccaatctttacaacaccaagtatgatcttgaaggaggaaaggagttaccaagaggagcaatgattgttctttttttcctgtttgcttatgaaggctgggtgcttcttggcttaatacatttgtatcagatccagggcttttaattttacatgcatttctggaacttctagcttctttcatttcctgcttccctccgtcaatgcccacaggacagtctgctgaagacattagtgactgtcttgaagaaaccagtgaccttgctggagaacacaggactgaatgcataaagatgttcagaaatgaaggttagatattaatcgaatggtgagaataaagaacaaaacctccgtatgaaacgattggcaatactgtaaaaatttcctaatttgcatccagagaaagtcttattagatggcattttagaaatcatttatcccaggaatttctacatttctggatcctcagataattgccagagagaactacaaaatgcaaattcttgggccttaccccagagaggcaactttggtaagtccagtctcaggcccagaaatctgtatttttgaaagatatcttcaggtaattctgatgcagtcaggactagccatcaatagtctggtctagtctgttgttctgaattgttctgaggagcctcaagaatttatggaagttgaggctggggcagtggctcacgcctgtaatcccagcactttaggaggacgaggcaggtggatcacctgaggtcaggagttcgagaccagcctggccaacatggcgaaaccccgtctctactaaaaatacaaaaaattagttgggagtggtggcgggcacctgtaatcctagctacttaggaggctgtggcaagagaattgcttgagcccgggaggcagaagttgcagtgagccacgatggtgccactacactccagcctgggcaacaagagcgaaactccatctcaaaaaaaagaatttatagaagcctttttagggcctcccagagattgagattctggggccttcagcccaatgtactgatggaacttaggtgtgtgtgttgtgtgtgagtgtgtgtgggtgttgatactaaaaacagtactataaataccataaaactaaatataagaaaacaaattttttatgcttgcaagtattcagtttttagtagttaaaaggtttccttttaaatacattgattcaagttaaaaattgaattgatagaaaactagtaaataataagagtacacatagtacaggcatatggcaaaaatatggtttcaattactcaagattaggaaacaaggttttagggagaaaataaacaataaaggctgaaaagcattgatttggtgcaatcccttatttacacataggaaagctagcattgcctgaacacctgcaatgcaccagagaatgtcctggactttttttatatgttatttttcttaagccttatgacaccaccttgcgagagatgcaatagtgttcccattgtacacatgagaaaaccaaggttccaagaggcaaaggaagtcacctaaactgacataactgagtatcactgctgaatttggggctcagagctcatttccagtagaaggttctttccattatacctcgttgtaccaaaaatttgtggagaatatgcatttgtgtgaaggaacctcctcaatgtgtcattctgatatttggccagcagttttacatatttataatggaagagcctagcgtctgcccaagacccaaattttaatcttgtcatttcactaacccaatcacggactgctatgttgtttgtcaagtggcgctaaaccaaagctgaaagcctgttttaatgaaagtgtgatcatggtgctttttaaaaattaaatatatgcaaccaatctaatcacctaaatttatgttgcttgctgttaaatttggcaaggaatttggctgggtagaagagataaattctgtggcagaggattttcccccttccatttttaatgtaagctatggcagcattaattaaatgggggagtttaatagtcagattttaccttctgcaaaaatattttgtgaatcataaatttctcctgcattgtttggtgctgctggcctggaagaaagatttggcagcatgttctaggacagatgacaccgagtgattagcaagctgacttcagctgctggcagccgggtactaaaagaacatgctaatgtcctccattttgacatgccggctggactttttttttttttttttctgaggagctggcgctatttatgattccatttttatctcttaaatgccatgacagatggcagcttcttcagccaactctattgccaggcaatgcagaaagcttgaaagcaccgtggtaatggtgaaatcagaccaggcaggcaccccagtcaaatctgagagttattccccaaatttcatgagagcggtggtcatcttggctgcatctcttctcagggggatgtaacaagggaaattaaacaaaatggatccacagaaggagctgctaccaccaacttcttcacctcagaatggataccaacatagcaatggctttatggttttaaacattgagaatgtatttggaggatttaggggagggggtatttggaagaccatctgattgatcagcttttccagacatgaacagcactgaccttttttcacgtgtactgctagctttattttgactgggaactcaaccgtaaccattcattctgtccctctctctgatgatgtctctctgcctgtgagtagtttgcactgttacttgtgaaagtggaatgatgttatttgatccagtcatgtttagaaattgcatcattttcacccctggcctattagctttaggtcagcactgacagctgccttggtgtcccagataggagcgctggcctcagaaaacatatttcttactcttctgtggtctgtggcccgcgtgccctcactcccatctgtctgatggcaggctgcctgtttccaacgtgggcagatcacgatcttccagcagggaggggtttgagatggacagcctggatcataagacaactgcggtgacctcacagaggccatgcacgcatcgagtagatgtggccgtcctgagatgagctttgaggaccccgtcaggcattcttgcaattcagtctgcagggaggaaagtcagaattagatattcaagatggccgcctctgatggagtccctggcactcactcaagcttgcatttgggtttgttgctcctggtcccatctctccccttctttcttcttccttctctgctgatatttgacatacttttaatagtgcacaatgtctatagctctacaattaatgctaatgctaaaaatacacgtcctttggcttatatttgcgctaaggtaccaatggctgatttaacactctccacagagcacacttgatacagggatctggtaaggaacagagagccagtttaatgtgaaacagggtagaatgagaggtgtgaaacatatttctggagggggaaaatgggaaaaagggaacttggaggcactgagggagcacctagcctccttcctattttattgtgggtcagatgataggatctggggggaatatgaaaaagtaacagaaaaacaatagaataaaggcataactctgttctcaggctctgcctgagaaataaagcataattttatacctaaaaatgtatatcagtttacttttgaaactgtgaaggtgactaagtaaaaagtttgaagaacagacatatttttctaggttcctttattttcttttttaaaattatttttctttttttaagatgggcttttgccatgttgcccaggctggtctcaaactcctgagctcgagcgctccacccaccccagcctcccagagtgtccaagctataggcgtgagctaccgcgcctgacttcctttcctttccttcccttcccttcccttcccttcccttcccttcccttcccttcccttcccttcccttcccttccctccctcccctccctcccctccctcccctcccttccctccctttcctttcctctttttttttttttttttttttttgagacaggttctctgtctgttgcccaggctggagtgcggtggcacgttcatggctcactgtagcctcaacctcccaggatcaagtgatccttccacctcagcctccctagtagctggggctacaggcacgcaccacacccagctaaattttgtattttttgtagagaaagggttttgccatgttacccaggctgatattgaactcctggactcaagccatctgcccgccttggccagccaaggtactgggtttacaggtgtgagccactgcaccagcctcttttattttttttaataaataattgatttttataaatgcctcatgatccagtaatgaaattgcccaatttgttaaaaatatacttatcaaaggtttaattttatgaaaggaaaactgattggtttgttttgagaaaattatgtgattttgctcaatctataattctaaaggtaactgaatacctttattcaaggtgtaaaaaatgctgctgtgggggaaatgtatgaggtttcattctttacaagtcgaggtgtgtgaaatgtcaaaatttactttatttgttgtatttcacttagcaattttaactttttggacatagatttctttttctttgcatcaaatcagatatattttccttgtcaacagtcttattaactagataattagaaaactaaaaaacttcagcatagccttcaaagcaatatcagtactcagccaaactcatctctttttactttttgtctaactgccctccctgagtccgtggtcgcaggcaggctggttgactcgttgctttcacactatctaatagcttcaggtttcttcatgctcaaaaggatcaatgctcaaaccctgaaggacaagacacatttcacaaagaataaagggattgttagtcaaatctgccagatttgtaaaataaatataaatgccataccttctctagttaaaaaagaacttccaaagaaaatatacaatttatatatgtatataaaatttatacataaaaatgttatgtatagtttatacattctacgaaagcattagttttagaggtttttgtatcggtggaatagaagagtgcatcctctacgaatatttccagcaactatggtacatggagaaaagctaacaaggcacaattctgtgattatttctaagtacatttctttggtgtacagtgaatttgtcagtcccattggatagtaacgatttcctaactttttggagttttaatattgtgccttgtttgcataatttcatgatactcttaatcttattgaaataaaaattacatattgtaatgctacaaagatcatttaaatcagtgttattgtgaaattggcttcagtaggtagaatgtgatttcatgatcaatagaatcaaaagcacattaagatatcacaaacctaagactgtaagaaagattttgcttgtctcaaatgtgtatcatttcagctttctttttatagttttgcaatggtgctcaggcaccacaactcttttgtggtggattgctaaaccagaatttgttttaaactctgcaagagtagtgggtgcagggattaaaagacctgcattctagtctcagcttcatctcctacctgcccttatgatctcccaccaactttgtgaacctttctttgaagcaggaaaataatccttgtgtagcataactctcatctgtcttatagggggagaaagtgcagaagcacatgtaaaccataagagattagagcctcccgtcatattttagagttgggtggtacttaatgatcttctggtccatccccttcatttttcagagccatggaaatgaggcctggaaggggaagatgatttaagtgagattacatgtctgagaaatgtgatctgctattaagaaatttaccataaaaacgtatgagtagaatgaattagctaaattcaactcatttagcactttattgtattggcctcccagttgtcagacttacaactttagtctattacacaccaatgaagaaaaaaacaattgaaaaattataaataaataaagggggtatactcttcaaatttgtatgatgagtctcattggatgtgaaatttttatttgcgtcaaggaaccacattaagcactgatgagcctgagaaatatgattgtcagaatttccctgttccatcacatgggtctgtcattaatgttgttgggaaaatattcttgggtgtagaatggtccatttatgcattactctagtgactggtttaatgatagggatttttctgcaagatctgcccttgatttttcatttgagtcacaacacgacaataccctttagtaaaggtgtgtattgttatcatttcattccagtagatggtgacacaagaatccatgctgaaggctgccttgcctctctttaccagattcatcatcagcaatggactgcggaccgagcacggggtgtttgagatcacactggagactgtggacagagccctgcctgtggtaaccaggaacaaggggttgagactggcccaaggggccgtgggcctgctttcccctgacctccttcagctgaccgaccctgatacacctgcggagaacctcaccttcctcttggttcagctcccccagcatggccagctctacctgtgggggacagggctacttcaacacaatttcacccagcaggatgtggacagcaagaatgtggcctatcggcactcaggaggggactcccagactgactgctttactttcatggccacagatgggacaaaccaaggctttattgtgaatgggagagtgtgggaagaacctgttttattcaccattcaggcaagtatgaaaaacacagttcatttgccagagatgtgaaaacagtgacatcgagaattttttttttttttttttttttttgagagggagtctctctctgtcacccaggctgcagtgcagtggcgtgatcttggctcacttcaatctccacctcctgggctcaagcgattctcctgcctcagcctcctgagtagctgggcctatagtcatgtgccaccatgcccagctaacttttttgcatttttagtagagacacggtttcaccatgtcagtcaggctggtggcgaactcctgacttcaaatgatccacctgcctcggcctcccaaagtgctgggattacagtcgtgagctatcacgcctggccaagaactattttttaatttcttttcctctttcattcaagtacagattatgcatctacagcaaaacagcaatattaatatgaatgaaagagatatggtcccctcataggtgctaatgactgaccgtgagtgttgatggtagcacagaaaggagcaaaagccacacgctttggagtcagacagacctagctttgaatttctgctttgcaatgtattagccgtctgaccttaaagagttctttaactcttctgaatctacttttccttctttgaaaaacatgcctacagcattgtggtgagaattcagtaggattaggtatccaaagcagtagtatatggcctgaaacatatttgatgttgaaacttacaaggcagcatctttacactattacacatataataatgatgagggtaataatagcagcaattgcagttcctttagtgttaactgcaagctagacccactccacataaatcttatttgattctcataaaactcatatgaagcaagttttgttatttacattttatagatgagggtacaagttcaggagttaaataatttgatcaaatacacacaaaggcctcaagtctttctgatcccaaattctgtgtcctttctatgacactacactgccacatttgttgactgttacaaggattcctggagggcataatgtgtttttcttttttaagtcaaaacacatcaagtatattctggctctcaaacccttgaatctactctccttggaagtagttcaccctcttctacacactcacaccaaacacaaaatagataaaatttatctctcacttcagaatactttctgactagtaaaatagttacatttttccttgctctgagagagagagagagagagagagagagagagagagagagagagagagagagatttattttaggaaattggctcattggctcatgcaattttagggcctggcatgtccgaaatacacagggcacgttggcaggctacaaatttcagcaggagttaacgttgcaatctttagcccaaaggcagtctggaggcaacattccttcctttttggggggcttcagtcttttctcttaaagcctacaactgattggttgaagcccacttgcattatggagggtgatctctttactcaaaatgtactgatgtaaacgtaatcccatctaatacacaccctgcaaagttgacacatgaaatgaagcctcacagactcttatctatgagggaagtcttgagatcatagagtggatgctggatgagtccttggcagtcaggaggtccaaaaaatgcaaagaaatgataatgcactgggagaagaaagaagatattgacatcgtgaacacagtaagaagcactttgtattaaaattattgtttttatttttatcatatgttttaattgatcttagtcactttcccttttcagtctgttagtgtcttttttttattcctaactcccctaacctaggttgataccagtctctgtactgtccaaccagggatacttttctgggtctctttggctgcaaattcatacgaattctaaattctgagtgcagatgttagagttccttcctacactccatagcacagatggaaaagaggatggagattggggaaagtaccagaacttgaatcaggtctttcccaacaccaacactcatcttaaagagcatggctattgtaagagagttatctattggaagttgtggaatttactgataggaaaatgttggacatatattgtaaagtttctttttttttgtcaaaagtataaggctttccttgcaaaaaaaaaaaaaaatcattacgtgtaaaaaccccacaaggtaagcttcaaaattcctcccataattccccagaaccctcagtctctttgagcagagaagtcaagaggctttagaaagtgactgaccccaccagcagtgtaggagagatgacactcagtgtcttgccttcaagagctttttctgccaagacaatatggatgttgatcaccgttgagtgataaactgtcccaaataagtctcccaactatgggtaaactattcttctggtggtacctgagtaattgagggcaaaactgctgcaacacacaggtgtatttgactgataccagcaggcacaacctgacattcatttggtaggaaatcttttctgtctgaccaagattattgcaactgatgcaacctgtacttctcctttaaaggggtcaggtgagcgagaaaaatgtgatgccattgctttctgtgcattttctgtaaatacaacacaagttatcaggggacagagctttctttaaaaaaaaatcttgcaacccaatatttaaaaatgcttctgggatactaagccagaagatctacttttgacaaagctagaagttgaataagatctaggatatattttaatgtgaccagagacatgacgggaccgtgttgctagagtttagatgtccttttaaaaacacatgatcacgacaggcatttattacttttgtaacactttcatttttaaggaattataacatccaaaaccaaaataaaacaaccatctacattcaactattcatttagtatcaactctgggtatttcttatatggcttagaagtactttaattttcctcttcttccactaaccatctctcttactggccacttggttgtgggagcttcttccctcacgggccacaatgacaatttaatacccaatctcattgctttgaaagttgccacccatactcttcaggagaggagaagaatgactgtgacttttgaaaatgtcagttgctttttcagtttataaaataactatgtattgtaaataattcataaactacaagaaaaaaaattcttgacaaccataccactcaaaaacctattgttggtggctttcttttattttgttcaattagaaatgggatgatattatatatactattttttatgcatattgcctgtttccatcttcatgtgttatgaacatttccttatgtcattaactattcctgatagttcttgataactaatcatattcctgataacatgatttttaaaggctgcatggaactcagtctcaggtcgagatggtttataaatcccctggtggacttttcattccttttgtaaattgctattataaatagtattttggtgaatatatatctaatcatttttgcatacatatctgtttctgcaagatacagaaaaattttcactgttttgcacccctaccagcaaaatataaaaatatctgtttcttcacatatttatcatcatgagttataattatttctgtttttttttaagaatcttgccaatttgagaggaaaaaatggttggttgtgacaaaatttctcatgaaataaacagaggaggagttgtaatctttccccaccccaaaagaaatgaacacatttgtgcaaatgctcccagatttttgcctatgtctatacaaacattatgtatagataaatatatatttttaacaaaaatagtattataattatattcgaattctattctgcaacttgctagggtttttcagttaacacaaaattgtggaaatttttcatcatcaattcattttctcccttattcttttgaatagctacagagtagttcattgtatcataatacacaaaaatatacatggtcttatcattgacaagaattctttactttgctagggcaaactaagatttacagtagtatcaggttggtgtaaatgaaattaagaaccgagagattaggagtgaggggaatgaagattcttgtacatgttttctagtatcagtggtggatctgttctaatccatccaaacctgctccatccataacctacaacagtcatcttgcaaatgcaagatgcactgagctccgtacagactgaacgaggtcctttgttgtgtttgaacctacagtgtaggttgtgaagatgtcatccaccatcttcacaaatctggtccacctgttcagctacctggctctcatcttcaatgaaagaaatatgcaaatgtctagaaataatcacctttcactttttccttactgaggtatctctatttttattcaacatttttgccagttgaaaaaagacatgccaaaaaaatttctatatatttgtaaaccctcacaattttgtgtctgtaaatcactaaataccaggaaaataggagaagttcttctgtggagttaacatgaagtctgctctagaattcttgggtcaattttagtgtattcatttaatagacattccctgggcttctattatggttcaggcactgtgccaagtgcagggaatccatggcggtgaaagacctgacgcctgccctctcggaacttgtatcctaagtggcagtcaagcaatagacaaattgataaagtggagtcaaggtttacagtggaaaattggcctctgttccaagcactgtgatatttgctgaggctgttgtgaacaggactgtctttagcaggaatccactagtgaggagtataaggaatccaaaacgtgggacagtgtgtcattgttgaaccaataaagcccaacgttgcatgggggtgaggggcctttggacaacattttatgtcattgttgatgatccaggtagaccaattggacaaaacagctcctcgtatcacactcttgcattccccttctcaagtggggctcctgaaaaatggctgctacgggatttacatcacttcccgcgtgttgaaggcatcagaccctgacactgaggacgatcagatcatctttaaaattctacaaggcccaaaacatggacatctggagaacacaacaacaggtactggcctccttaatccttacaattgccattttaaaatacccagtggctggcagggctagagagtaatttaattaagtgcaggcccatttggtaaacactccccagggcttactgatagatgcagtttataaatcaatattgctcctaaagagggtttgaagctgagccttcctaaatttatcctgactggaagaaccaaatactgatatacaactgtttatttatattttttttctcaacagctgattataatatattcaaaggaacataatatcaggaccaaatttcctatttgtgactaattttttattctgtcatgaattctaaatgactctaaatgatgtcagatctttttttaaaagttcttggtttttttcctaatggattctctggattgtatattatttctactttatgagcacaatgatcataatacatcattaaacaggatggcaccaagttacagatttttattactgtatctttctactctccttctctttattttcatttttttaaggcaaatatttctgaagcagtcaacttaatgcctaatttaagctcgctgcatttgagttttaagatagttacagtaatgttaatttcttgttttaaaatgtactttagctgttttttaaagctgtgtttaaaataaaatagccatacaattttattagcttttatttaatgttttgtttgattacccatgatattcatttatttctttttttaggtgaatttatccatgagaaatttagccaaaaggacttaaacagtaagactattctttacatcataaacccatctttggaagtaaattcagataccgtggaatttcaaatcatggaccccacagggaactcggccactcctcaaatgtaaattctcttgcttattcagtagtcctatatgttacatccataatgtatctgaatattaggaaagtgaaatgttctttttaaaacagaacccaagaagataaattaatagaccatttcacaagctcatggaatttattttggagaatgaattttctttttattactgcttgaaaataggaaagccagtagctttacagagtacagaaacattaaaaagctaagttgacgttcatattatgcatgtcaaggtacacacttttatacacagggagggttctgtcttaccaattcactagcatccaacactgagtttgcaggttcatgtagcaattgtgcagcaagaggtcactctaggaccgtgttagcaactatagccttctaaaatatctgcagtcggggaaatgaggtagtcaagaagagttagccaaacatcttctctttctcttatgaagaaaattacaattacttgacagtatgtttataaggtgataaacttatcccatgtaagacaaatataatgtaaagaggaaactagactttggaaggtatataaagggtatgaccctcaaaatagcaagagtaacaaatcttcaaaattaacgagattaacagaccacagcaatttcactgactgggtccctactctagacttttcttgaatgtagaccttgaatatcttaccagctaacagatagtcatagaaaggtcggtcagagtccagttattctggtactgtgctgttttttgtttgtttgtttgttcattttgtttgtttgtttttgataccctcccagaaaccccaaagaaaagttgttcacttatccttgttttagtagtcaccatatcctagtcatactaagcatcataagtgatacagctctgtgctctgttatactccttttatgatggagtatagattaagaaaagaaagctgagaaactcctctgcagtcttcagaattcttgcattttcttttggatcctgaattgtagttctaaaatctgaccagcagaggtcacagtagtcattgtcagaaaaaagctagcctccttttcttagcaaaacacattcccagcgtcccactccgttgcctcgataaaatgcagagcctggcccagatttattaactccacagacttttatcgagtggctactatatgccaggtgcacagtactaggagctggggaataggttagagcaaagtagacctggcccgtgatattaaaatgtaatctcgagattacaaaatgtaaaacatatgacctccacccattaaactgtctttgcctaagacaaataattcccaggatcacaatctttatgggaaaatatgtcaagtacttgcaatgtcagacaaatatcttccaattctcaagaaaatgtaaaaaaaaaaaaaaaaaacctgctccaaaaatgttaatacgtggacttcactttttttttttaacattttaaaaataattcaagtaagaaaacataggaatgttgatcagacttgctactgacctaatgctcacctcttgtcctccatgtgtgagcgcagtgtagctgacagaggattttcttcccccagtaatgatgctaggctgatactgcttcacccatagcccctttcaatctttgtcactatcaaggacattgcttttggaagatgatttatatttttaaatatactctcaaattcatatgagaattacagcaaaatttgcttaatttaattataaccttaaatgaggccatttaaatatcctcctgcttttgttggctattaactttcatgtgtctgtgctggagatgtttccagttcaacttgacgtaatttgttcatttgttcatgactgaacaaaatgctgtggcatatgcctaccaaggggtaatatagagagaagttttatttggttctgacatatattaggctattttctttataagcgatgggggggtaaaattactcagcatttatcatcatcatttttgaacggtatagttgtcctcaaccccatttgtaagcagatgttattggaactaggtgcacaattttccagtaaaaagcaaggttatgaatagtggttcatcttcccaagacagccaggcagaacgtagttacaggtacaatataaattacagccatttgcaatataattggtgtttgctctatttcattgctattcatttaatcatcagaaccacctatgagtcaggtaccatcataatctgaaatttacagatgagaaaactgaggacagagctagaaagtgacttttctaagtggaaatgcagctttagagtgcatgatttttctcagcacactgaagaacttcttgcccattttaaggactgtgctaatctggcctgaagggaatggaacaccagacttgtcttcttctttctcttcagacattggccacccaagcaagaaagaaggaatacttactcatataggaccttaaagttcagtgggattttttaacatgtacattatagatctctatattagtgtgcacttcgtatctaacacactagaatttatactatagataataaaccaccgaacttggagctagaggacaaggtttgagctttggctctgcccttcatctagtaactgttcaagccttagttatctcttctgtaaaatgggagcgatactacaatttgtttagaaaaacaaaagaaatgtgtaacgtatatgaaagcatcttgtgtatttaaactccttaacaaatgcaacttgtggtgattactgttgtagttaattcatgtaggtacaataattgactgaagaagtatcccggaaacatttggtggattagaaagcctgcctctaattagaaattgatcctgggatgaatcacaaagtgaacagtcaatatgcatattaatcaatgagctaaacgctgtggaactttgtggtgttctttggcttagacaggattaatagattcatattccccatatttgaaggggtgaaacctctgtgataaagctcaagggactgcggggtgccatctggaacagaaatggacctgttttagagcacgggaaggacccatgttcagtggaaaattcagaatcttgactgttggtcagttttggctattgcaggattcctgtggagtcctgaaggatgaatagatgctccactctaaaaagcattaggaaatgcttgtttcgtgagattcatcaagttactgccagctagctagcttgcgtgcttgtttaactgcatcacatcctggaatcatcgagatgtgcgtgtggattgggaatctctcagaaatgaagcctacgcagcaaacctcaacccaactgggctatagaatcacctctctctacctgccaccccacacacaggcagaatagctcagggaaccaatttttcatggaatgcatctgggagtcactttattgtaaatagaaattattttataatgctgatatccttggaaatttgcgtaaagatttagatttagctaagtgcctacatttcaggcactgtgctaagtgttttcatgagttgtctaattttatctgcaaaacacaatcctctgaggataaggaaataaagctcaaggcttttaagtaattatcctgaagtcactggagagtgaaccctgacctccagacctaagtgagtgcgcatcttattgcctcaccccctggctgcaccccttgacaagcttgtgcctgttttctagtccaagttgaatctccaagatgatccgcagaagccccaaactaagttacacaggacccacatcattcatgaaaagcacttttgtggaccacagaatgtggccaacttctgaccaaagttgttttcctaatacagcttctacgtggacctctttcttgtgcccactggagaaaagtgaacttcaaaagcaatgttgaatgcagaagtctttgataattcagtgactgtttctccggttctgcactctgattcttcacctccctctggcaactcacattctaactgttctgttgtccatttttggctttaaaagagaagggacagaagactaaaaggaatttccatcaggcaaacgttgcaatgtttagcagcttttatgaaacacctgataggggaaggtgtttggctagctaatacctgcacattacctgcaagccaggagttaaggtttttgtcttcagactagatcttaggaaagcacagaggaagggaaggaaaatagcatttattgggcacccactgtgtacaggtgctttatacatactaactaattttaattttaatcattttacatgagtgtaattctcctcatttttaagataatgaaaaccgaggcccagagagactgagtaactgaccgtaatcacacactaaatcacatactaatcagtggttacaaggtgtgcttgattctaaagcacttgttttgggtgcacactatgctgcctcttggctaaacactgtttccccattatcaagagaaaaagagaaaaatgaaaacacaggtgttcatagcattcgattacggagtttaatagcatcatctatgaattgagaagtcttagattggatacttgaaaaaatatttttttaacattttcaggaattcttgtcacatgctacttgattataaatgaagatatagttataaggatagtaatttaatcacaattttagcttctgtaaaccttttgctgagaagctcaaaatacttaatgagaattcatgaaggttcacttaacccctttgaagtacagacttatcattattgcattttgtaataatgacattattataggaagaaaggaaactgaggcatagacaggctaaatatctttttcacagactcttgttaacctggattaatgccccaattcctaaactggtgatttaactccaggtatttctttcagcttcttgtttcatcataaatgaatcaagtagctagaaaataaaatatcagaaagaacatatttattactccaggaccgggtgtctcaacattggcactataggcattttgaaacagaccattcggtgtcacaggggagtctcctgagcactgcagaacattcagcagcaccccaggcctctctcagctgaaggccagcaccatcctcttcccagttgtggcaacgaataccatctccagaaaatgccaaatgttaagaattacacgcatgccttagaaaatagcatacatatgttttaagaaattatgaattatgttagaatgctcatttatcaatgccatctttctctctatgctaataaagcctaacaatagtcaaagaatccagaataagtcagggctagagaaaacatgtgaggatcatctagcctagcaattttttccaagtgtgtgacagatgatgttagtaaggttggggagaaaaatattttcgatggttgtattagtctgctttcacactgctaataaagacatacctgagactgggtaatttataaagaaaaagaggtttaatgaactcatagtttcaaatagttggggaggactcacaagcatggcagaaggcaaaaggcaagtcttacatggtggcaggcaagagagaatgagagccaagtgaaaagggaaacccctcgtaaagtcatcagatctcgtgagacttattcactaccacaagaacagtatggtggaaaccacccccatgattcagttatctcccaccaggtccctcccacaacatgtgggaattatgggagctgcaattcaagatgagctacaattcaacatgtggggatacagccaaaccatatcaatggtcaacttagctcaggagacagtgggataaacaagattcattcattcagttaacagatatttaatgagcactcaccatgttttagatgctctacaagacacctgggttatcacaatgaaccaaagacctgtgcttccttggagcatacataggatctaaatcaatgtgatagcatgcttgctgtacgtggtacatgctctggaaaaatgaaaaacttgaccaggagcagggggatcagcaagtgctgtgtttgggaaagacattgtgattttaaattgggtgtttaaacaacatttcctttacctgactgcttagagctggtgagtgacagagggacctgaagcctcacaagttcaaatccaattttatttccactgctccatgccatgtcttccacttacaacagtggttttcagggatccgaatttatcttcacattgaaccagcttttgctttcttttttttgagatggagtcttgctctgccgcccaggctggagtgcagtggcatgatctcggctcactgcaacctctgtctccaggtgaaccagctttttctattgtgatgaacacattaaaaccgcatatggaagaagttctcaagtgggggtgacttttctcccaaggagcatttgtcaaggtcccgaaacagttttggctgtcgtgactggagggaagtggtgctcctacatctaatgcgaggaggacagaggtgctgctaaacatcattcccacacaggacagcctcccgcaacaaagaattgtctggtccaaaatgggtgggaaagcctgacttagaggcttagggagttttcccctcctgctaaatgacttgaagcgattgccacatgggttacacataaaatgtgtccatggcatacagttctgactgtaaaatgagcgtcactcaatggtgacaggaaactggaagcactgttaaaatgggaagatatgaaccaatccttatctacatgacacctacacatctagaactttacgaatttctctcatgggctcctggatctggacatttacatgatgccaggcatatagctgtgtggcttcttgcaggcaaaattcccaagtgattgactacatctcttatttttcttccaggtgtttgtgtacagtttaagcaatcacagtctctgcgtagaaagatcttctcaaatatactactgcaaaaagcaaaaaaaaaaaaaaaatcacattcaaaacatatattgtacatattctgtgggtatgcaggtcctttgctatttagatatttttctcaaaaatatatagcctggcttaaatttcacggcttttcaatagctctttattatttgtagcgaataattttaagaaaataaaatagagcattgtgtaatgaccaccttgacctataaacgttatgcagcattcaaatggtgcatcagggaaatgcatgcacattcccaaacagtaagaccctttataccttgaagctgaacagccctctgaatggttcccttctgaatttagatcagaaatcaaattgcatttagcttttcgccttgaggtcaccaggatctacagaatgacattgatggatttttacttgtcatggttagcattagcaatggatgaattctcagaagaattggacattgaaactcatttgaaccctactgatggctgaaatccatgcaaatgtatttgtttcattctttcccactgtcctcctttccttcccatttcatctttctctcttttcccctaatccatcttgctgactttttttttctttctcattcaactggatccttttgggattctttgcaacatatttctattggcatttatgatatccttgttgtttgttatcttgtaattctttaggcacacactaatccctcctatctgtgggagatatgttctaagacctccagcagatgtctaaagtgcaaatagtattgaaccctatgtacactgtgctttttcctgtactgcacatacgttgctaggataaagtttaatgtacaagctaggcacagtaagagattaataactaataaaatagaacaactatcatgggatgccagcatcactactcttgcactttggggccatgattatgtaaaattagagtgacttgaacacaagcactgtgacactgtggctggcagtcaatctgataaccaagccagctacagagtgactaatgggcaggtagcatctactgtgtggatgtgctggacaaagggatgattcttgccccaagtggaacagcaggggatgatgtgagatttcatcacactactcagaacagcatgatgtttaaaagttatgaattatttgtttctgggatttttcacttaatattttcagatcacggttgaccacaagtaactgaaaccttcagaaagcaaattgtgaaaaagagggattaccgtagtcatttatttctgtttcttgatctgtttcatgcgagatttaaattcagttgcatcagagacccataaagtttccaatttttttaatacaaggatcctcttttcttgtttaaaattctattaatatgaagtagcaataaactcaaacaataaattttaaatctgactgaataaacaggtatgtttatatagattcatgagcccctgtaataattccatgctcttaccctacccttgccccctagcccatgatgctcagctatgaacctacactgttgagtttatctggctcgtgagcttaatccatagaacgtgattatgacacatgatcagtgtggacacagtggttatttgaagacaaacttcctccctaatatgaatggccccaggaaagcctggagagtgtgtgaaatatgtgaacacatgttccatatggtggcacccagaatttctagttccacaaaaaaagaaagaaattataataaataaacttaaaagtaaagaggaaagagtctaaatctgactagaggtttgggaagtacaagtaaggcaaccactaaggattttgtaaatctagaataaaaggcaactgaataaaaaacaatggaggtgcagttaacaatcgtagtgaaggttgcttgtgtcttttatcctgctctatagtaaggttacagatggcaaaaaaaaggcaagacctcaaaaaggaaaatgtttctgggtaaagataaaaccgtattgctctgcttgagctcacaaaagagtcgcaaagaacttcagttggggagagaaatggtagaggttggatggaagatttggcattagatttatgcttgaatttcatctctgctattagctttgtcatgactttttgcctttaagttagttacttaacctctctgaagcttgtttgtctgtttgtttttgaaaaaaaatgttcctctctagatgaagattaaagaagacagtttccaccaaatgttggactcactaaatatattgtggaaagaaagactatcctctatttctcaggtttatttagttatatagttgcatccaagcctcataccagtagagtcctttttttatgcacagaaagagaaacaaataacacttatgaaacacatgtacattttaattcccaagcacatcctcaaaaatattttgttattaaactgaacccaagttcagagaatatctctgtctggaattgttcttgttgtaccaattatccttatctaaatgataagatagaagacttcctatcagtgtcttttccaaaaaggaatgtctccttgaacttaacaactgctggttcctttcccttcaaaacattcacgattgagtccccttttagttgtaaatatctgggagacattcagcagccttttaaccttagattcttcatttgtgaaatggaattctaatccttgctctgtctaccttacagggttgttgtaaggatcaaatgagataatgttagtagacattctttgtgaactaaaatgtgtcaaataagtcttaaggaatttccatcactggtgtaggttgatcaaccacgtttttccactagtccgctcagcagagaatccctataggcatatactatgcattctcatgatttctcttttcctttcacacacagtttggaactgaagtggtctcatattgaatggtcacagaccgaatatgaagtctgtgagaatgtgggtttgttgcccttggaaattatcagaaggggatattccatggactcggcctttgtgggtataaaggtaatgactctgaaatgtaaattatcaagctaaaacttatgttgttctttggtgtctttcattatattttttttagaaaaattcagagtgaccaaggaaatttcaaattgcagggagatcccactattctgaggattctaagcacaaaacctccttggccctccatccatcatctaagttcataaactctgagatatgattttttagtgtacgtgttgctgaagctagcacaagagatattattattattattgttattttgagacaaagtctcgctcttgtcgcccaggctggagtgcaatggcacaatctcggctcacagcaacctccacctcccagattcaagtgattctcctgcctcaggctcccgagtagctgggattacaggcacctgccaccaggccctgctaatttttgtatttttagtggagacggggtttcaccatgttggccaggctggtctcgaactcctcacctcaggcaatccatccaccttggccttcgaaagtgctgggattacaagcgtgagccaccttgcctggctgagatattaatttttaaaatccatttttaattttgaaagctgttatttgtttctatgaactctttagactttgaggttttatttcatagggagctatattcaactttgtgaacttgggctgaactctgctttagaaagagatgttgtatgcaagacattctgtggggtacccagagcaaatttcagtcccaagaggctttctcttagtattcacctcagtcacttcccatgggctcagttgatgaggcaaataggcagcttaaacccatctatcttaagagttgtccaagccatacaaaattaggagagcatatactaatacaggcaccctgaaatatgaagaattttcagttaaccacttctagatcagtcaacttgctatttcttttcattgatgtgacccatgaagcacaacctatggcttctagaattgaagaattttttttaggagtcgttataacaagagcgcttcaagagaatgagagcatgaaacacttgtacacactaatgatggagaatgagctgtaaagactcccccccaccccatccccccaccatctgatgaaaaagacactggtattagcttctggggaaaaggccatttctattaagtctcaatttaataatgaactcaaatcactctcagaagcctgggaacataaatttgaccatatccaggctcagtatttatctttccagtggacacaggtcctttttcctagatctgttggttacttttttgttattaagacaggagaaaacttggcatgccctatagttttccagaagattgcttatggaataaggaagaatctgcctggatggttttctaataatcctcccgtcctccatagaaagcaccatatgctctaggctggagttttgggccacgccaccattcaccttgccaggtagaaagaagaggcatggtgttacatggaaccttatgcttatttatgctgaaagtgcacaacaaacgtgccagctgagtgtgcaggccttcatcaagcacagtcccagagtctttcaggacaactctaccctgagcacaacctgcagccttacactagagcttggctgcttgactgggagcagggaaagaggtggtgcttttaccctgtgtggattgccctggtttgaattgtgcaccttcacctgactgatttctccaaccaccttgcctcagaccattccttttcccacataggattctgtaaactcagtggtagtaaatactaggtaattggacatgcaagaaccatgcagggaaatgcaacttccagcatatggtggatacaggtgtataatgggctgccttttcacaatgaaaggtggttccagaggagccttggcattgtagacaaagagcaaatggaagcttaggaaggtaatccccttttccagcaaaatgtttccactgctaaccaattaatatatgagggggcctttgatttgaaatggacatattgtctgaggccatagaagtaggaatttttcagcttttcattatgcacttcattcttttgtcagaaggtacagaaatatattatcccacattcctgaccatcttaaacatctaaaaaatacacacaagtaacagaaatgcttgcacacggttctcatttgatgacttatttttcaaatcagccaaagacactttttttttgttttttgagatggaatctcactctatcacccgggctggagtgcaatggcaccatctcggctcactgcaacctccacctcccaagttcaagctcttctcctgcctcagcctccccaggaggtgggattacaggcggccgccaccatgcctggccaatttttttgtttttggtagagacggggtttcaccatgttggccaggttggtcttgaactcctgacctcaagtgatccacccacctctgcctcccagagtgctgggattacaggcgtgagccaccgtgccggctcaaggacacttcttaacatgtgtttgggcaccctttgggtggaattcaaggccatgacttcagagcgctaaaatcgcctctttggtttttagtcttggggctggagctgagaagcaggggtgtatcaatagtctccttagactagggcatttttgttgttgttgttttaaaacacctacctgacggggtccttgaaagtccttggttttgggtgtggatctcctttgtctggttgttcaccaggtcttccggttccacaaaactctcctttcatgtttgtgaagagtaatggcttcatccagacaggaaaatgaaccagatgtgtttgagttaatctagtctaaaggctttcagtgccctggagcttgcaggatacctccaagctagctgacagatcatcacatgggttgtcaggggtacctgctttttcttctcctcatcaattttctccctccttttcttttgagggactattttaaaaccaaattgggatagaaggaaggtaataaaattgtgcttgcaacaaagacaaaaatatagtttaaaattcatgttcctttcttcaataactaaatcatttataaaggaaaaaccaaacaaaacaaaagctttcctttccattgatattagcctaggaaaaagtcaactttaaggaaaatgcatgttgcctggatcccaaatggcttatataatttttttaaaaaccctacctaatattaaaaacagatttaagagcatgagtttagtccagtatgagggagaatagctgtttctctattgtagaatatttatttttatcttaaaaagatttttttttccctcctaaggtcaaccaagtgtcagctgcagttggaaaagatttcaccgtgattccatctaaactgattcagtttgacccaggtacattttgtgtctgcagtttgttttatgtgttttgttttttgtttttttttgtaggcatgtctggagattgtagagaagatagaatgttacacaactttagccaactagaaactcctcagggagccataccacctcactctaaaagagaggtgtttggatttgaggttttgcccttatttttttttagtaacaaatgaattttgatttcaaatgagaagaaagattataataaatatgagatatcaaagcaaacatccaagacaatccagaaaaaaatacagtcacttagaaattatttgaagttctaacacaaagctgttatagtttaattgcctcagatattttatgaaaattttcagaatgttatgtttatatggattcctaaagggcatttctaaatgatccctcatggaataggttgatattaggagattccaggggaaattattatttagttaagtagcacttactttgttttaaatttgtggaaaaattttgctaggtgcaagtggaaataaaaaaggctggtacttgctctcaagtgtgttccattgtgtgagaaacacagacaagaattaacactcactgatagtgcactgggacccaaaagatgagctgttgttcaggctaagagaaatcttggaagacttcccacgggaggcagtattttagcatttagatgaagaagaaaactccaggatgaaggactaacacaaaagcaccaacacacctttggggagctgtgcctaaagctgaggctggagcccggccatctttccctggcttctgtggatgggacaggtagctctgcctcactcactgcatgccactctctatttccctggggtttgagatggatctgaatcaaatgtgggggcttgggagtggcaaatacaatgggcctggagaagcagacaggactgtggctttgtgctttcctgccaaggagatgttctgcatactgagaacactcctctaagtgtgaactattgacatcatctgccactaactcataaagagttgagcaaaggcaaaagaaaatggcctaagtaccagcaccacctcaaaattgcctatcttaatgtcaaacacagaaaagaaatggctctctgcagttcactgcaagtagcatgatgcttgaggactgtgttagtttcttcaggctgtcataacacagcatcaaacagtgggtagcttgaaacagagacatcgagtgtctcagttctggaggctagaggcccaagatcaagctgtcagcatgaaggattacttctgaatcgattccatgcctctcttccatgcttccggtggctgggtggcaaacgttggcattcttagtgtctgctgcctcacctgcatctctgctttcatcttcacgtagcgttctccttgtgtgcatgtctgtgttataaagtccctgccccttttttcttttttgagatggagtcacgctgcgtcacccaggctggagtgcagtggtgcaatctcagctcactgcaacctctgcctcctgggttcaagcaattatcctgccttggcctcccaagtagctgggactacaggcgcacaccaccacacctggctaatttttttgtatttttagtagagacggggtttcaccttattggccagactggtctcaaactcctgactttgtgatctgcctacctcagcctcccaaagtgctgggattacaggcatgagtcactgtgcccagccaagtccccctttttatacaataccagtcataatggatgaggagcccaccttattccagtatgacctcacattaactaattacacctgtaattaccctagttccaaataaggtcacattcagaggtactgggagtgaggacgtgaattttttagaaacgccattcagcctataacagtgaaccttcacttcgacatgcaaaaatctgtattttgtttttggcctccttcctgtgatagttaacattctaactcagataagctggttcttccagctgacctccttttgtgggaagagatcctgttatatatgggaaagattcctgttatttatgtgctgtttactcccacactggtacaggctcttgcggccaacccaacaatccctacaatgaaagggtgagatgatgtgcgccatgtcccttcctacttcatgttaaggcacttccaacttttccatttcttgagtctttgccatatgtcatcttcataatttgaggtctgtttgctacaagatcaggagtaattttggctgctagtaggtttcaggagcccatcaggtgctctgtttggactgataggaactagaacgtgtcacactacaagagactctgaaatctgtctcttggagattccactggataagataaatacccatttgtctagaagagctcacatgctgttttgagtagatactaatgacttctgggggctgtaaataatcttatgattttagatattatttagacaatttaagaaataatataagcatatcttataaattaagaaaaaaacaattggctgttcattgttttagaatttattaacccagaagcagttttgcaaactgaaatcttgctttagagaattttgaagttctccatgtccacaggtccagtaaatatttactcctatcttgttaatccttgcctcttctgggtctggtgtccccatccccatatccaccccttttaccaagggaaatcaatttgtttcttttaaaacggcagcttccatgattgggtgaagaaacagagtgaaaaaccgaagacagtgggatgccgtaaggtttgagaactcttacgtgggagctggaaggaagcttgccttgaagttgcaactatgctaccaaaccaaaaaaataccaaacaaacaaaagcaaaccctaactactttgcattcagctattgtgactagtcttgagtggatataaaaatactcctaagaaaatgattgttttcctttaaaatatgcattattgaaaggcttgcagcattcttaattgatcatcattccttagagtcaaaatgttttccaagggaacagatctctaatgtggcatttactaaaaaatattgagaaaatgtctttcaatagagaaatctgctttgcaggaaaacatccaggaactcacctactctgtaaagtggaatatgtctgcataaaatgacacctctgttttctcttcagcaccttttgttttgtgggaacagggagccagtccaagccttctgaaaatgcttgtatatctcagggacttagcaaatactttgcaccttgaaagtgaaagaggaagggaaaaaatgataaagttttgacttccaatctcattaacctaaagagttagtcctctgtgcacacctggaaggcatagaaaccaagttggaatgcacacaaacaaatcagaagcacttaaatgaaactcaaaagatattttctccaacccctaaccatctggttctactccgtaaggtccaacaaaaaccttaagttttttgttttttgtttgtttgtttgtttgtttggggggtactataattttaaaaaattaaccttaaaatcagagagtcggttgggagttggaaatattttctgtattggattttatttacatgatgcttaactttatggtctttgagggtcaaaacagttctccaagtactaataatcatattattcatatgctttcttcattgaccacctcttatcttttcatgccaattgtattacagcagctgtctatgtggtcttcaaacttctagcctatctgtctatctgcctggatctccagactttctcacataacactctcaggttcattttgctaatccactttcagtgtgtgacttctttgttcaagacccttccctcttgcctatgttgtaaagtctgaatctggccaggtgcccagggctctctgcagtctggctacaaataatctttgcagccttatggcctcctgtccacccatgtaacctctctattccagccagctaattcactcacccttcccgagtcaagacctctgctttgctatcttcctgtctttacttatgttgttttcctgtttcctccctcctaatcctttcacttctaaagcccacatttatataggctctacaatctattctgtatcttttagtaggtaaacatacatagctttcaataattatttgacttttctggttttgcttctgtctcccccaaaagattttaagctcccttagatcagggcttggcttatgttacacctctggtattctccatagcatctaatgcaaagataagcatatcataagtacaaaatatatattttgatgtattgatttatccatccatgagatgggaattgtatggtattattatacatactagatgcttcaacttctgcttttgcaaagactgtgaacgtaattggtttaaaaactcagtactggaagcttaataaattagctgtcagcctgtttttgaataaaatctatttattccaagtacacctaattttttcccctctaagtgcagccagccaaaagtagaagaagtggatagcttcacctttccattgacttctgttgaggattgaagagactgattagatcatgagatctatgtgaggcataccttcaagaaagaggccaccatatagatggacagttgagaggtataagtctgtagaaggcaatctgcaagataaaagagtcgttttttggagatggggacaaggtctcactctgttgcccaggctggagtgcagtgacacatcctgggctcactgcagccttgaccttctgggctcaagcgatcctcccacctcagcctcctgagtggttgagatcacaggcacgtgccaccacgcccacctaatttttgtttttgtttttgttttattgtagagatggggttttgctctgttggccaggttggtctcaaactcctgagctcaagtgatctgcccgccttggcctgccaaagtgctgggattacagttgtttaccactgcacccggccaagagttacatttttaagagaagactttttaaaaagtttaactgtatcatatagaggggcttaaaggagtaaaagcactcaaatagccaatgagcaaatggcagagtaagcttttccatctcagctaagaaaagttaaatcgataagtttactgtgtttattcctcttaaagttgagccttctttctccacttaaaagtattccctttacttccttccaccacttgttcttctaagtaaactcaggggatatcctatgatccacatcatagaaactggtcaggatgagatcatctcagaagtttcttcttgcagtcttaatattttgtgtatctggggttgctttgtttccagtcttggtgttgacaggatggctgggatatgtttgtaaggtcaaaactgttttgtataatattaagttcacaaagttactgtgaaccaagcttgattgtaacttcatgaatagaggcagccagaaagagggaaaaaattggctttatttctagaacccccagcccataaattctctctaggaggatatcaaactactgagtattatatcatcagaaaaagcatttgtgggctagaaagatctcaggaagtggggaagccgatgcaggcagctgtctttagaaatgattaagaaatcaatcatttcaagggttccatgaatagcatgaagtaccatccaataatcacttctgtctgcatcaacagcttaagattttttaaactattaagattttgagattgcaatacttgtttactcttcagaagagaagggacaggttgggaaaataattaagtcttggatctcatctaataaccattttttttttatcccttgcatactgcagcttacttttttgttacagtgtttgcatttaaacggaaacatcatcgtccaggaacaaatgtggtcttttcatattatttgggagaacagcaggacttcagtgagttggtagcagtacaatagctcactcgggctactgcagtctagctgtagacatgttaattaatatatttctctgacacctaggtgattgaaatagcaattaaagagtaattaaaatgtttacttcttgtaggaatgtcaactaagatgtggaatatagcaattacctatgacggattagaggaagatgatgaggtctttgaagtaattctgaactcccctgtgaatgcagttcttggcacaaagacaaaagctgcagtgaaaattttggactcaaaaggaggtattcttttgatcctcatcttgaaatcaggagcggtcctggcgctgtagctcttgccttcaacagccaacgtgcttgataacaccttcaaatcaaaatgcttaatttcttgtcaagaaagcaccctcagtcgtgatgtaggccctttattctggtttctgcttcatgtggttttcctcctgctaagtacgatcacttgagaaaagcaacaagtcagtgccgtagttgtttttttcctacccgtttgttgttctcaccgagggggaaacagtgttggtgagaatctgtcgacaattattttccccagagtctgtagagctataattatctttctctgttaaagagcactcttaatgcctaaaatctgagcccccactgtagtgtgaccaggaaaattctaagagaggaaggaattggagaaaaatagatgtgaaagatgcagctggcttgggaatttgggagcagctggagaatattaatgaatgactttggatggcagcgccaaacaggtcctggattgtctatgctaaagaacaacctgtgaactaaataaaataaagaccagccagactctttggtgctctgatttttttccaccaaatgccttttagttacttgtctttttagcatttgacgagtgttcgtaccatactcaatcttacactcccatttttatacctgtcatgccctgtggtccatatttttttcttgcctggaatctattcccttctcttctctttcctactctataaaaaaatgggacctcccctcttttctttataatatccttgtttctgcaacatctctccccactacctttcctcaccaaatttatttcttttccagtagaattttctggtcacatgaagtacataaaatacatgatatacacaccttatatgtgaaatataaaatacccagacaagggttttgccctcaaattttttatgccttcccagaaatactaattggtgaggtttccaataggagccgctctattaagatttactgggtctttgttctacagcaactaagagaaaagttttataaatactacttaattctatgacatctttaaacaattccagtttctacctctaggaaatgattactttaaagtgcttgtggaataatgcttgatcagtgaataaacttttatgttggggaatactataataagagaagtgagactttccccccagtatatgatatgataataaaatcataacagtgattttcatttggggtttatgaaattgatttcatgactttataatcactcaatagatgtgcagacgagcacagctttcctggatgtaaactgatgaagagtaaaggagtttctggcaaatggcaaaaaggcaacatctggtgggaaaaccatccatctaggtttaatgacaagctgctccaggagctgtgtcaatgtgataccttatctgtttgtgtaaaatgaactgaccgcctgccatcttgcatgcctccaggacaatgccatccttcatattcctccaaccaaagcaagcacagcacatgggagaagggcatttggcatctgctgcccccagggtcttcctcatccaccacttctggttcctttcatctggaaagaagacctcttccatcttccatgcagctagcagtcatcaggggagacaccctgcggggctttgattctacagatctttctcaaaggaagcttaggacccgtgggaatggcaaaacagtaaggatggggaccttctgggaaatgatgtgcaaaatacatattaaaaggatcagaagatattaataagtattctgaaacactgaagaagctgttttgattctcatagtgagtgggggccatggttccttgcacagttatgcagtgccttctgtatacaaagatcttgaggctgccttgcttctttaattgtactgaggtgatagatatgctgattcatccatatgatttcttctttgattccttttgtgaccaagacaaatagggaatgatccatgaccctgaaatagagtgagatgaaatgatgcgattgggtgtggaagccatggctttgaccttattaacacagcattctaaccattgcatactctcatatgtgcacacgcgtgtgtgtgtgtgttcttggacctgtgtactatagatataccaaaaaataaagatgtactttttccctgactggaactctgtatgtgtgaatccacacaacaatcataaattctgattaggcctagtgatttttgaaattccaatgatttgggcgtgggaaatcttaagattacatatgttttgtaattgttcagacattagcaagatcttacttggtggttttaccctattgctagttattagtcaatccaattctgttcatattttgttctctgtcaatttcaggttcgtccatcctctgtttatagaaatggaacagacatcatctataatgtaagtgtagtcacagaattgctaaatttcttatatttatggatgcaagtatttaatgaagctattattttatattttttatatttatacatttctcttaaaaaattgttttgaaattagaggcttgggtgttcagagaaacaaatcctcttatctttttgctttgactgaatttttgaattgctcatttttttgtttgctatcttgatgtttgttttttccttattgttgttgattgttggtttcctcaagtatcatgggatagtttccttgaaactggaggatgacagtttcccaactcacaaaaggaaggccaaagtatccatcattagtcagccacaaaagacaatcaaagtggcagaactgcctcaagcagataaggtggaatccacaactgactcacacttccccagacaggtatgaaaatctttgttccttcttactcaccttataacaagttgtttgctgggccagaaacacacttaattcacaaaatagcctccaaggttggggggatagtttacccaacacaaatgcttcccaacaaatgaagacccaaaggaggtgaatgtgtgagcaactttccttaagtcaattctaaattgctaaattgcctttccttcccaaaggaccagttgccctcatttccaaagaactgcactctggaattaaagggactcttccattttgaagaaggcatccagaagctgtatcagtgcaatgggatcgcctggaaagcctggagtccccaaaccaaggtaggaggcaggctgagcagccaagcacctttattcgcaatgtgctctatgataagctaatagaggggaaccatctggtgcatgactcaacccatgctacatcttcctgccattgttaacaacttgaaggccaagaggaaaaaatggcccaaagtggctttttaaaaatcacaaaatatgttagttaaatcaataccatttaagaagatgtttacttattttgttcagttatcagagtgtcaaagttgtaacaatgaaacgttgctgactgtggtagtgttttctgtaagaagccattgtatttctcaagatggagaattgggattagggctgactccctttgtggtaaccaaactacttgactgaagttagggaactcgtaggactccttatgctgaaccaactccagattgtaaagaccattatgatatgaacacagacaactgtttttcaggatgtggaagacaaatcctgtccagccgggtggcaccagcactcaggctactgtcacatcttgatcacagagcagaaaggcacctggaatgcggctgcccaagcttgcagggaacagtaaggcaccctattgcacatttgattggtgttttcttttctctatttctctatttgctcatggaagcggagagctgcttcattcattcaacaagtattgagtgcctaatatctgcctggctttgttttaggagccctgagggagttccctagttcagaatggatttgtgatgggccttgataatgtatttggttggtgcaaaagtacttgcagtttttgccattacttttgcaccaacctaatatttgactgagctcttttctgttaaagctgcaccattgccatgtttctttttcttttattttcttttcctatctcagtctttgtgaggaaatcagaagattttctgagtcagcagcattgcagtttctttttttatgtgataagaattcctgcccatttaattgaaagtatatagtaatgaaaagccttataacgtcgggcctctagcaatgcgattatacagcaatgattataaagctgggcaagtaagacaaaggctcactgggtaaaagaacattcaataaaggataacttatggtcagagaatgacaaccaatgtatgtagtccagaaggactttaaaaatgcatatgtacctatccctgaccctcctttttgtttgccaatctggatattatctaaacaacacaattagactaatatgccctatggctggaaattgagactagggaagtctctggttattattgatctgatctcgtacttcataaaatttaaaaagttatacacatctaaagactccattaagaaaatgaaagagcaaaccatattcagaaaaagctgttctcaaatcataaacctgataaaggtcttaaacccagaaaatacaaacaacttcaacaaatcaatgacaaaatgacgattcaaacaataataaatgatttggagtcttcgcaagagtagatgtccagttggtcaataaataaatgaaaagctgctcaaaaccgttagatattaggtaaatgaaaatgaaaaccacaatgaaataccacttcacacctactagaatagtttgaagtataaatatgacaatccaaatttgtttttaatttttaaacttttattttaagttcaggggtaaatgtgcaggcttgttacctgggtaaatggtatgtcatggggtttgttgtagagattatttcaacatccaggtattaagcctattactcattagtgatttttcctgatcttcttcctcctctcactttccaaactccaatagaccccactgtgcgttgttcccctctatgtgtccatgtgttctcatcatgtagctctcacttatgagaacatgcagcatttggttttctgttcctgcattagtttgctacagataatgacccccagctccctccatgtccctgcaaaggacataatcttgttcttttttatggctgcatagtattccatggtggacaataccacatgttgctaaagatgcagagcaaatagaattctcatgtgttgttggtagaagtgtaaaatggtacaatcactttgtagaactgtcttacagtttcttataaagttatatgcatctaccctatgacctaacatattctactcctaggtatttaactaaaagaaataaaaatacatactaaaaaagcttcataaaaatgttgtataataactttattcataataatactaatttgggtcatttgttttttgttattgatgtttagaaatacttgatattttctccatcagcaagagaataaatttttgataaattattttataagtgatggaataaaatactgaagcgtccaacaatgtagataaatcaaaaatggaacatagagagaaagcagccctacacaaaagaatacttattatatgattgcatttatataaataagataatataatctatgttgttagaaataaaaaattgttatctttggtaagattgtggaatgactagaaaatagcacgaggtaacgttctaaagtaagagaagtgttcaatgtcttattgtaagtggttattaaatagatgtatatacaattggcaaaattcatcaaattgaatatttaaaaatctattcattttattatatgtaaattatacccagattttttttaaagcgaataaaatgttttaaaagtgtgttcaaaaactagttaaaccacctttttctctactggtgtatttcatgttttaactgtgagtagagtcaccagagaggttaatcagtggctttcagggtttttttggttgataagttggtggtatcaaataagataaaatattaaaatttttacaaataataattgctttaaatacatatatttccttagtgctacatgttaaagaacaaataagacattcttccgtcattaagatggttaagctgttaaaatgacatcttaactagatgtcatttagtttgtcgtaatgcactgaaagctccagtagaagtagtggtattggtctttttttctccttgaggaaagggctttgatgttgatcaaaagctatctaaactagcaagaagatgattgcagtatgcaacaaaagggagaatactatggtgtctctgcttacaaaattaagggaaagagtagttatactccagccaaagttatcaaggttaggtgattgctgggatttgttgataaaatgtagatgaacagaacttcccaccttgaagtttagaagctatcttttgttcatcttccaatggttcttaaaggccaatgcaagtaactggtctataatgaagctttcattggttcttaatgtatgagaaaaataaggacagtaagtattgagaaatatctttccattcagtcatggatggtggtgtcacattgccaagtgtgtttttttaaaggactgttctttattacgagattataatagtctagctttttattgtcaaaaactactttttatgaaataatagcaacttataacattgtcgatgccctcatgttgacaaacctacatcagtctcccatcatcttttgttttcattttattgttccatctattaataattgtgactaggttctattggtgagtagcaatgagttcttcacgtatctatgaatactgtaccattcgatcatcacaataataaacttaaggcctaaattaatttaaaagcatagatactttctcatgcacttaatctaagatttcatctgcagcttggttttaagcaccttcacccatgacccttttatattagcctgactgtagttctacatgcctccttgtcaataatgtcttacttttatatttatagtatatgaaattgtttcacatgcattagcttattggatccttccatcacttctcttatctacagtttatggatttattttaaaaagaggttcaaggaagcgaaatcacttgctcacaggtatacaaggaagtaaatgaaagagatagaatttagtttttcatccttatactctctaaaacaggtcccctaagtatagcaggtttctcatcataggtgtactgacaagtatgtctattttaactatgttttgaggtaacccaaagtagattttcaaaattatgtgttaataattgtttttctctcactgcaaacacatataagatttttattaaattatggatcctaagtttcctctggatttgaatcaaactaacctttcaaggcgaacctaaggtatgatcaaattcctagtttatagatacattcatttaacaaatatttctgaaagtcctttacagagggtcattcacaacacccatatttccacaaggacagcaaattttgctttatcctttgtccctaaccagattgctaactcaacttaatctttatctctagtcttctttcctccccagtggtgttttattatttttctaagtcaaaggagccagactcctagattatgcacttcttgaatttacatgttgtaatctcatctgctcatttcctcaggcagtcattgtacatttggtaattatattattatagagcattatctatgaagccattttgttttcccgcaggagtgtctggaacccctgctggcctatccttagagttaccctgaagtctacctatacttaatcaaaaattttcagagaagtagatgtttatttctatagccagaaaaattaaagcttctgtttctaattctatactacaaatatttgtgtatgtgtacctatttataattttatatccatatatacacctatacagataatacccaccacattttatatgtatgtgagcataaaataaaaggagtgatatttttctaaaataataaacatatgaatacctaaatgtttcttttgcgaataactatgctcttaacattttacctgtcttgaagcagagctatcttcccatctcactcttttggaacttcttgctttctggagagtcaaaaagaaaaccgaaattgtacttgggcagctaaaatggattttaccaagtttgttttaaagatagcttcaggaatcttcaagctagagaagatgttaaatatccttgaataaaacccattatatcctgatgctgaagttgaggctgcaaagttagggaatttcagtaagcaaattagttcaataagagaattagggaattcagtcagggaattaaggggtaatcaggaagtagaatcctagtctctcatgctctgtacaaaatgtcatagtgactgggacagtccctcaagccctccctcagcttatatttaacccaagtttcatattgtgtgttctaagcctacagcgctttagagtgagcgtgttggatgtgttggggaggggaggagaggagatgcctcatcatacctgctgtaactgtcagacaggagctgagagtcaataatgaggtcagagccaagtcacaaaacccaatccagcggtctaaggccattcagtggaggggcaaagagccttatatatctaagaaggcctagaaatcatcattgcatcagacagcagcaaaatactgttattagtagagggaaatcctttaaaaatagacaaattatgttcaccatatctagtctggaaaagcagagaaatagatctgaattttgaaaagacataggcaaaataaataaaattaaatttaacagctatctgcccgaatgtgttgctaattttgtttcctacttttcttttcatatcaatggatattaaccaggcaaaaagatcatggtgatttaatttttttccttgtttgattttttaagtgtttaaaattattttttaaaatttaattttatgtttaattgacaaataatacaaattacattgtagggtacaatgtaatgttatgatacatgtatacatgatatatttgtttcttgtttgaaactttctgttttttttatttttaaagaagaaagaattacttagtggcttcttacttaaagcatttttaaagaggttttaatgagcactgctggggaattaggcacaatcaaatatcgcttctaggaataactcagttagctgcaaaaataatttataaaaaattctgttttgtgaaaaatattttacatatgtttgtaaaaacaagcactttaatttctgtgcattatatgaaggtttgacagttggggctatactcatttcattgagtataatgaagtcataataatgtgtttatttggctaaacccactaagctccaaatttaaacctgaagtaattttatctaaatagttagtttgggttaacttactcatcaaattaacttggtatttgccaaatttataccagctagaaatacacttatgagaagaatagtattttgtcattaaataagtaattgttataagtaggcagttgctgattttccaaaaagatgtttgaaacctactgtttatgtttgaaaacctatcgatgttttttgctgtaaagcccagatattataataaaccatcactttctttgatgtcacctacccccaccctgcagatactttttaaataaaactgcactattaaaatcttagaaagtttttttaaagacctacttttttgtgtattttaaacttacttttatttctgttatgcatttcgtatcagcagaaatgttaactgcttgttgctgatactctcattttcatttgcatttagatacctgggcaaccttgtaactgtattctccaggcagcacatgcggtggctctgggacattggtgggagaaagtccttttggataggcaagtatctgggagggaggctgcactgaggagggaggcaaggacatgaaacaaacaggcaccaccaccctgctacttccttccatgggttaaatgatagtggtttacaataataggcaaccaatagatctagccatttatcttttaaaactcatcttaaaccttttttttgacacactactttcatttttagacatctatcccaaagaaataaataggaatgtggtcagattgacaggcaagagaattcaatgcaataacatttctaaaaccaaaaaattagaaattgctataactaaagaatggttaaataaattatagtacagccacatgaaggaatatgtaagatttaatgtttttgcaagccattaaataataaagacatgaaaaattgccttacgtttattaattcatttaacaaatatatgttggatgcacattatattacatataaaatgtaaagtgtattccatttatggcaaggtgcaaagtgaaaatgcagggtccacatccatataaagtatgaaataatttagaataaaaacaattatatgcatgtggtgtatgtataaatataaatatatattatatttgtatatataaatatatataatatttacatattggaatatatacatatattcatatatatatgaatatatatatatgaattatatatatatatatatatatatatattccaaataattagaaatgacttacctccagtcaagaattataggtaggctgggtatggtggctcacgcctgtaatcctaggactttgagagaccaaggctggaggattgcttgagcccaggatttcgagatgagcctaggcaacatagtgagaccttgtctctgtgaaaaatttaaaaattagccaggcatggtggcagctaacagtagtcccacctacttgggaggctgaggtggaaggagtgcttgaggctaggaagttgaggctgcagtgagccgtgattgtgccactgcattccagcctaggcaacagagcaagaccctgtctcaaataataataataataaatataggtgattttaattttattccctcttttctgaagtcttaatattttctacagttttaacaataataaatcttttttttttttttttttttgagacagaatctcactgtgtcacccaggctggagtagagtggtgcaatcttggctcactgcaacttccgccccctgggttcaagcaattctcctccctcagccacctgagtagctgggattacaggtgcccactaccacacctggctaagttttgtatttttagtagagacggggtttcaccatgttggccaggctggtctcgaactcctgacctcaggtgatccacctgcctcggtctcccaaaatgctggaattgcaggcatgagccaccgcacccggccaaatgacaaatcttttaaaccactttaaaaacagaattttcagggcgcatcaaagtcagtatccccactacttctctttaaaggcgttgtatttgagggaactgtaatagttccctctcttggctttcactatttctgcagtgctcagtgggtccctaaattctgaaatgaactgagtattaagagacaagctggaggataagttttctctacatccataatgactcactgcaaggctctgtcctcacaatatgcttaggcagaatgtcactaatcaataattcagggagggcattcctaaccaaaagtatttcatttcattccacccaaaaatacagactgaaaaacagttggggaaggtaaaatgttatgtatctaggactgttttcatggtcaaatttgatttggggaatgtcggatcatgctatggcagggagttcctttctcattttattcttttttatttctattatgaaagagagtgagtaggggaatgcttaagaaaatattacagaagctttacaacattaaagtgtaatttgcaaaatttgccagtggaggtagagaggcaagtcgagaaaatctgctttttattggaattgtagcagattgaaacatcttaagctccagactcaaaataatacatagtaagctactttcaaatatgaaaaccaggacatttaaataatgaggaagaaaaataatatgcaagagaatatctgtttccctgtgataggagttctgcatgtaggatgatatgaataataataatagctgccatttattaaacacttatatatgccaagagctttacatgcattatcttttttaatcctcaaaacaaccctagatgtactatttttatgcccattccttagatgaggaaactgaaactcagagaggttaagtaacctgcccaaagatgctcatctagcaagtaagtggtagagctagaattggactgggatttgtttgaccgtttgtgtcttagagtattccaagttcctatcccttgttttagaacctgggcccacacttgcatgtgataactgagcttagagcaacagctggatatgatatctaagtataaacgcaataaaagtaattggtacattcttttggttcacattaggtttgaacgaccaagtgcatgctggccactgggagtggatcggtggtgaacctgttgccttcaccaatgggagaagagggccctctcaacgctccaagcttggaaagagctgtgttttggttcaaagacaagggaaatggcaaacaaaagactgtaggagagccaaacctcataattatgtgtgttccagaaaactctaaatataacagaccctacagggggccacctggagtttgtcacctatttattcacaggatctgtgaatattgctccatagaaaacaaattgttatgattgagtgggtatacctttgtgattctgtctagtgaaaatgggacatttttaatagtgccagaaagattgataaataaatattttttacaagataagatacaatttttgtatctcaataccttttaaaataaatgccagcagtattataaagtgtaaggtttgtttattccagaagaccctcacccttaccccattccaaatctcagggagcaccagtctcatagtccttggatttttttaaaaaaaatttttggtcccgttacctctaatgaatttattctgaaatatgtatcgtaggtgctcctaccactttagtctgagtgaagctaactctactagttcattaaaccaaagttgaaccgcaaagttgtccctttggagccctttaaatgtgaaatctaagattagaggctggggttgaaaaagagaattttctatgatgaaaaagaaagactttagatgaaagaatcttgtaggtggaggctcatctacaaagctgtagttcaggtaagaattcggggggctggctgtactcagagttctactcatcactattcatgaaacagatctccctttccaatttgagtgttggcattgtaccatcccaaagctaatgattgggtttccccagccttacagagtcatgagaaatttcaagtaacataatctgttcctctgtgtttattgtactgacaagcatttctcagggacacttgggataaggagtatatatgaatgatggttgacacatggaagaaaaatactgcttcctcagaaatgtcctgatgaactgtgctgatgaacagagaaaaataataccgaaaacagagcccctgaaagcctacattctcggaaaggattttgaggaattttgagccaccttaaatctttaatatttgcagaaatgccatgttaactagattctctaacggaaaggtaccttattaatttataatctcaggtgagtggaacatttttgtaacaatgaagtatgttgcagcgttaccagaactcccttctgaaatcaaggtttaacagttataggaaattagaatgtctgaaacatttatttaaagtttttctcttttcataatcactgagaaatatggttgtgccaaatgtcacttgctctatgagcaccaatgtaacttcagaatcaaattggggttatcaagtaggctagagctctggtgctggttttattataaaaataccttgagtgttgtagacactaaaactgcttgaagaaagtcagttcagtttctgggatataaaaacatggcaagctttttttatttcagttcatttatcaaggttgtaattaatagaaacatttagaaagagatattggaatatgatccagacattctgtctattacttaaatctaaacataattatagtgtcagagggtccttacctgagatgtcgcaggtgggctccagattggcataatgtacaggttctctgtgagacacaagcagtttctggcatttaaccaaaagatgccacacctatcctcttaccagctcctttcaaattccttctggtccacaggcttcttgcagtatggaaatgtgagatttgggctaaagaaaaaatagttgtttacctaaagggttaagtcctaggaaggaagtagaagtttgggaaatgagggattcaagggccactccttccactggaactctaaaactatataaaccatctaaaactggaaatctagaactatgtcaactgtgtagaaccttgtcagcatggcagatttattatacatttctgcaatataaatgataaatgatactgaactaattgcaaatgttagcataaagagtgttttgatttttataacaattagaaatgctacaagaatatttaaaaatattcctgatcatgaaagcattaatcaaattagaaaatccaagtcattttaagaagataaaaatagaaattcaggcaagtttgggtgatgggcggtattcatcacaaccttcattttattcttacaattgagctttgactcagggggaaaagaagtaaatgattgtcaaggttccctctgccttgattgatagtttctgatgggagtgggaaggaaggaattggagtaatgggtagaatgggaatgagagattacgggagagagagatgagatgggttgaacagaagaggatgggaactgatggtagctaggaaggaaagcgtcaagaaggacctgaatgtacccagcttttctccccaaacttcaataccacctcaggaaaaggcccactgtgtccaggggcgtcagtccagctcaatagtgtctagcttttcagaatcttctgattgtttggtctttaacaaaaacatagcatctatttgctaacaataaacttaagcaacatatgataatcatttcatctccttccaagaagtggtgaaaatgaaccaggtgacattaatttaacttctgtttttgtttatttttaatacaaccaaaaagatatgcacatattttaatttacattatggtactgtataatttaaaccataaactggtgctgattaatttctgcaacaaagcagcatattaaatgtactacatctagtgttgtagcaaaattaataaacttgttttaagttctgagacactttc

SEQ ID NO: 1187 - DNA, 25347 bp, Homo sapiens
gacccttccctcgcgggccgcgccccgccgcggacaccaccgggacctggctgcgccctcccgaccccggccgggcgtccggggctcctgcgcactcacttggcggccgcgcccgctggcgtcctcttgttctcttccaggtacttgcgtgtggggcgccgactgtgtgcgggcgcccctcggggctggcgaggggcacaggaggggcctgactcgcgctgggtaatgacagactcacagagcgccctggatggcgcgaattaacgcggggggcgggtgggggcgagggcgtgtgcttgggaggctggaaggggcgggatgggggatgggaggtaaggagagggcggcgggcccgggctgcagagagcgccaaggcagtttcgatgaaactgacccccatgtccctatcgcccagattcagcgattgccagctcctggcctgggccactgcttctctgtcctcattcacttccctccactgctgggtcattttgaagcaaattatatacacattagatcattgcatttgtaagtacttcaatatttatctctcaaagaaagtccgtttgcaggagcattgactcatgcctgtaatcccagccctttgggaggctgaggtgggagcacagcttgagctcaggagtccaaggctgccgtgagctatgattgtatgtctcaaaaaaaaaaaagaaaagaaaagaaaagaaaaagtctagtcttcataaacactcttgttaacccagcatccaggccttcactgagttgatgccgtggcctgaggcggtttacctggtggatagtgggtggcaggaagcatcagacatcagacagagggcagtcggtttgtttgtattaacatttgctctgggattttgcaggaaactcagatgccatttatctgggtttctgagctgcacagcttgacactgaatgaaagtatcttaagccacatatgtgaagaaaaggctcttttctaaaaatctgaactcgaattcaatatgaaaagaacaggtcgcagtgggccctgtcgggatcccagggagccgcaattcagggctccctgaatgattcatctctgcagcccacaccgacagaccaggattgctcttagcttgtgaaaaatgagtaccctgtctaggctatcctgagctaaccctcctattcttgccctttttgctgaaaggaattattgttaatacagctatttaattcaggacactcatccagacttctgaagcaaaaagccaatcagcatgaagctgctagcatattggttttgtgaagtaagtgttaaattataataattacccccactgtgctctccagcgtcactgtctgaccaccctgtcccagggggaggaggcccctctcaggccaagggagtctggcacagtgatgctggctcctggttgcccaggcacagtgaccagccagacttcacagaggcctcagggcttactataaataaatcactgctttgtgcaagctgagccaatgcagttcttccaactggctgctcctctccaagaacaatcaggacttaggtgggcaaacaggaagtctctcatcacagtggttctcagattcccaccactgtgtgggtgcctgaggcctgagcaaacccagctcatgtggcaacttcctcccccagctggacaggaagacctaggtccaccaggccttctttcatttctcacactttgcccccagcacaactttctacgagcatggattctgtactcttcatccccagacacatgggagaacaagatctgctacaagaccttttctttttttttttgagacagggtctcaggtctcattctgttacctaggctggagtgaagtggtgtgatcttggctcactgcaacctccacctccagggctcaaacgattctcccacctcaacctcccaagtagatgaccactttttaagaagatgttaaagatgagagcttagggctgggcgtggggctcacgtgctcccagcactttgggaggccgaggcaggaggatcacttgaggccaggagtttgagaccactctgggcaataaagcaagaccccgtctctattaaaaacttaaaaaaaaaagctgggtatggtgtctcacacctgtagtcctggcttctcaggaggctgaggtgggaggattgcttgagcccaggaggtcgaggctgcagtgagttgtgatcacagcctaggcgacagaaggagaccctgtctccaaaaaaaaaaaaaaaaaaaagcacctgtttatgacaaactcagctttctgggtgacatagatggttgtatgtaggtaacagggtggtttcacggatggcagattcattttagaaattgtaaaatggctagcagttttcagaacaagagattagttagaaaaggaaagtggcagctgtttgttttctgcagggcctgtcgggaagcctctggtttcttttcatccgtgaggagtggggaggaggcctcttcaggaagagcagtttatttttgtgaaaggaatacttactgatttcaaacatttggaactaaactggaacgtatttttctttccgatttctgcgtttttgaggtgtgtgtaaacccaccagcgcagcagctgggagggcccttcaaaggtgggcgggtggggtgagtgaggcccaggggatagagtgtttgcccagatttgaatctcatttggggaaagtttcagaggcttgggtggctgattgatcattccttcaatggtccttcatcagcacgtctttactgagcacgtgctgtgtgctgttctaggcgctgaaggatagaagtgaagggttcccccctcgtggagcttaggttccagcaataagcaaaacatgccctgcagcgaaaggcttctgggctgccggcgacattttcccaacgttcacaaccgggttccttccggacgcccgtctctagggacgcactcccgcctttggcagggccgctgcccggcggagtctcgcgaggatcttgtgacttatcgcggcatcgcccagcggttgccgggaaacggcgtggcttccgggggcgggcgccctggtcccggagtcgccgctgggcctgtccgctggcgtcatggtgagcaggggcgggagcggggctggggtcctcggcaggggcccggagacctcggggcagggaggcctcggtacacggagaccctgggaatgggaggcctggagcgctgggtttctggaattgagagctcggtgctcttgtgggggtctccgtggggcaaactcaggatgctcccggccccggggcctggcagcactcgggactgagacctgggctgtccagagccctgtgctcacaggggtggtcatagaacgcccagggcccggggtcggcggcgcacggtccccagaagagtgaacatgcgtcaaggggactctcatcctggaatggcagactcggtctgttggatccctgggacctagggtttcagctcacgaggctttgcagagcaccagggtccccatggaatagagccggaggcaggaattaccctaagacctttggtctcccggatggagagcctggggcacaccagagtggctagagatccctctacaccaaggaggcccggacaggtccagtgcccttggagtgcccagggcacaaccttgggatacaggaaccactgttcccttggaaagcctggcaggagtcaggcccagaccgagaagaggaaggcggagctcgtggcctcatcagctccatgtctgtctttctcttgtaaagggctctccctttgtggtacaggaattgtcagtaactcaatttctgggcaggtgtggcagggtgggtttcagctggtggggggaggaaagctctgggagccccaccaagtccctgcagctggctgtgaaggtcccaaatgctaagtaatgctgaaccttcctccactgccttcagggctttgtgatgaggtagccttcttggagtggagggattaaaaagagagcagtacattacgaattaaatttaagtagatgggttttctgacccaggaagggtcttctgaaaaccgactatgaaagaaactaccaaactaggccaggagtctgggcgcggtggctcacgcctgtaatcccatcactttgggaggccgaggcaggcggatcatgaggtcaggagatccagaccatcctggccaacatggtgaaaatccatatctattaaacatacaaaaattagctgggtgtggtggcgtgtgcctgtagttccagctactcgggaggctgaggcaggagaatcacttggacctgggaggcggaggttgcagcgagccgagatcgcaccaccgcactccagcctggcaacacgtctcttaaaaaaaaaaaaaaaaagcagggtgtagtggctgacgcctgtaaacccagcactttaggagtccaaggtgggtggatcacttgaggccaggagttggagaccagcctggccaacatggtgaaaccctgtctttactaaaaatacacacacacacacactcacacacacacacacacaaaattagccgggtgtggtggtacgcacctatagtcccagctacttgggaggctgaggcaggagaatttcttgaacctggaaggtagaggttgtgtagtgggatttttaaggaattagagagaccgatggggttcaggaggatatttattaattatttaggtgcaccggcccagtcagattaaaatccaaaggactgagccctgaacaaagagttaagttaccttttaagcttttcgtggggcagagggagatctgtgcagggggaagcatgcttcagatgtgagaaataaaggcagttgttcagttgaaacatgcattacatcatttcttactttttaaggaaaaacatgttttgcgacttgagtttatctgcctagtgaccttgcagccgcacagctacagaatcagggtcttcacaatgcctgggaagggaggagagacaaggctcactagccgcagaaaaacaggcagttaatttttaaaggactccagctctttctctttttcagggggagttgggttttcttatatataactgagtttctgcttacacactttttaatttcttttaattcctgttccagttgcagtgagccaggattgcaccactgcactccagcctgggtgacagagcaagactccatctcaaaaaaaacaaaaacaaaaacaaaaaacaaaaaaatgcaacagcaaacacaacagcaaacactaaacacaaccaaactacttctgtttctgttaggttgtgggaatatgggccttggtctgttggatccttggaccaaggaatatgggtgatatttctgttttcttctcatcagtgttttctaaaatttccacataatattttctctctctctttttttttttttttttgaggtagagtcttaccctgtcacccaggctggagtgcagtggcatgatcttggctcactgcaacctctgccacctgggttcaagcgattctcctgcctcggcctcccgagtacctgggactacaggtgcccgccaccacgcctggctaatttttttgtatttttagtagagacagggtttcaccatgttggccaggctggtcttgaactgctgacctcaagtgatccgcccgcctcagcctcccaaagtgctgggatgacaggtgtgagccactgtgcctggctccacctaatgttttcattcaggactaaatgaaacataaatgaagataaatgggccagtcgcggtggctcacgcctgtaatcccagcactttgggaggcttaggtgggcagatcacgggtcaggagttcgagtacagcctggccaacatagtgaaaccccgtctctactaaaaatacaaaaaattagccggacgtggtggtgggcacctgtaatcccagctactcaggaggctgaggcaggagaatggcttgaatccgggaggcggaggttgcagtgagctgagatcgcaccattgcactccagcctgggcaacagagcaagactctgtctcaaaaaaaaaaaaaaaaaaaaaaaagagagttcaagaccagcctggccaacatggtgaaacctcgtctctactaaaatacaaaaaaaaattagccaggcgtggtggcgggcacctgtagtcccagctcctcgtggaggctgaggcaggagaattgtttgaacccaagaggtggaggttgcagtgagccaaggcagcctggatgacgagggagactccatctcaaaaaaaaaaaaaaaaagataaatggatttaggttttaatgtttttaaaaaataaataaaatttccacatgaaatttgtaattttaaaaacgttacatagctgggcacagcagcagtgaactcctgtggtcccagctccttgggaggctgaggtgggagtatcagttgagcccaggaattggagtctgcagtgagctatgtgatcacaccactgcactccagcttgggcgacagagcaagactttgtctttaaaaaaggttaccgagacatgtagacacagaaaagcatgggctgaagactactgggagtagcaaagtcagcaggataggatatggaaatttgttacctgcttgagtgccctgtaaatgggtggccagacagaactgctcctggtgtcatgcgtggtttcagcaacttccacaagggggtggggttagaaggttctctcccatccttgtcaaagttgctaaaaccacgcacgacgccatgtgcagttccgtctggcagcccatttacagggctctcgtggtgggtgctgtctgcccaagctttcttgaccaggcttctctgaaggaagtttctctttgaaagaaaggaaacttgtggttgtcacaaccgatcgtggttatggaggcatttctccctaagcttactgaatggtgtcttgcaggtcttttccatggtggtcaccaatgttgccgccagcatggtaacatttggcagtgtggtattgagggtctttcctctgttttgcatccacagcagaggtctttactttttaccaaggagtgagtgggtttggaatgggttcccccctctcttagtttttggagacggggtctcgttctactgcccaggctggagtgcggtggtgcaccatagctcactgcagccttaaacttctaggctcaagtgattgtcctgccttggcctcccaaagtgctgggatgacacgtgtgagccactgcgcctggtcaccgtataccaaggaatgagtgggtttggaatgagttccctctcttttctttttttttttttttaagttacagtttgctttttgagatggagtctcactttgttgcccaggctggagtgcaatggtgggatcttggctcactgcagcctctgcctcccgggttcaagcgattcttctgcctcagcctcccgagtaactgggactataggcacacaccagcacacctggctaggtttcctctcttttttttttttttgagatggagtctcactctgtcgtcctggctggagtgcagtggtgtgatctcggctcactgcaaactccatgccccaggttcaagccattctcctgcctcagcctcccgagtagctgggactacaggcgcccaccggcacgcccggctaatttttttttgtatttttagtagagatggggtttcactgtgttagccgggatggtcttgatctcctgacctcgtgatccgtccacctcggcctcccaaagtgctgggattacaggcgtgagccaccacgcccggctcctctcttttctagaaggaatgttctccttctcaaaaggaaggtttctcctttgtgcttctccaaatgcaacaacaggatgtgtgtgtggtaaagggtgggaacactcagggcaatgatgtgctccaggtgagcagaagggagagaggttccagaaccttctctgccaaatgttcctgggagcaaatcagagccagccaagaaggggaagctgttagagtctctcttaccccattatttccaccaaaggcaccgaaaaagaaagggaagaaaggcaaagccaaaggcaccccgattgtcgatgggctcgctccagaggacatgagcaaggagcaggtgagcagagcgggctgtggcccagtccccgggtgggcgtgggcgggcaccacgcagggtgcctacgccgagtgtccatcttgccatgtggatccacccttctgtccaagccagaacacgccccccgcgtggcccataattcccatcagcggcaaagctttcggctgcaccatgtcttttcagaaaggtagtgcagcctgtgaaagagctttgtaacagggtggtaggagtgtggaaggacatgcttttctgatctaaaagctgtttttaatttcgtgtattctctttcaatcttaccctttttttgcacctgatgtgtatagacttatcgtagaacacacatgtagcattctcctttattttattcaccattaaacattatgtcaaaaaggaagtttttgaaagaaggatgatttacttcaaatcacatctgaatctgattaatcgttcatttttttttttttttttttttttttttttgagacggagtctcactctgtcgcccaggctggagtgcagtggcgcgatctcggctcactgtgagctccacctcccgggttcacaccattctcctgcctcagcctcccgagtagctgggactacaggcacctgccaccacgcctggctaattttttttttgtatttttagtagagacggggtttcaccgtgttagccaggatggtctcgatctcctgacctcgtgatccactcgcctcggcctcccaaagtgctgggattacaggcatgagccaccacgcctggccagtcattcattgtttttgataaaagtcccaacaaggagtaacagcatcagggctgcctttttcttgttgcttattttggggaggaggtgatgtttttatagtttctttgtaggagttagtttaagtctcttcttcatttggatgtagttaagggctacagaacataattacataattacaattttacctaaaaggctcctggagacggcagtgtgtggcaagcacggtgcaccctctggcctctgccctcatggacgactgcctgtgagcacctgacatgggacatgagggctgtgtcaactctgtgttattgttaataaatcttaccttcttttgatagttgtaagataaaaaatcaatacgaaggagactgaaagagtctcatgacctgaagttggagctaggcagaggtccttgaacaatggtaaagaatggctttattttacatgcaggcaaaccattggcagtttaagccagtggctaagcagagaggtgatggggtcaggtttgtgttctggaaagatgtctggagctgctggatggagaatggattgaacactgcgttgtcccagcatgtgagctgctgcccgtctccctgtccgcttcccattcctgtggagacaggccttgtggggcagtggccatggagcctacggggcagcctacggggcaggctacggggcagcttacggggcaggctatggggcagcctacggggcaggctacggggcaggcccttgcactgcacatcgcacgttgagccacagactcagaaggcttcttcagggtccaggcaggtggggagggatgggggtgacctggagactcctgccccgcagcagaggacagtttcatctgttcactggggagtgccttgtgggcctaggagttcagtgctgtttttttctgattttccaagagaagctggaaatctggatatttataagaaatctgaatattgagtgatggcaaaatctcaacaccatgtgagccaaacagaccagtcaggagccctggttcaggctctgcccaggagcctctaaaggtctgtgacgtgaagacatttgtcgttgtgccgaggcactggttggattcgggggtgcgtgtctccctcatgtctgcccggcatcctcggctcagaacccctcctgctgctccttcttgtttgctcgttgtcttgtcttcttttgaggtgagaaatgtgttttccctgtggggaatgtggtgttgagaaagaaaaaggctcacagtaagtggcctggggctgtgcccgaaaagtaactgattctgacggaatctcgctgtgtggcccaggctggagtgcggtggcgcgacctcggctcactgcaagctccacctcctgggttcacaccatcctgctgcttcaggctgcccagtagctgggactgcaggtgcctgccatcacgcccggctaatttttttgtatttttagtagagacgaggtttcaccgtgttagccaggatggccttgatctcctgacctcatgatctgcctgtctctgcctcccaaagtgctgggattacaggtgtgagccaccgcgcctggcagtaactgattcttaagggaaatgagctcccgagaaagctggaagcctgtcctacatttttttttaacctatttgcagattcgcaattgaaccctcttgagattttagagtctactggttttgtatattttttgcttaacattatatcttcaaaggtgaattttttttcatttagcattatgatatgaatttgtttaaatgctgctacatcatttgcatattttttttgggttaatgtgatatttctcctagttgatatactctaatttttcaaccatttccatatttatttatttattgtttagagacagggtcctgctctgtcacccaggtggagtgcagtggtgtgatcacggctcacggcagccttgacctcccaggtccaaacgatcctcctacctcagtcttctgagtagctgggactataggcatgtgccaccactcctggctaatttttttttttttttttttttgtagagacagggttttgccatgttgcctaggctgttcaactctggggctcaaaagatcctcccaaagtggtgggagccaccatgcctggctgtttgtgtattttttgagacagattctcactctgtcacccaggctggagtgtagtggcatgatcataactaaccgcagcctcaaccccctgagcttgagtgaccctcccacctcagctctcccagtagctgagactataggtgcgtgccatcatgcctagttaatgaaaaaaagtttttgcagagatggggtcttgctatgttgcccaagctggtcttcagctcctgggcgcgagggatccttcaacctcagcctcccagagtgctggggttgcaggcgagagccaccgcgcctcgcttatttccctgtttaaactggtcttaggttatttcctttttgatatttttgctgttgtaataatggtgtgggtaatatctttgagcaagatgctcttatatttcttttgagaaattttttaggcatcaattctcaggaatggatgaaaggatctagttattttatgattattggccaaattgaagagaattctgccacctgctgaatgcattctgtctccggagcttcctagccttatattttaactttttacatttagctgtttatttttaggtgaagttgagtcctccctctttcttccttgcctttcgccggccacacgccccgttgccgtgcatgggcccctgctcagtgcctcacctgacccactgcacctggccaggtggaggagcatgtcagccgcatccgggaggagctggaccgcgagcgggaggaacgaaactacttccagctggagcgggacaagatccacaccttctgggagatcacacggaggcagctggaggagaagaaggctgagctgcggaacaaagaccgggagatggaagaagccgaggagaggcaccaggtggagatcaaggtgagtggggccggcctgcacgtgctaacctggtcaccacagagccccagaggagctggatccagtgagggtgcaggtgggacattttctgttcttggctttgggagtcacagccttaaaggtgttttttataaaagcctgagggagagaccctgcaggtcctgagggtttaaaatgctgcctccacaacatggaaggaatatgggctctgggggcagactggcctgtttgcaactcagctctgccacttaataccccatgagctggggatgcacctcacctcccagccttggtgtcctgctctgtgcctcaagtgtacaggtttgcataggtgaacaggcatgtgtagctgtgtaaaggtgaggcatgcaagtgagcaggtggatgcaagtgagcatgtgtgtgcaggtgaggaggcgtggccaggtgaggaggtatgtgcaggtgaggtgtggggaggtgagcacgtggggcaggtatgtgcaggtgagcaggtaggtgcaagtgaccaggtgtctacaggtatgtacaggtgaggaggtgtagtacaggtgtagtgcaggcgaccaggtgtgtacgggaatttacaggtgaggaggtgtacaggtgaccaggtgtgtacaggtatggacaggtgagaaggtgtggtacaggtgtggtgcaggtgagcaggggggtacaggtatgtacaggtgaggtgtgttacaggtacggtgcaggtgatcaggtgtatacaggaatgtacaagtgaggaggtgtggtacaggtgaccaggtgtgtacaggtatggacaggtgaggaggtgtggtacaggtgtggtgtgggtgagcaggagtgtacaggtatgtacaggtgaggaggtgtggtacaggtgaccaggtgtgtacgggtacggacaggtgaggaggtgtggtacaggtgtggtatgggtgaccaggtgtgtacaggtatggacaggtgaggaggtgtggtacaggtgaccaggtgtgtacgggtacggacaggtgaggaggtgtggtgcaggtgtggtatgggtgaccaggtgtgtacaggtatggatggacaggtaaggaggtgtggtacaggtgaccaggtgtgtacaggtatggacaggtgaggaggtgtggtacaggtgtgctatgggtgaccaggtgtgcacaggtacggaaaggtgaggaggtgtggtgcaggtgagcagatggtactcccattgccctgcaggtgtacaagcagaaagtgaagcacctgctatatgagcaccagaacaacctgacagagatgaaggctgagggcactgtagtcatgaagctggcacagaaagagcaccgcatacaggagagtgtgctgcgcaaggacatgcgggcactgaaggtggagctcaaggagcaggagctggccagtgaggtggtggtgaagaacctgcggctggtaggtgtggcgggggcacctggaggctgacaggttgttgggacggcaagcctagtgctgcatgaactcctgtttattcaacagcaactgggaattcatatttctgcataagactttctgcatttttgcaatttgttgaaaaaaaattttttaaagcatgcatccaaacaaaccccattttgggaccaagtacacaattctgtctcagacctgagcaaaaaattgacgtcaccgaagagaaaaaatccagcttaggatctttcatgtgctgctgacacctgacacccagagacttttcctagggaatagcatcatatgcatttagtagaatgcaaaccaaccattaaaatatccagtgtgttgactcctgggcactgtgacagtttgtcacacaagctggtctgatttttacttttgaggctgggggtttccagggcaccattaaaattcatctgtgcacctggttcagtggctcacacccaaaatcccagcacttgggagggtcaggtgggagaagtggttgaggccaatagtttgagactagcttgggtgaaatagttgaaccccatgtctaaaaaatttaaaagaaaacattagctggtgtagtggcacatgccgatagtttcagctacttgggaggctgaggcgggaggatcccttgagctcaggaagtcaaggctgtggtgagctaggattgtgccactgcattccagcctaggtgacagagtgagacaaaacaaaaaggaaagagatcatttgctgagtgtccattagctgctaggtcctgatctgatctctgacaaaacgcctgcccgactggggctgttggtctagaaaggagagacaacaggtgagttggaagacaaaataaacgtgccagatacaacagagtatctggtggggaagagtgccatagaaggatcgaagtggggagaggtggggtgcggttttgtacaagcagttgaccggctgggagacgggatgggccagtgggaaagctcagagtgaccaggaggagactgtgggagagggtcagagcttgtccgcctcgaaagccgtggtggggactggagacgggtcagagctcgtccgcctcgaaagccgtggtggggactgggactttgaccctggtggagtctgttgccctctgagaacttgggcagaggagagatgtgtctcactaaggttcttcctggctgctgggttgaggagactttctgaacacatttgcctcacgcctggaagcagtccagcctccactgaatctggaagaaacttggtgacgttgctgacttcgcagcaaagcctgagagtgccgaagtcttgagccctccagaattagctggtcttaacccaggtcctggatatgatattgttacataatcagagtttcctgttgggtaaaaatatggctttaggccgggtgcggtggctcacgcctgtaatcccagcactttgggaggccgaggagggtgtatcacgaggtcaggagtttgagaccagcctgaccaacgtggtgaaaccccgtctctactaaaaatacaaaaattagccgggcgtggtggcgcacacctataatcccagctactcgggacgctgaggcagaagaatcacttgaacctgggagacggaggttgcggtgagccgagattgtgccactgcactccagcctgggcgacagtgtgagagtctgtctcaaaaaaaagaaaaattactgctttaaaaataatttatttttttatgcaaattttaaatatataatgtttatttaaatatataataattgttcattaaaactatatatttatttatttttagagatgaggtctcactctgtctcccgggctgcagtgcaatggtacaatcatagctcactgcagcctcgaacttctagtctcaagtgatccttctgccttagcctcccaagtagctggaactatagatatgagccaccacacccacctaatcttttttttttttttttttttttttttttgagatggagttttgctcttgttgcccaggctggagtgcagtggcacaatctcagttcaccacaacctctgcctcccgggttcaagctattctcctgcctcagcctctcgactagctgggattacaggcatgtgccaccatgcccggctaattttgtatttttagtagagacggggtttctccatgttggtcaggctggtcttaaactcccgacctcaggtggtctgtccagctcggcctcccaaagtgctgggattacaggcgtgagccactgtgcccggcaatctttaaattttctgtagaagatcttgctatgttgcttaggctgcccttgaactcttgacctcaagtgatcctcctgccttggcctccagcgtgctgggatgacaggaatgaatccttttaatatgctgcttcaggcagcagtgcagcaggttggaagctacacacggcacctggaaagatcccacagctctgtgtggatgtggctgctgctcttcaggctgtgggatggtttggcgatggaaccaagcgggttcagtgctcacgacgtctgttcatgttctctctcaagcttagaggtgactttagttgagggaggtgagttagggaatatggaggtgaccaaaaccatgaggaacagggtcagcctgaagggagcgggcttccctctgtgtccggctgtgtagtaatggccgcttctccctgtgcagaaacacaccgaggagatcaccaggatgcggaatgattttgagaggcaagttcgaggtcagtttcccgtgtgctcattgtgtaggtgccagagacacccccgccccatcagagaggaatttacctccagagcttgttaactcagggagcaaaaactggattaaaacagccaaggcatgcaagagaaagaacatggaagtttccaaggccagtggacccactcagaatcccagaacaacctatttccatgtgagtttgggaggctgtgattaccacacacattcccactcctagctaaaatcagtagttatcagcaggtggtagctattcagtgccgtgggcagccttcttaaaatagtcttctccatggctcctggtctgagaaggctccaatttcagaagtctctgtgttttactaataaaggctgattgtggctgggtggccacacaggcctcggttactgctcactggggtcagctgacattcagctgttggcacccccagtgcagggagcgattagcaatgcctgtcactggcaaaggcaggccgacagtggtgtgtgtgctgagtgtgagcatcagcagaaaaactcagtctaaacccctttgttcttctcttgcagagcttttgcctgcaaggctgttctgaccacagtgggcgttttgggcccgtttacaggctccatgttctgtagccgtaggggcaccacgtcttcctctgctaagctgctgtttgctgctgcctttcagaaattgaggccaagtatgataagaagatgaagatgctgagggacgaactcgacttgcggagaaagactgagctccacgaagtggaggagaggaagaatggccagatccacacgctgatgcagcgccacgaggaggccttcaccgacattaagaactactacaacgacatcaccctcaacaacctggccctcatcaactccctcaaggtgctgtgcgtgggctgggctggggaggcacactctgcctgtcctagaatgtgggctgcagagtcctggggatccagaccccagctctccaccccaacacacccagtactttttataagattgtttgacaatgcccctctcatatccttaactgaaattcctaaataacgtaacctatctctacctattgttaaaagcagtcaggatattgccctcaccgtagtgcagagggggaagtaatgaagtgtgttctggtttgtaaaagctcagatggaaccgcagtgagggccgtgatgtggctggagtggataggtgtcatagtcactgcctgcgacaggtggataggtgtcatcgtcactgcatgctggcagtgacaggattttctacagtagacaacggcccttggtggaatcttgaacaaagtatagtccttcagtctgcatggaagctgcattcccagaaaactcagaataagttgaagctgcagaaatactgtttatacatagaagacgtctaggtgccagcatgcctgaggctggcagcagctggtgatgggcaggagagcacccagctctcaccatgcaggccacagcccctttggttctgcctgctgagcccctgccgggcctgtgcttgtgcctgcaggagcagatggaggacatgcggaagaaggaggaccacctggagagggagatggcagaggtgtctgggcagaacaagcgcctggcagaccctctccagaaggctcgggaggagatgagcgagatgcagaaacagctcgcaaactacgagagggacaagcagatcctgcttgtgagtttcccgctggattcctctccctccttggcatgagcttgcctaggctcaggagggaggagcatcacagggaggggcttggcccttagggcaggaagggagacggggaggcctgcatttctcctttctctgcctcgtgttctcctggggaaagtaaagtctgggggtgttttggagacaaggccctcatcttcaccacgtgctaccggccggccttggtgagactcagctgcttgtgtcctggaaccaggtctttctggcgattatttttggccttgccatctcccaggagcccgtgttacttggatgactgtgaatcttgaatactttctgtcccctactccctgtttttcctccagtgcacaaaagcccgtttgaaagtcagggagaaagagctgaaagacctgcagtgggagcatgaagtgttagagcagcgattcaccaaggtgagtggcaccacgctggccctgcagttggcggtgggtgttagagcaacggttcaccaagttcaccaaggtgagcgggcactaggctggccctgcagtggggatggcacccctgctagccagggacggggctctccttgtggcccctggaccagcttcagatgccttggccaggtttctgggttctgaagctggaggccctgttccctgtaactcattccgcagcttctaagaggcaaaaacctgtggcctgttctgcatgcatattctgcagaaggcctggggtcttgatggggaacggatcacacatgactttcgtcccctcgagagctcacctctgaaagcacatgagggaggctcttaagtgtaagtgaagatgagtctccggctgctcagtgctggtcctcacactggcgagttttatgggctcccttccaggtttcctgcatgctctcgtgtggatgtgactttgtatgttacgaacacgggatcaggccataagcacaatttgctttttaatctcacagtgtatcaggctgcacataggaagcggtctcatccttttcacagctgcttggtgctgcgttttgtgaacgtttgatcatttagccgactcccgtctgtttctaatgctctgctgctataagcattgctgcctcaatccttttaaatttgtctttgtgcacttgtgtgagattgcttcttaggaaagccagttcctagcagtgggattgttgagtctgagggttctgttctgaggaccctgatcatctgtccagagggctgctctgagtcacacacctgccagggtgcggaggggccgtttccatcctcacctgcaccagatctgacaggtttaaacctttgcagaagtgactgggtggaaaacatctcatttcgtgggcacttccaagattcgcagtgagtggtaggggtgctcggtcctgtctctgtcccttaaagacgctccttgcctctgttcagtttcaaagttctggccaaggaccaatccctgcagcatgggcccctcaaggctttgtctgtggtgtgcggggccagggcatcttatcttgagccgcagttatatgtgctgttttgttctctaacctaattgaaatttttgaacacaaaccgttgtagtgggattcgcttctcagaaatatcccatctgtctgtcagatctagccccaccttcagagacacctcaggtcctgcacgacgtgcattgctaggctgtgccaactcttggcacctaagggaagggcacctgcaaggtagtcagtgagatcctgaggactgctgtgttagacaaggggcccttccttctccctgtgggttttgaggtggacattattgggaagaggacagcagagacgtgcctgggttggagccttgttttctgtcacattttcttccatttgaatgtggttcctgacagtgtccaagctggtgtctcttcctagagaaccgagagctcaaatttatcagcaaaatttagagaccaaggcagttatttatttatttatttatttatttatttatttatttatttttgagatggagtttcgctcttgttgcccaggctggagtacaatggcacgatctcggctcactgcaacctccacctcctgggttcaagtgatactcctgcctcggcctcccgagtagctgggattacaggcgcctgccaccacgcccggctaatgtttggtatttctgatagagacagggtttcactctgttggccaggctggtctcgaactcctgacctcaggcgatccacccacctcaccctcccaaagtgctgggattacaggcgtgagccaccacacgctgctcagggtgttcacttttttatagtcttcaacaaagtctagatttttttagaatgcacaattaataagtagaagaattaggagataaaaaagaacagttttactggctggcaggtagctggctccaaggccgtgctccagatccaccatttgtggggcggacagcacatgtgatgccaggatctggggctggccaagggagcatatcctccaaggggccccacctgcaagctcggcctgctggatgccctggatctcaaatctcacctgagcccacagccctcactcgggcaagactggcctcggccacccatgaagcagctttcagggtggggctgcttcagctcttaccaggacacttatggcttccagagacaccttcctgagagaagggcttatgctgatgtgttcctcctgccttccactgcgtggatggctctacaaagggccagggcgcaggcagtgtggacaacacactgaccccggtgctgtgggagtgggcactgttgggaggcagcgtgttccaggcaggtgcagaggtgggaggcagcatcttcccagcgagatgtccccaggtgaggggcctcatcgcccacccccagcgctgtccctacaggtgcagcaggagcgggacgagctctatcggaagttcaccgcagccatccaggaggtgcagcagaagacagggttcaagaacctcgtgctagaacgcaagctgcaggctctgagcgccgctgtggagaagaaggaggtgcagttcaacgaggtcctggctgcctctaacctggaccctgcagccctgacgctggtgtcccgcaagctggaggtaggccctagacaggctcctgaccccagtgggcggcctcatccctgtggcaagagtcttcagttctgtgctgctcctcggataggcacagagacccctcggtcggccactgaggaggggcattcatgggtttcctgtggccagtttcgggccagttgggaactgtggaagggctgggcaggggaaccagatcagggcccactctgctattgatggggagcacagggctggagggggctggttggggccagcacagaatggggacgggcagagggttggagagccgccaggaggctgagtccacaggtggggctgggaggggccgaggtgacttggtgtttgcacatgggggaacgacgggtcccggcccagtgggcggtggtgcctgtgggaccctggtcatctgggatggcctggctctcagggcctgaggtagtgaggctgtataggaggggcctcacctgggccagaggcactgtggccccgggactgaaaactcatctttgtttgctcagcactgggcccagtgagcacaggcaggtgagggagtgagggtcccactgttgggaggtgggggaggcgtgtttccagctcctggctgagggctgcacccagcctgctgctaagccaccgaaatgagggtgaagagagcagtcgtggcctgtgagggtcattgcagctgcgcccacgcgccagggtgaggatggaggatggagctaaatgtgggtcaacccctcctttcctggtcattgttacctcgacttctaagtgaggaatcttctggggaaatgacagaggcccccgcagggacactgtttgctgctggccaggtgtgagggggctgctgtgtcagtgggcagcagggacggctctaaagccaggctgggcccagcagtgccccacaggcaggagcccaagaagtccctgcctcgccacgtggtgagacccttgcccacatctgggcggggccagcgctgctgaagactacttttttctgttacaaaaaagtgggatagccgggcgcggtggctcacgcctgtaatcccagcactttgggaggctgaggtgggcagatcacgagtttgggagttcaagaccagcctggccaagatggtgaaaccccgtctctactaaaaatacaaaaattagctgggcttggtggcgggtgtaatcccagctatttgggaggctgaggcagagaattcctggcacctgggaggcggaggttgcggtgagcctagatcgcgccactgcactccagcctgggcaacggggcgagactccatctcagaaaaaaaagtgagatagtacattcacaagcctcaagaaatttaagcaatatgtaggtggtgtttagtgaccagtctccacagtgtggctgcacgctgcctgccctcacctcatctgcatttcttgtggtctggactgctctttgagttttttcttgagacggtgtcttgctctgtcacccagactggagtgcagtggctcaatctcggcgcactgcaacctccgtttcccaggttcaagcaattctcatgcctcagcctcctgagtagctgggattacacaggtgtgagccaccgtgcccggctacttttcgtatagtagagacggggtttcgccacgttggccaggctggtctcaaactcctgacctcaagtgatctgccctccttggcctcccacactgctgggatcacaggtgtgagcggcagtgcctggcctggactgttgctggagaggcaggttgtgcaagctcccagttctctgcttcttccttgttttctctccacccttggagacctttttctgctgacaaccctgtgtggatggatgcatccatcaaaccaggctgctattcgctggatctctcagaacgcccactggagtccccaggccgctcccgttgcctcggccaaaagatgagtctcaaactcccatcacctctctctcctcaggatgttcttgagtcgaagaacagcaccatcaaggacctgcagtatgagctggcccaggtctgtaaggtacggctgtgccctgccctccctcaggggcaccccctcggtgcccagactgttctaaatgcagacggtctctgaggaccccacctgtgcccacttcgtacctcgtttgacaaggcagctgtcactgtccccacgtgagggtgcagtcatagccgagagcatctggattctgtgtggtctggggcagtgcactgctgtctaggccatgtctctgctgggatgggtgtagggggggacctggacgcttccctggtcagccccttcccctgggcagggagtcagaaggtgctgtgcccaccggggaaggaaacagacgtcattcaacaggggaagggagggcgtgaagaacctgagtgggaaacacccagccagggcccagagccctcccagaccacagctctgccctgagtgtccctgccctctgcctccgtctcgtcatttgtggaataggaatagtgacagcctctccctgtcgtgctacctgagccaacgcagtgaaggtgcttggagctgtgtcccacacgggaaatgactgataagcctttggctttatccttctgcaccgtgatgctcacgctgcccctccatggagctgcactcagctctggtggtcctgagcgtggggaccctcagctccctgacactgccctgtctccacaggcccataacgacctgctgcgcacgtatgaggcaaagctgctggccttcgggatccctctggacaacgtgggcttcaagcccttggaaacagctgtgatcggacagacactgggccagggccccgcgggactggtgggcaccccgacgtagctgcccccctggggggccacagcccagagaaccagcctaggaacactcgggatgacaccccttatcacaccaaggacagcaagttttttagattttatcatcagcaaatgaaagcttttcacatgttcttgccatcctctttcctggctctgtggaggagaaccacctgcaggaccctcacccatggtgtccctgtcgctcccttccctgggtgccgcacgtccagcctgtgtccaggcctactccctggtctcacctccgaccacagtcggcggcaccttctcagagtgccccgcactcacctgggggttggggcagtgccgcgctgtgctgcctgtcttcgcgccactgttgtcccaccgaatggacagctttgcaggtgctggcactaacttcattgacacctgagtcacagctgcccagtgggattctccagggggccgggacttccctaggaagtggtgagccaatgctccctgatgagcacaaagcccgctctgttgagggctgggtgggtgcagccagcgtgcgggaacgggcaggcagcctcccgctgccagtcttcgctctaactccctcggtaggtgatgtaggaccaggggcacgtggaacttctgggccttgctggtgatggttaaaacaacctgagatggagaggccaggagagagtataaggggatagcagcaaaccacctatctggccccaacacacctgagagaattcagcagcccagactgagggtctgggatggggtgaaccttccgcaccagagggacactccacagaagccacagcccagtaagtcaggcgcttctgcggcggctccagtgtggggtgaggcagtgaggttaggcccagagagctggagttggctcagatgaaaacctctgtcaacaaagaggggatgaatcacccttggcccagcctccccacaaagcctgaccctgggcaggtgagtgacgggtgtgtcctcgtagagtctattgctgcctggacacctttcttttgggagctcaaagcaagtgagctcacctacctgccaccgcccaggaccagtctgcccactgcctaaatgatgcccggccagcaggacctggcctgcagatcccagtgagtcatgagcctcagccccctccagcccactggggctctcacctccacatgtgggtagaagctttcctgccccctcttcctccagtagccctcagtgtcgaaggtgagcttgtaggtgcctgccttcatctggtccaggacagtgaccatctgggtctgtgtagctggggagaggatgaggctgcagagatggggaccagaagccccccaccccagctttcctgggtctgcatcccagtgggcctcagacactgccctgccacctgtcagacttgggtgagcagacacagtgaggctgttaggtcctgcagttccagagcagtctagggacaccactgccctgtctttaggaaatcacaacacagagaagcaaaaagggaaaaagtctcccacaatttatcccatgagcaagaaccactttatagctggcatatatttttccagattttctctatgcataagtatatttgtttaaaaacttataaagtggattatactatttgtattgttttataa

SEQ ID NO: 1188 - DNA, 54958 bp, Homo sapiens
tgaacccttctttttgcttgcgttgttgaaagaaggcaagtctatggataggaatgagtgaggcacagctccctgaggatgccatatcttgcccgtttcttgtgtattaagtgacatcacgtgttaccaaactaaaccggctgcatttgcctgcgcacaacataaaaccaaacacccaagcattggatttttgtagcaagaaagatgtattgccaagcagccttgcaaggggacagaagacgggctcaaatctgtctcccaatacttgcttcgcagcagtagatttaagggagagattttggaagtggagtttcgggctggacggtgattggctgaaacgaagaagtgtttagaaaatctcttggtcatgagctgttgcttcttcatgctgcttcaagggtcacatgcagattcaggaggtggtataaaacaagctgtgggaatttgggctgtgacatcaaagggccgctcctcgggctagtaagtctattttgcacaggctccagtcagccatattggttccaacctgttccagcaagttgtataagcagaggggattatagcaaactgtttccttatcggctgccctgcaagacaagctcaagatttctgttagttaccagtttctttaaccctgtcgggcacagtttcacatgtaatcagaaaggaacttgcaagacacatacaactgaaagaaacttggtctttggaagttgtcagtaaggtcacaaagttgtgatgctagaagcagccgtatctgagattatgggaaagagatgatatattggaaaaacaacagcatcactttaaacattactctaaatcaaggtttctcaaccttggcactattgacattttgggttagatagttctttcttgttgggagactgccctgtacattgtgtaggcagcatctcaggcctttgtagaaatgtcagtaccaacccaccccctccccactgcacaatcaaaaacgtcaaaatgtcctttgggagcagtagttttgagaaacattgctttgcagatatatatgtttgtttgtttgttttgctttgtgacagggtcttactctgttgcccaggcagaagtgcaatggtgtgatcccactcactgcaacctctgcctcccaggttcaagcgattctcatgcctcagcctcccgagtagctgggattacaggaatgcatccatacacgcggctaatttttgtatttttaatagagatgggatttcaccatgttggccaggctggtctgaaactcctggcctcatgtgatccacccacctcgacctcccaaattgctgggattacaagcttaagccactgcgcccagctgagaaacattgctttaaataatctgtggtgaaaggaagttcccaccacctgcccactcactcagtacctctgtcaccaaccctcttccctgggtgtttccaagtacagagggtggaaagggcttttccacatttcccctgttttggtagtaaacattaggaacagccattggccgtggctaggctcagccacccacagatatggacacagtagtctgacaagctgggttgctgggtgctatcagtccaggctcaactgcttgcactgacaccatttccctataggaggcaggtgagagccatttctgaggaaagtctctggagcccctcttccttccactgaaagttgtgcaaaaagatcaggaagacagcgcttggatggaataaatttcagtgtatccacttgacacattatagtggctgtcccaaagtttaccttatgccaagtactttccatgtgccacatcatttaatcctcacaaaaacaggggaaaatattattgccaccctacagacatagagactgagattcaatttaaggagatggttggtaagggacagagttggggttcagatgtcaacagtgaaatgcttaacaaactgtcatgcagcccactcctggcaactcttcctgctcctctctggcctcactcagcctctactgttccaggaagcctcattcatagtcatgtggttgcagacttcccaagctcactgtgttaccaaaaagcaagacctgccttctgctgcatcgccccagctgtcacccaacttggattcagtcccagcactgacacatcacaaaatcacaaaagtgagcaaaccattacctccctgagtctccttttgtttttatctataaaactagaaaaatattctttccataggaatgttgttggaaataataaaacattatattacaagctctagtcattgttgatgtttaacaggtaacagtgataattatttgtcttctcattaatgaagaaaaggattattaatcatagagggtggaaggcatctatgggaagtagagatttgaagataggctaaaacccaagtaaggcctctagattagataatagtattgtatctattttaatttcctgctttccatcactgtgccatggttatataagagaagtctttgtttataggaaatatacacaagaatttagaagtaaagggacattgtgtctgcaacttactcttacagggtgtgtgtgtgtgtgtgtgtgtgtgtgtgtgagagagagagagagacagagagagagagagacagagagaaagagaatgataaagcaaatacaggaatcaggatgaagcgtatctgtttgtttgttttgctttgtgacagggtcttgctctgttgcccaggcaggagtgcaatggtgtgatcccgctcactgcaacctctgcctcccaggttcaagcgattctcatgcttgtattgttcttgcacctgttctgcaagtacaacattgtgggaatggaaaatgcaggaaatgggcagtaaggctatgaacgaagcccgcacaggagtgtgggtagcagagttctctagtccaggctcccacctgaggtgctgggacctagaagaaaagcctctctgcagacagaactggagttaacgctgtccacgataaatggcccaggccctgttaagtttgccccattgagcaaaacaagtacccacccgcctttgcagccttgcctagctcacataaggtgccagcccttgctgtacagcagaacctttggggagctggacaaaagcctatcaaggagcatacccccaggaagcccagtccaggtggggagcccagccacacaatggcccttgcccccacacctcctcattcagtcagctaaggccatggcagctgagctgcctccacagctcatataggaaaagggtgtggaaaggggccaccaatgtggtcaggcctccatggcctgagtaggtcaccaagcctcaggtgcacagacttgatgtcatcaatcagggtctgtcagcacacctagccctcaggaacactgctccccactgcaaccccacaccaaggcatcctgggctccctctgggttctccaggccccagggaagacagacagagtctgccaccaaaggtttgagctctgccactggctacgaagcaataggggatgtcagagcaagggaggaacaggacaggagtatacgtgggcaggaagggattacagccaaggaagacaggaggcaggtgccctgattttgaggctgtgccccagcaggggcttcccagaagctgtatttgtcctaagacacccctctgcagctgaggggctagagatggatatgtagctgtgttaggccattcttgcattgctataaagaaatacctgagaccaggtaatttataaagaaaagaggtttcattggttcacagttctgctggctttgcaagaggcatggtgctggcatctgctcagcctttgaggaggcctcaggaaacttacagtcatggcggaaggcaaaggggaagcaggcacatcacacagtggaagcaggagtgagagagagagaggcactgggaggtgccacacttttaaacaaccagatctcgtgtgaactcagagcaagagctgactcatcaccaaggggatggcccaagccattcatgagggatccacccccatgactcagacacctcccaccaggccccacctccaatattggggattacaattcagatgagatttggtggggacacatatccaaaccatatcagttatcagtagccatactggatgaatgccaggaacttagaattaggacacatggtcatttaggcaagtggcttgtcctgtcaatggtaccctgatagtcgtggggttgccccgtacaaaaagcgagaggaagtctacagagctgtcaaagaggggcaggtggaaaggcctgcagaggagtcccctgctccacaaccaggcgtgcacctcccacatcctcggggctgtaggccccacatgagagcagaaagaaggatgcagaggaaggccaagaacacaaggtgtgcccttggaaaggctgggcacaccaaacacaacctaataaacaacagcaatgagcacacagggaaagtactcacagggaaaccatcatgaactagaggctgatcccacaccctgccacatggggccccaggccccagcctatcaaccagtggtccttattgccacagcgattggtctttggataggcacctgatgcaagcttcagccaatcaacaggccactcagctggccatcagtaggccatccaatcagagcaaagcccaggactttcttcgactcttaagaaaagagaagcaaagtaactggcacagattggagaggatcaaggaaccccgagctggatacatacaaactttgggttaacatggatgattaaatacatatgtttatgtgaaccacctcccaaatatgctccactataatgacacaagacaaagggcagggggagaccaattgcaaggtggcgcaaatgagagatgctaccaagggtggcgggggagagaggggagcagttgtcaagttaggaggcaacaggctgagggacagggaccagcagacggggagggaggggctgaagcagaagtgtccagtgtctggagggatggggccagaaaggcaaggggcatcctgaagaagctatacctggggagggcagctctctccccacctgctccccaattcatcagccaggaatgccccatccaccccaccccagggaggaggacagaggactttcgtttgggagcattgaatggttcagagattctgcaactctgcggtccccaactaaactgctcattgtttcaagcagtccctgttgggtaaatgtcccccattgtaaccggactcggattccaccgcttgaaagccaaatacaagaggagaggtttggtgggaggaaaagtggttttaactagagccagcaaaccaagaagatggtgaattgttgttttaaagcattcaattatctcaaattttaaaatttatcataggattctgaaaggaaaacttggtatgggacatacgtgggagcagtgcagggtacagggtctatgtgtcttgatccaatggctgtcttgagtatcacctatcctgaggtctggttggtgttatctttccttcggccagatggtggtgggtgaattgtttcgactccccctaagttggaggattccgcaggggttccgtgtctggtttttgtttcaagattagcccctggaattcccaaataagcatagagttagataagcgggcatggtgcaaaggagtgtctagtgggaaagggagagaagcagagtttcaaagtacatttcaaggttacattttaagactaaagaaaaagccttaaaatgcatttttaaagctgatttaatgcttggctacactaggctgtggccagtgtgcagtgtggctgctcttggatcaggtgatgtttcatcagctgtgtccagggagggcagggccatgtggcagaacctgggacctctgtgtgagggactaccttggcccctgtccttagcaggaagctatggtaaggaacccttagggagacattaaattggggagaccgtccctgccaatcctttaacctccccagcctcagcgacctcagttggaaagtggtggtaataatactaccactgaccaggtgtggtggccagacattccacactttggcttcagccgctccctccccactctactgtaatcccagcactttgggaggaagaggtaggcggaacctgaggtctggagttgagaccagcctggtcaacatggtgaaaccccatatctactaaaaagaaagtacaaaaaattagccaggtgcagtggcacacgtgtgtggtcccagctactcgtgggtctgaggcatgaaaattgtttgagcctgggaggcagaggttccattgagtggagatcgagccactgcactccagcctgggtgatagaacgagattctgtctcaaaaaaataaaaataaaataataataataataccactgcctgccacactaagattgtctgattagatgacagaatgaatgcaaaagtactttgtgaatcataaatgttttcatcaatattagttataatgacaattgctccttctcctaataaatgtattgcctttctttaggaataaatataacaagaaatgtgtaagatatatatgagaaaaataataaaattcacctgaaggacataaaagaagaccaaaataaatgaaacaacacatacttctagatgagaaaactcaatattataaagaggttagttctctaaaatgaatccctaaacccacaaagtcaatgtatttccaatgaaattgtcaacagcattattttccgaagtgggatgagtagtgctaagatttataagaaagccaacattccagagcagtggggaagggattgcttcaccaccaaatagccatattagagattcccttgcaccatacccaaaccaccatctcccaggacccgggagagcagaaaagaggaatgagaagaaaggcgaggatgtgaggtgtgccctcataatggcggtgcacgcagcacaagcaattgcagaaagactaaagtactgaacaaatagaaaacttggaaaaatattagaaggaaatgtgggagaacatttttgcaatttggggattggaaacggttttcttaacaagatataaaaaccccaaaacaagaaaacaaaggttgaaattcataaaaactagatacttctgtatgatgaaagacacgattaatcaagttgttaagtttagcaatagactaggggagatatcatagtatatttaacagacaaaggattaatagatactacagatgaaatataaaatagtttctccaagtccataggcagaagataatccaatagcaacatagttaagtaatgtaaacaaatcatccttagaagaagaaatgcaatcaccaagaaacacatgaaaaggtgtccagcattttgcaattcaagcaacaatgaggtgacagatcggcaaaaaactcataaagatttatcatctgaaggattggccaagataaagccaaacttctcgtgttggcagaagaaactggtgaagccatgtgaagaggccacgtggtcctgcctaccaagatgtaaaatgtgtacagcatttgaactagcaattcagcctccaggagccatccagaagaaacactgacacacacttagactccggtgaaattcaaggacttctgccacagcctgcttcgtaatagtgaaaatctgaaactgcctcaatgaccgtcaataggaagttgattttaaagtgttacagcacatctgtctggagagatcgcactggccactcctcctcaccccctctgctggacctctgagcgtaggtggcctggagctgggtcctgagccctctttggtctataccgacactacccaatatggtagccaccagtcacgctggacacttgaaaagtggccgatcctgactgagaagggccacgagtgggaaaaacacaccagacctcagtgacttaggcagaagtatgttttgttccagactattgactgagcccgcagctgagttggctccagcaccctggccccctgctccatccactcactgggactccccactgcacagggcaacctctccaggggcacttgggctgcgaaggggagagtgggtggcatcccaggctgaagcttcctgagcagggccagaggaggagccagtccctgtgggcctctgttctgacagtgtcaacctcagccaggcttgtgtgggccaggtgtactgttctggttcagatttcaaggagatagtcagggcaggccgcgccaaagccctccgatgggctcccctactgcctggcagacctgtccagctttggactctggccctgcgacctggaagtcaggctgccaagaggtccaggcagtggcctccactgtggagggtctctggagagtttacagccctagataggggggttagggatgtgagatggtcccaggggcctgctcctgagccacgccaagctgcctgctccctttcctctgcttccagactcacgggatcctctgctcatcagaacaggagtgtgggagaccctgagacactgccccaggatctgaacaggtggcaaaggcttaacaggctagcggtcactgtagtgacaaggcgattgagtggtcaccatggtgatggggatggaggctctttgccaccagtcccagttttatgcatggcagctctaatgacaggatggtcagccctgctgaggccactcctggtcaccatgacaaccacaggccctctcaggagcacagtaagccctggcaggagaatcccccactccacacctggctggagcaggaaatgccgagcggcgcctgagccccagggaagcaggctaggatgtgagagacacagtcacctgcagcctaattactcaaaagctgtccccaggtcacagaagggagaggacatttcccactgaatctgtctgaaggacactaagccccacagctcaacacaaccaggagagaaagcgctgaggacgccacccaagcgcccagcaatggccctgcctggagaacatccaggctcagtgaggaagggtccagaagggaatgcttgccgactcgttggagaacaatgaaaaggaggaaactgtgactgaacctcaaaccccaaaccagcccgaggagaaccacattctcccagggacccagggcgggccgtgacccctgcggcggagaagccttggatatttccacttcagaagcctactggggaaggctgaggggtcccagctccccacgctggctgctgtgcagatgctggacgacagagccaggatggaggccgccaagaaggagaaggtatctcgccctccattgggcattctgggagtgtttgcttgcctgtccccaacattccatggtttgtttgagcctcagaatctgattttatgcacaggctctttgagaagggtcttgccaggggtgccttctggggcaggaaggcccctactgcctggcagacccatccagctttggactctggtcctgcgacccggaagtcaggctgccaagaggtccaggcagtggcctccactggggaggggctctggagagtttagagccctagatgtgggggttagggacatgaggtcttgtggacaaagcccactacctgattttgagacaacactcactagacatggtgacaagtcaaagatgccttgcctcctaccaggaatcacttcgcagggagcccgagggctgctgtggcctgctgaggagtgcagggcagttactttttccaaaaacaaagagaaatccaggcatgctctgagccagccctgagcccagcagtgagcaaggagagagctggagacaggggactttgctgtgaaacactggggggaatgtgcctgcatcaccccagctgggggcccaggcagagtgggggagaaggggtaagtgggcagagccagtcactttgggcatgcttccctctcgcctctgtgtgaaatgaccaggtcagcataaaccccgggctggctgtgcttctggcagagctaatgatgttaggaggaaaacaaccaacccaagtgagagggtgcgcagccagacagctggaccggccgaggccccaaccaagtcccagatctgcctgtcactggtgctatggcagcaatttggatgagaaatcctgcccaaagggccccttcaggccacccggggagaaggaagcggctgtctttggcatgaccagaaagatggctcggagctagggagaggtggacatgtgggctgtggagatctggcactttccccaaacaaggagagaaagcatagtgtgcctatgtgtgaatgtgctatgtgtgcatgtttgtgcctgtgcatacctgcatgtgtacatgcatgtgcacatatgtgtgcacagggaatcactttaataaaggccacagcagagctgtccctgagccccttgcattcacagtggcatgtgagtgaaccaccttcttaggctgggcatccagtctcagactctggggctgcccatgccccatcctttatctgctccacgtgtgaggggttgctggtcctgaccagggccagctgtgaaccccagaatcctgggaagtcactgacattcttgtcagggccaagagtggagcaaggcaatgcctcgggcacaaactttaaggggtcaccagaaacatcaatcatcaagatatatgctattttaaataatcaaaatgaatgcaaaaaaaatttatgatggacaacataccaaattctaaacaaaggcaggatgagtatcactggcttctgcacttttctccacccagtctacccctcttctagtgcctggatcgcagggtgccaaggcctggatgagggaagcgtggagctgcaatggccactcctgtctgcctgttctggctgcacagaggactcagtccttgtcttgggggaacctatcttggttttagggtcatcctaaggatctgatgttttccaagtgagctggctgtccaggcccacccaggttcagtccagtcctgtgtctctgggaagtgctgcccctaccccaagccagtgtttgaccttggagcaatgagcaatgccctccttccactttcaaagttgtccccaagacgtcagctgtggttgtctctgtgcagacaccgaggaggaactgtcttctttctccttttggttgctttggaggaaagtaaagtgttgctggtttccctctttctacttctttgattgagagcagccgtcttgccggtaccaaccttccagatcttacctgtggttgcaggagcctgtggcctcagtcctgtgcccagtgacttctccatgtggatgtcagctccttaggggcaagcctgattccactgacactactcccacccctcataagccccttcttaccagctgcagttgcctggtaccccaccatcgctgactcattcctttggcatcaaggttcatcccttactgggccaccacttctgggtggcctgaaatagggccctgggcatccctcttggggaccttttggtctatattttcactctcacctcactaaggacagatgagtaaatctggttaactttgcctgatagatttggtgaccttttttcaggaaggagcctggaaagatgagattcaggtgtattggtcagcttagactgccataagagaataccatccactgatggcttagaaacaacagaaatctatttctcactattctagaggctggacgtccaagatcagatgccagcatggtcaggttgcagggagggctctcttcctgacttgcagaccgccaccttcttgctgtgtcctcacatcgtggagagagagtgaaaacaagctctctggtgtctcttcttataagaatgctaatcctatgatgggggctccccctccttacctcatctaaacctaattatctcccaaaggtctcatctccagataccatcacactggggttagggctttgacatatgaatctggggggacacaattcaatctgtaacaccaggagggcatgccgggaggaactgaccttcctccctccagctgccctggacacctttgccccattgaaggagcaggctcagaagtggaatgaggatggaataaggtgcactccatcatgcttacccacatccctggcaggaattgtcctgggccccagcaggagagatgcccccccatactgccatggcacctgctctgagacaggtgtgcagagtgcaaagctccaggtggcccccaagcaggtgtgctgggaggaggggcccgtgtgggaggagcaggcagcgccaaggcctagcggagcagtgacaggtccctgacttcagggaatgggcacgctgtgggcaggcagctggtgtgggggtgagggctggggctgcatctgtgggaccagggctgggccatccatcatatgccgtgtcacaaccccagtgcccctgctgtagccaggacaggaggctgggccaggctgggaggtgacaagagtgggggctgtccccaggagaagcactctgctgcctgtgcccaggcctctggggatgaggacccctcagaaggagtagctatgtctaggaagccccagggcaggagcaagccaaaggggacatcattagtgagatccaggggatcagtgggccacagaagccccagcgtgagcccctctgactgatgcagctaggcccacacctgcacctgcccacagcaagacccccaggaggagaggggacagatggagagaggcacaaagtgcccctggcctctgccttgaagccaccccaaggcaagagagatttgagcccctgtttagtgacctccaggggaacattctggcccatctgatgtgggaagccccttgtggagtctgtcattcctcagctgagccaggcctttggaggcagcccaggcatgtcccctgtgtgctcctatccctgtgttgggacacctggcccagcccctccttctgcctttctcttcccttcccttctcaggagtggacacttcctcctttagccccctcacagctgtgtgaacttctctgtatctctctctttctgtctctttctccccctctctctctgtctcattgtctctctgtgtgtctgtctgtagtattctctctctgtctctgtcactctgtctctctctctctctgtgtctacctttctgtatttcgctttgtttctttttctctgtgtgtgtgtgtgtgtatctgtttttctcactctctctctgtgtctatctttctgtatttcgctttgtttctttttctgtgtgtgtgtgtgtgtatatctgtttttctcactctctcaatctctctctctctttctgtctctcttttgctggcctgagcaaagagggagccccatcctgatgctacataaccgtgaaccagcacagacagaattgtaggaaagtcctgcaagtagaaggatagaaggatgagggaagaaacgccatgtgagtcatgacagatccctttccaggagccactgactcaccctgcctcctgccctcccactgtgacactattactcacagacaggcccggattaaacctatgttccaggtgccctgtggttcccacagtgtggctccctgggtctggcctcaggctccacaggtgcccagccctgccaaagtctccagagcagctgtccagctggggagctgcggggccccttcacagagcgcatgggaagaagttccatcctacacattacatcgagagggacgtgcctgagaaggggagctggagcccgtgcagccccctgcttgcgtgcagaacatagtgtaccctgagcatgccatgaaaaacacaaacgcacaaagttgtaaagaaaaaagaaatgacaggtggctgtaaaatcagttatagcccacgagaggcccactaatgagtggtgatttcagctgattacaaagaaatgatggtgtttctgtaatgaactaaacatgcactcgtgcgtgcacacacgcgcacgtatagtcacataactgaccagccctatgcatcacttgttaattacttagtaactgtaacaataatagtttccaataagtgagccttagtctctgcgcaagggtcagtttattgagcacacgggggccttgcagtgggggcaggtgatctgctcctgggagccgccagcctctcctctcctgctcttcatcttcctccgtggtgggaaattgtctcactgcttctacacctgaggctgaacatctccctttatttcagtctgaaacacatgtaaaaatatactggaatgaattaaggttgcaattattgatatcaggcagtgagtacatcagggtttattatactatctcctttacttacttcgaagttctctattaccaaaaaattaaaaactataaaagaaagaaaaaggaaatgaggctagattcaacacagattactcttaccaaacccttcgtagtcccaggagtcccctaacacaagcacttgtgacctggagtgatattcacagcattccttacctggcaatacctgagtattagcccccccagtgggatctttgttgtagacaaccagcaactatcagcccagccaataaacaagtaggaaaggggagtgctggagaggccaagaagtgggattttccatgctcctgggctgtgatccagagggcacggctgtgaggctgatctcaatgaacactctgtcttggaagtacagggatcctctgctacctgaaaacgttctgagtattcactttcatggattgcaaagtcatttacccaaaattcactctccaaatgaaaagtgagtatgatgaatcagtattcaagttccacctgggtcctgggagagggcatggacatcatatcccagctgttccgacaggaggacccaatctgagtctcactgcctgcctgcatcgtttgtctgctgccagcctgcacagtaggaagggaaaacatgatttgtatctgttttaggtcaggttcccaagaagtagagcctgagattggaattcttggaaaatggtgtttgcgggagcgctgtcagcagaagctataaggaagttggggggacagaaaacgagaggtaagaagccagtcaaaaaggcaggtccagcttaagtccgcctcagtctggttccacaagggctctgatgcatgaagaatatcacagggttgtccctcctgggagaggggccagcctattgtacctgtatcaaagccaccagctgagggccagtggggagggaagatcttccaggcatttccaggaaactctcaggagaagggtgtagctgtgagcagtctgcagctgctgctcactgcggctaaaggctgggtgtgcaggccagtcagccagtgaggtgccaacagcaggcactacagtccaccccttgactgctcagacctactgctttccactttaagctctctccatccaggcacagcttcagggaaaacttacaattggagaaacagagggatgaactacaatgcccacttctgcatgtgattgtaagactgtcactgatactcaccatcatgccccatccccaccatccattctagtgtccccttccccttggctaacactgctggtctaggtgacttccctagagcaggagccaaacccttatccctgaggcatctgaatcctggattcctttatcaggctattgttgttgtaagttgtccattcccaattacaactggacatgagactaccaagaaacaccctggcaaatcatctgagtgcaagccatattcttcctgctccattatgtagcggtagtcctacctcctaatgacaagggtaaattgccacattttgctccttgtgccaggatggtaatacctttctctacctgcttggctactggcacaaggaagcacagcatgaccaggaggcaattgtagctgtacatttagtgaatgtgttaatgtatcacctggtggaaggaccccctctgagaaccaggacttctagacccacaaaacctaaagttgtgaatggcggaagcacaaatttcccaagtggatcatggagagtgatgaagagttcttggttcccaaacccacatattttacctttcaggaacatggcctcatcccatagccattagagtgcatattgcattctggaggagactgggccctcctcatgggtgtcatcttcaagatgacagctccactgtgcctccaagaggatgctccaccaccctatctgtgattccttggttagcaggacaggctgctgcactgagggtaggaaaggcaagtccattgatggctggaatacatgtcaatccaagtcaagagaaaatgccgccctttccaggttggaaggggcccgatttagccaacttgtcacccagtagtggctggttggtctcctccaggagcagtgttataccaggaattcagcaccagtcgctattgctggcagttcttacattcaacagcagcaaaactaggtcagccttgatgagagggaatgtatgcttctgggcacaggcatggcttccttctctgactccatgactatctatttctgagtgcatggtggccgacattcagctgcctgcccatcctatccacttggttattattgcctcttccacaagaagtggtttctggctgtcattaatgtctcatactttgtgcccactcacacaggtttagctctacaacttttccccatgccaccacttttccacaatcttctaatgttgctccttccaagctactgaagaacgagctaagctattcaccaatgtccatgagtctatatttaccttaggccacatctctctccacacaaagtgaataagcaggtgcaccctccaaaactctactaagaggatttcttctccccagtgtctttcagggccaccttgagtggggctgaagtacagcagaagtccatttccagcttgcatcaacattccaaactaacctatccatgatcaatgcatagatgggtttttccctcctccagcagctagacaaaagacaccccccaccaggaggccatatttgcatgtgggtgaaagagaggcacaggggccaatattcgtgcaacagtggtagatggcaggtgggtctgggccacctgtccctgcagcttatctgtgccatctggacctgctcaagcctgattccagatataccatttccatcttatgatggatggcttatgacctagtgggtctgacagcaccaaactcataatgggcagttatggccacatggtcacttaatgtcctatggtcagacactctgctgagtggcatgccaggaaatgctttacaagtggtgtttggttctctgctgcagatggcatgaccttggtccggagccctaggggtttggacagtgactcctgttggggcctaatctcacattccatgcagagtatcatcagatttgccaatcacatagcctaagggtcaggactgatccaaccagtttttgcagagatcaaactggagaatgaaaggttgatatgatgtgaccatcatatcacgtttttctctcttgaaaagtatgcagatgtctgaaagagacaagtgccccaggagaaaatgcatgccttcctcaggatcggcccccacctcccctcctggccacaaggagggtcaaatctcagcatggcccaacttggacctgtcaaggaagaagaaaaaaattgtatgccaaaggaactcagtctttggctaacaagtactagacatcctttaagtctttgagaatggtaataatttctgccatccctccagatttgtgtttttctgttttggctgggtgggaatgcagcattttcactttgcctttgttattacaaatgttgcttattctataaatcaaggaaccattgtaagggctcttctgatggttaagtatatccattccaatgatttattcgggatccaaggaaatgatttctgggtgaatacacagaactagtggatccaatttgagacatacctgggccagaactatatttgtcgtcttaccccaataagcctgcactctactaggacagccatgacagcactttgggaccctagatataagtgtgaattgctggctgggcatggtggctcacgcctgtaatcccagcattttgggaggctgaggcaggtagatcacctgaggtcaggagttgaagaccagcctggccaacacggtgaaaccccatctctactaaaaaatacaaaaattagctgggcgtggtggtgggtgcctgtaatcccagctactcgggaggctgaggcagggagaattgcttgaacccaggaggcggaggttgcagtgagccaaaatcacaccactgcactccagcctgggtgacagagcgagattccatctcaaaaaaagaaaaaaaaaagtgtgaattgctatgaaatcactatcaaaagatctgagtgttacccttactcagtgtggtcgaatataaatagccataggttcctgttatacacacttgctgtggtgctacagagtctttcctcatgggaacccagtccctctttcagtcaatgggttctggttcgagaactggctgaggtttggaaactgtgcctttccatcataactttccactggggtgactgaccttggccttctgttcatcctttctagcccctaagaatccaacactctattagccttctccttagacccctataagctaatcccttctagttgttagtctgaccttggtgcccaatatgataattattcccactttgcttctgatatgcttctaagtgctgcccctggtctctgcccttaagtgatctatcatccccactgccattagggggagaagctctgaaaaagagttgtctcccatcaactctggtctacaaaggacagccctactgagcctcagccatgtgcccgacaccagcagattctttacagcctgggaagcagagtgtcttccctgcctttccagggaacatagccagcttacaggctttttgatcttatagagtaggtcagttatattttgccccatttcttttatccttttgatcacttcctcttggcccaccatgtaaactcaagcatccctgcttcatttaatcgagctgttgctttttctaagctaccaagagcaaccccagcaatatatcagagccctctcttgggacccttgctagggtgttaaatcctgcatcataggagaatgcccccacatcagcaaagtccccttatcctcttgatatcccacctgccccagtccagcaccttcaggatctggtctcaatcacaggatccagcacctttgggactgttgcaagcataagatccagcacttttgggatctagtctcccacttcctgctagtacttgttagccaaagactgagttcctttggcatacaatttttttcttcttccttgacaggtccaagttgggccatgctgagatttgaccctccttgtggccaggaggggaggtaggggccgatcctgaggaaggcactcattttctcctggggcacttgtctctttcagacatctgcatacttttcaagagagaaaaggcctccttctcacagcaagactacttctgtagatgcaggtggctcgtgggaatctggcaattcaaaattctcaagtgtactcactagcacattagaaaaccagtagtacacatctctttccaaatcttcattcagtgacactatgtcagtagctggaaatgggccatggtgggtgtatttaaaccatgaaaatcagaaaatgctacaaaccagggcatcccgcatctctagacagcagattgttggccatttcccagcataccattgtgtatactccttcccatcagggccgtggcttgccttggtggaggactcagcccttgctgaagttctgctactgctcttacaattgagtcctatgcctggtctccagctctgcctgcctcactacaggagacaagcatctctttgaacactgccgagaagaccctctggctctcaggcttggctttaaatcgatagacctgagcctgccattttctcttttccatgcatcactccactgatccacaggtctcagtggcatagtccttcgggttagcatctcccccacaccctcggtgccagagacactgagtaagaaagtacctccctgtctacccccatccccgctccccacaggcagggccttggcgatccactgctgcaatgtgccagagactgtcagtactcctaccaccagtgaggtggcaaccagctgggaagtgatccaactccagagtcccgccctcataggctgatttctaggaccacccctggtatactgtgttaggttcttgaagcagagcctgagataaggattctggcacctgtgattgagtgggagggtgctctcaggatgagatggggtagaaataggcaaaggtacagattcagcagcagttgagcctcagtctgacccagcagggagctctcaaatgtgaatgacatcacagagttgtccctctgaggcaggggccagcctttgtgctcctacatgagtcagtcactggctggaggcccctggggaaaggctagggctgccagctttagcaaataaaaaattagggcactcagttaaattgaatttcagataaacaacaaattattttttagtatatgtcccaaattgtgcataacataatgtgttttctccgccagccctgggaagggcgtaacttcccaggtatttctaggtgaagtaactttgtagatcaggagtaagtcccaggaaagaagtccagctcttctcttcagccctgggcagctgggggtaggcacaggggcccagcaggcacccatagcatctcctacagcatctgaaatgaacagggtcatcacgtactacatacaaatgtacccactgctgagttcttcagggattatatcattaggtacttggtattttaaatacattacattatgcagaagtcctttgtggattgctatatttggagagttttgtgatattggggggattagatggagttttcagatgggcatcatacggtttttcatttaaaaccctagagtattgtaatcctagggagtgatcctgcgattagtaaattagctctccaatagattttcaatgtggttgcaaaggacatgcatgtggttcaccctcccaggaaatccagaagggcagcattggcctgagtggcctgagtttggctggttgggctggtaatgctggacaaagacaatgggtggaatggtttgcttccctcagtcctttcagacacagcccagcccaccacgtcaagccagtgggtgcatctgcaaccaatccccatgagaactgcagcctctcagaggtgggcaagttggcccgggtgggtcaggaggatcagatgttgaggaaatctttggattggaggcaggcagagcagggaagcatcgggtgattctatgacagacccagggctccaagctgcagttcaggaggggcactggcacggcctctgctcaactcccccttgagtgacatcaggtgaagtgccgacaacacagaaggcagcaaatgctgccagtcaggtctgcttcccaggacagccagttgctaacccttctccagcacagcactggattttggtcacctggctgggagctccacctccccagctgctgcctcacctgcttttccaaaccccaccctgtaaacggtaactacattttgtgcccactacgcctcgtttccatctctttggagcacctctcacgtggagctgaacagaacgacctgttaagcccaccgtgtctgttagggttgtctaggctgtatcagatacccaactaaaactggattcaccaacaggtattgtcaaagcacataagaaagagtccagaggcaggcagctctcagcctggtgtcaggctctgggtcagctttccagattctcttaaccttccccacatctgccagatgccgccacaggcacaggaggtacaaacaaacccaaaaatgttctggaaacaagaagggaaggggatccccaccatatctccccagaggccttccttctcacatctcactgtactgaagccagctctagcagaagacagcagggtgaatttgtccagggtattcagcccccagtgctgggtccattactacttgacccctgaataaaacagaggttccatgagcaagaaggaaggggaactggatgttagagggcaagaatgtatccatcccacccctaggagcacgcatggacaactgccccatttttgctcctattgcagcccaggggctagcccagagaccttgccagtgctgagtcacaagatgctgggaaagtgagaccagagcctggtcttggggaacagctcaaggccgcattggtctgcaggtcatagagcagctgctgagcagtgagagcccacgatgggccaggccctgggtcttggagacctgaatgagatagactgggttcctgttctcctgggcattgcctcttagagggcaaagacaattaacaataaacaaatagaacatgaagtgttttccgatagtgactgatatactttggatatttgtcctctccaaatctcatgttgaaatgtaattccttatgttggaggtggggcctggaaggaggtgtctgggtcatgggggcagatccctcatgaatggtttagtgccatccccttggtgatgagtgagttcacgtgagagctggttgtttgaaagagcctggccccctctcattctcctgctcccactcttgcatgagacacctgctcccccttctccttctgccatgattttaagattccagggacttcacaagaagcaaatgctaacgccatgcttcttgttctgtctgcaaaactgtaagccaattaaacctcttttctttgtaatttatccagtcttgggtatttctttataacagcacaagaacagcctaatacagtgatgctctccaagtgacctttgggctgagacctgaagaagaaggggaagcagttaggtctgatagctcatgcctgtaatcccagctctttaggaggctgaagtgggaggactgcttgagcctaggagttgaagaccagcttggaaaacatagcaagaccctggctctacaaaaatattttttaattggccaggtgtggtggtgcacacctgtagtcccacctacttggaaggctgaggcaggagcatctcttgagcccaggaggttgagactgcagtgagtcatgttcacaccactgcactccagcttgggtgacagagcaagacctgtctcgaaaaagaagaaagaagaaagtaggaagaagaagaagaagaagaagaagaagaagaagaagaagaagaagaagaagaagaagaagaagaagaggaagaggaacaagaacaagaagaagaacaagaagaacaagaagaagaacaaggagaacaagaagaagaataagaagaagaaggagaagaagaagaaggagaggaagaagaagaagaggaagaggaggaagaggaggaggaggaagatgaggaggaggaagcagaagcagaagaaaaagaaagaaaagaaagaaagagaaagaaagaaaagggaaggagggaaggaaggaaggaaggaaaaagggaaggaaagggaaggagagggagagggagaaggaagaacaaagaagaaagaaggagaagcagaggcttgtgctggatagccttgcttttgccaatgaccttgctgattttcagggggtcctggtgtcttagtccatttgtgttgctgtaaaggcatacctgaggctggataatttacagagaaaagaggtttatttggctgagagttctgcaggctctacaagaagcatggcaccaatgcctacttctgatgagggcctcagtctgcttccactcatggcagaaggtgaagcagagcctgcatgtgcagatatcacatggtgagagaggaagcacgagggggcagggaggtgccagcctcttcctaatagtaagctgtcttgagaactaatagagtaagaaataactcacaccctgcccccaaggaagggcattaatctattcatgaagtatctgcccccatgacccaaacatctcccattaggccccccacctccaacattgaggatcaaatttcaacatgaggttccggtgggcaaacatccagctataatactgggcaatgctgaccagactcttcccctctcaggcccagagctccttggccctgtaacaacagaaaattgcgtttgagtgtcaagatttttcctttagtccccatgcagctccttagaatgaggtggcatcttctcccttttcataggtgaagaaacagaagctctggaggaacgaatcattcatccaaggtcaggtagctagtaagcgtcccaccagctccccagatctcctgtttcctgtcccaagtcccactgagtgagctggaacaatggcttcactggcacctgccgggaatggtggcaggtgcctataatcccagctactcgggaggctgaggcatgagaatcacttgaacccgggaggcagaggttgcagcgagccaagatcacaccactgcactccagcctggataacaaacggagattccatttaaaaaaattaacatataatatacatacagtaacattcactttttaagtgtacagtttgatgagttttatcaaatgtatatggttatataaccaccatcaccattaaggcagaatcttcccatcactcaaataattccctcagccccacctcttgctgtcaatcacttctcccaccctagccactggaaatcattcatctgttttctgtccccttggttttgccttttctagaatgttctatacatgagaccactgagaatatagtcttctgtgtctggcttctttcacttaacataatgcctagctcagcagtgtgtcaatcctccctcccttgccattgctgagcagtgagtattccactgtatggctgtgctacggtgtgttcatccatttattcattcaccagctaatgggcatttggattgtttccaggctttggctatgatgagtgaagctgctgtgaatgttcaagtacaagtctttgtgtagacaggggttttcaattggcgggataaatacctaggagtagtatcgtgtggttaagcgtacgtttaaacttagaaaaactgtcaaactgttttccaatgtggcctgtaccatgttgcatttccatcagcagtgtttgagaattccaattgctccacatcctcctcccgacacttggtttcacccatcttttaaatattagccactctggtgactgtgtagtgatatgtcagtgtggttgtaatttgcatttctatgattgactaataataatgttgcagatatttctgtatgcttagtgggcatttttggtgagtttttaaaaattgggttgttgtcaccgtcttattgagttggaagaattctttatatgttctggatgtttattcatgtgtgtgtctgctaagaggtgagactggttctaccctggtcctaacaagcaccctgggcctgcatccctttttgtgtctgtgagctgggtctgcagccctctcctcccactacctactgcccagcagtacccctcacccatcactgtggctcctgcaatgacatctcagcctgtctctccctccctccagctagccagaggcaggatggctcagtgacacagggtgggccctgaagacagagtgccagggtttggaccttgtattagcaagagtcacaagggaaacttactttatctctccatagctctgttgtgaggatccaataaattaatccatagaagagcttaggacagcacctggcacaaagtatacatgagctattatgatgttattcttccaacccattgtttctgtgttgtcataaacatgaatgcaggactcagtgtcccagctctgtgtccctcgcatacattccctaacagcccacaggtcttgcctgtcaccgcctcattcaataagtgatgactctgcctcttccttggctggggccttgcattggacatttctgtatccatatttgttttttaaaaactagctgttggccgggcgcggtggctcacatctctaatcccagcacttgggaggcagagacaggtggatcatgaggtcaggagttcaaggccagcctggccaacatggtgaaaccccatctgtacaaaaaatacgaaaattagctgggcgtggtggcatgcacctgtaatcccagctacttgggaggctgaagcaggagaatcgcttgaacctgggaggcagaggttgtagtgagccaatatagcgccactgcactccagcctgggcaacacagcaaaactccatctcaaaaaaaaaaaaaacaaaaaacaacctagctggacttgacactcttgttagaggaagatttttccacatctgttaacttttcttctattgttatccatctgtgcaggtttttctgtcctcctgagtcattttgataatttatattatattttgaaaatcatccatttcctatagttgtttattagtgtcttctctgttatatttgatcagattaccaaatcttgctcattgattgcccatttattttattgtgtttatttttttgagacagggtctcactcgacagcccaggctgaagtgcagtggtgcaatcatggctcactgcagccttgacctcctgggctcaagcaattctcccacctcagcctcctgagtagctgggacctcaggcacacgccaccacagctggctaatattttatttatttatttatttatttatttttgtagagatggggtctcactatgttgcccaggctggtttcaaactccttggttcaagtgatcctcctgcctcagcttcccaaagtactgggattacaggagtgagccaccatgcccagcccctatttactttatagtaagtgccttcatgggcataaatgttcctctgagacagctttggctattagccatacttttaatattttgtacattcatggttattcatttataaatggtctgtaatgcaatgcagatttcccctttggcccaaatgccatttacagcagcacttttctctttctgagcagacagaatattttggtttcccctctgttgtttatttctcgtctgcctcgcctcatttgctaggtgttcccttggtgtgccttaagtatgagccactcaaatatttgtgtttctctaaacacccctgacactgtcctgctggtttctctatctggaatatccttcccttcttggccagttccccctagtgcatcaaagaaatcctgctcttttgccttcagaaaacaaaacaaaacgaaacctatcagtctccttatgtccccaaagacatagctttgctggtatctggttgtattgagctgttcatttgtctcttctgctagatggtaagctccttggaaactaaaaactaatcacttttctaacttcagactgagcacaaattaggttctcaagaaacattgaataatgagtgatccggtatccccttccaacatatttttggtcattgataccatcattctgagtagttactagggaacacttcactgcagtaaccaatacagcaaaacgtgaaatacagttacatagtagaattgtatttcttgcccatataatagtcaagtgcagttcttcatcagctgggaggttctcctccacacagtcatttaggaatccagggaacatagcagaggttgctagctctagacccaaacccatgtcctctttgtccacagtgaggacaatgccagcaacagctggccagctgttctgtagttctcagcctccctcgcagtgagatgtctccatgcaatttcagtggagcaacatataccatttccatttccaggtgtaggctcctaagaagagggtggcttcttcatgttctttctcacctttccgtaggctagctgcagataatgatgaggctttagggagtgggtggagccataaagtagaagcctggattcctaaatgacggtgtgaagtgttccctaatttcacgtaattgtttcttaatttcctgtttgggttatttgttgctaaggtataaaaaaaccctgatttttgtgtgttgatatttgtgtgctgcaactttgctgaattagcttattagctcaatttgatctcagatattagctcaaatattttgggagattatttatggttatctacataagatcatgtcatctgaaataaagatagttctatttccttctttctatcttagtccatttgggctgctgtaacaaaatgccataaattggaggctgagaagtccaagatcaaggcccaagctaattcactgtctgatgaaggcctgctttctggttcatacatggcaccttctagctgtgtcctcacatggtggaaaaggcaaggtagctctctgggattcctttttgtttgtttgtttgttttgttgtttttgtttgattttttgagacagagtctcactctgtcaccaggctggagtgcagtggcacaatctcggctcattgcaacctctgactccctggttcaaacgattctcctgcctcagcctcctgagtagctgggattacaggtacccatcaccatgtccagctactttttgtatttttagtagagacagggtttcaccatgttggccaggatggtctcgatctcttgacctcgtgatctgcccaccttggcctcccaaagtgctgggattacaggcatgagccaccgtgcctgtcctccggtattctttttataagggctctttttctttttatgtgggctctaccctcatgacctagcaccttctaaggccccacctcttaatatcatcacacagcagatttaatatatgaattttgaggggacacattctttccatagcactttccagtatggataccttttatttatttttcttccctaattgctttggttagaaatgtcttccctaattgctccactactatgttgaaaagaagtggcaaaagtgggtattcttgtcttgctcctctcttaggaagaaagtttaagtcttttgccattaaatatgacgttagctatggggttttcatatatgacatttatcatgttgaggaaattttcttcttgtttcaatgatgacagggtgttgagttttgtcagatgctttttctgcatcaatcaatatgaccatgtagtttctttgttttattccattattgtagtacattacattaatttttgcatgttgaactattcttgtgttcctgggataaatttcacttggttatggtgtataatccataaccataacctgaagatatgctgaagaggctaagtgccatggctcatgcctgtaattccaacactttgggaggctggtgtgggaggatcacctgaaatcaggagttttagaagagcctgggcaagtaaacaagatcccatctctacaaaaaattgaaaattaccgctgggcatggtggctcacgcctgtaatcccagcactttgggtggccgaggcaggcagatcacctgaggtcgggagttctagaccagcctgaccaacatagaaaaaccccgtctctactgaaaatacagaattagccaggcgtggtggcacatgcctgtaatcccagctactcaggaggctgaggcaggaaaatcacttgaacctgggagacggaggttgcagcgagccaagatcatgccattgcactccagcctgggcaacaagagcaaatctccgtctcaaaaaaaaaaaaaagaaaagaaagaaagaaagaaaagaaaagaaagaaaattagcttgatgtggtggttgtgcacctttagtcctagctactcaggaggctgaggcaggaggattgtttgagcccaggaggttgaggctgcagtgagccatgattgcaccactgcactccagcctgagcaacaaagtaagacctcatcactaaaaacaaattttttaatactgaagaattttatttgctggtattttgttgaggattttgcatctatattcacaagaaatattactctgtagtttttcttcttgtagtatctttgtctggtttcagtatcaaggcaatgctggcctcatgagatcaatcaggaagtgttacttcctcttttattttttggaagaatttgagagaattggtgttaattcttctttaaatggttggtagaattaccagtgtagacatctggtcctgggattttctttgttgggaggttttttagtactaattccatttccttacttgttattagtctaatgagattttctgtttcttcttgagctagttgtagtagctcatgtgtggaatttttctatttcatctaagttatccaagtttacctaagttaaagttccattttatctaacttgggtaagccaacaaacaatactaaattgttcatagtattctctcatagtcctttttttctctaaagtcagtaataacgttcactctttcattttttcattcctgattttaataatctgagttctttctctccccctccctgcaattgagagtcatttaaaagtgtcttgattaaattttatatatctgtgagttttccagttttccctctgttattctcttctagttttatttcatgtgatccaaaaagatactttatatgatttcaatttttttacatttactaagacttgttttgtgactaaaatatccttgagaatttccatgcacatttgagaaaaatgcacattctgctgttgttggacagagtgttctgtatatgtctgttaggtctaattggtttagagtattgttctagtcctctctttccttattgatcttctgtctagttgtttaatccattattcaaagtagtggccgggcacggtggctcacacctgtaatcccagcactttgggaggccgaggagggtggatcacaatgtcaggaggttgagaccagcctggccaacatggtgaaactccgtctctactgaaaatacaaaaaatttgctggacatggtggcacacgcctgtaatcccagctactcaggaggccaaggcaggagaatcacttgaacccaggaggcagaagttgcagtgagctgagatcgcaccattgcactgcagcctgggcaacagagcaagactctgtctcgagaaacaacaaaaacaaaaacaaaaaacaaagtagtgtactaaagtctccaactactattgtagaactctatttctcccttcaatgttgcaaaattttgtttcatgtattttggtgttctgttctttataatttttatatcttcttaatggatgaaaacttttatcaacatataatgttctttgtctcttgagacttttttttttaacttaaaatctatttgggctgataatacagccaccacaactctcatattggttgttattttcatagaatatcttcttccatccttctactttaaaattcttctatctttatatctaaagtgagcctcttgtagatagcatataggtggataatgttctctttattcactctgccaatatctgccttttaactggagtttaatctatttatatataaaataattactgattaggaaggacttacttctaccactcagctattttttttctgtgtgtcttatacatttttaagtttctcaattcctccattactggatttttttttttacttcttgattttgtgtctgtgttgttacattttgattattttctccttttgatagcggcaggaggcagccaaatgcctggcagatagaagcttgtcccccatgaaaccccaccttcaagccaaaaaatagcctgaaggctgaaagaccggactgctggtcccagatgaaacccatgatccagagtgagaacttccattcctgtttgcctgccctctaaataatcccttttaaccaatcgaatgttgccttttccaatactacctatggcctgcccctcccccattctgagcccataaaagccctggaatcagccacattgggggcactttgccaacttcaggtagggggaccacctctgtatcccttctctgctgaaagctgttttcatcactcaatgaaactctcaccttgctccctctttgattgtcagcgtatcctcatttttcttgggtgtggtacaagaactcgggaaccagtgcacaagccagacttggtctgggcagcacgggttagtgggccatctcccacagcaggtagcatggccaagtgaggcctgggcagggcatcaccaaggtccctggcttgcaaagtgaccaaggaaaaaatcctgtgtcactttccttttctcatattttttagttattttcctaatgattgccttgaggatggcaattaacatcttacacttataagaagctagtttgaataatagttccaatagtacatgaacactctactcctatatatctccatccttcttcctttatattgttattcccacaaattatgtttttatacattatatcctcactaacataaacttattattattttctgcatttgccttttaaatcatacaggaaaacaagaatcacaaagaaaaactacattaatatttgctgttatatttacctatatagtgacatttaacagtgtatttttatgtcttcagatgtctttgaattactacttagtgtcttttcattttagcctcaatgtttccctttagcatttcctatagggcaggcctgccggtaattaattccctttggttttctttatctgaaatgtctaatttcttttttattcttgaagaatagttttgctggctataagattcttagttaatagtttttttcccagcacttcaattattattaaagtgttattattattattattattattttgagatggagtctccctctgtcactcaggctggagtgcagtggcgcaatctctgctcactgcaacctccgcctcccaggttcaagcaattctcctgcctcagcctcccgagttagctgggattacaggtgcccgccaccatgcccagctaatttttgtatttttagtagagacggggtttcaccatgttggtcaggctgatcttgaactcctgacctcaagtgatacacccaccttggcctcccaaagtgctgggattagaggcatgagccaccatgcctggtctaaagtgtaattattattacagctgccatttggcctccttggtttctaatgagaaatcatctgttaaacttattgcaaatccttggtatgtatgctatgtgtcatttctctcttgctgcttccaagattctctctctgtctttgtcttttgacaatttgactataatgtgtttcagtgtgaatttcttagagtttatcccacttggatttcattgagcttcttggatgtgtacgtttgtctttcaccaaatctgggaaattatttcaccatttctcaaatatctttttcttcccctttccatctctcttcttctggagctcccgtatacttagttggcatgactgatggtatcctactggtccctcaggttctgttcatttttcttctttctttttttctgctctgcagactggataacttcaatcgccttttcttcaagttcaatgattatttcttctgcctgctcaaattggccatttaacccctccagtgactttttcatttcagtattgtacttttcagatccagaatttctatttggttcctctttaataaattctttttattgtcattccccatctgttcatacattgctctcccaatttcctgtagttctttgtccatggttttctttagttaattaagcatatttaagacagttgacttaatgtctttgactagtaattccaatgtctaaaattccttatggatagcttcttttaaattatttttgtcctgttagagagtcatatcttcctctttatttgctttgtaatactttgttgaaaacttaacattttgagtagtaaaatgtggtaattctgaagccagattctccccctcctttgagattggttttgttgtttgttgagggctgcagttgtccatttgtatagtgacttttccaaacgatttttgcaaagtatgtattctctcttgtgtctggtcactgacgtttctgttctggtgcctctgcagtcagcctatgacctggaagagcattccttaaatgcatagatttttttaaaacccaagaaacaaaaaacctagcatgtatgtacctttttaaaaatcttctgatagatgccacctggaaggctgctgctgcctgaaggggcagaaacaaaggcaagctctactctgagccctcagggaaccaccagataaacaaaagaaatttgattctccaaatttctggaagacaaggtcctttctgcccactcctgctccagccagctgctctaggaacacaattactgtccacatggccacaggaatgttgaagaatgcaggatggtagctggtttgcccacaccactcacttatgagccatcagcatgcctctcccttcatcgagcactcccatggttgctgtaagtgtccaatcaggttccagaattctgaaagagttgactcttacaggatttttttcttttctaacttgctggttgtttagatagaggaaccaattcctgaagtttcctacgttgccagcttcatgaggatcattccctagtaactcttttcagacaaaaagcttcattgatttactgtaggactagcatcaaagagtctatgccacctagtctgtctccttaaaacacagaaataatcagtatgcattggggtaggagtttggcattagatctgccgtaaatcaagagctggggacagcccatgtcttaaactctgacccaagggctaaaatatcctttggtagcaacaacagctacaaactattgaacaacttgtatgtgccaagagccttacctgcattatcccattgaatcctctcaacagccctgtgaggtagtagaattgttgcctgccccttactgaggcctagaaacattaaggaatttgcccgaggccctagagccagtgagtggcaaagccagtctccagactcaggctggagatcctacagttctgtgttaccccagtgttatcctgcctctcagcacagagtcttggatgattctcctaacccctccctaggcaatgcacagggctgctccctgcacccttactcatgctctgctcttcaaccccaacagtgctggccttaggctttatccctgacacccagccccaggctccattccatctgttgacagaggcaaacactggggcaaaactgacctctgtggataccactgtgtccacctccaccagcttcagctgaagcctctgaacatctccagcatggaagaagccccaaaggatatttcctgtcccccagcatatgcttgaccctgaagccctccccatctagtcaagaagaccaaactgttaacaatcctggagtcagagtgacccatgggtgaatcttagccaagtcactcatagctgttgcatcctagtaaatcccttaactcccataggcttcagtttccctgcatataaaatgacagccttcagctcatcggccagtttcaatccatctaaagggtctagcacatcccctggcatgtggaagccacagggcacacactagttgtggtcatttgatcctggcatgctctgctgtctctcggctctccccttgcctctttccctgatgtcctggccatcagccactgcctaacaccctcccactcaccaggcccttagcctgccccttagcacaagagcacagccggtctcaagtctaccctgctgtaagcaaacacttgcaacatcatgctgacctccaggccctgttgcatcagcgtgcccacacttggtgcccagctggtactgagggtatcagggaacaggccagtggtggaagggcggacactttgggttccctggtttcctggctcccaatatctttcccaatggcatatggggtctagcagcttggctcatttaactgtgaacctctaccctttagaatctgggcctccaggcttgcttctgtgcaaaatggcagataaggctcaacctttctttttttaacttcattgttaaatattactccattaatacccatttactgcagaaaaggtaggaaatacagataagcaaaaaggaaaataaattaaaatcctcataccaccatcatcaagataattactgtcaccattttggtatatttcctcccaatacatatattatctatatcgtatatacgacaaaaatggatcatactatgtttcctgttcttcccctgtgttagtcatctattgctgtataacaaactgcctcaaaacttagtggcttcacctttccgtgtattatgatgacaagaatgtggtatgacactgtcttatatctggatcatatgctaaaagatagaaaatggtttctaaacttatttgttctgtaataacaaaattttatttcataaagtgtttttaaaaaaaaccatagtagcttgaaacaacaaacctttgttatctcacacagtttctgtaggtcaagaattcagaagcagcttagctgggtggtctggcttggtgtctctcctgaggtcagggttttggctggggctgcatcacctgaaggcttgactggggccagaggagctgcttccaaagtggtccactcacatggctggcaagttggagttgcgtattggcaagagacttcgcttcttctcaatggatcttcccagagttcttgtaggcaacctcatagcatagcagttggcttcccccagagggaacagtccaggagagaacaaggcagaaaccacagggtcttttctggcttaggctccaaagtcatactccaccatttctgcattatcatattagttacacaggctagacctattctgcatggaagagactataccatggggtgaataccagaagcagggctaattgaaggccagcttcaagggcggctacacattccctttcaacagtatgtcatgaacatctttccatgccaatagagcagatgaatcttaccatttttaatgactacatgtaagtgtagcataatttatttaaccaacctcctgtagttgggtatgtgggttgtgtctcgttttttgatagtagaattaatcatcttgaatatccatcaccaaacttgtcatattattttcttttgatgaatgaaaaagaaaatcaagtcatgtctgtcaatcagaaccctgagcaactaagaaatgggggtaccactgggacatagagcaaggtcccttctgattctgctcttgtctttctctccccatgaaatggggagttcactatctactgagacatcctagcccacagctgcacagttctgtctttttagaaagctctaagcagaaacaatgttcatccatcctcctcgggacagcccttgagctactgaagactctaagcatgtcctggtcatcctccatgagccatcatctctgaggccctccccttcttggcccctcttctctggacaggttctggacagtcttgcccttccaaaattcctggaaagcaggaactgttcctgctacaatgactctcaactccagtgcagtacagactgttggtgtcaccccttatcctgaagaagaggcactgagacaggacaagggtgggtgcccaggagggctggcatgagtcatgagaatctggtcccggagaattagacggtgtggggaagtaggggtgttgggccgctttctggcctcatggatgccaatgaatatcagcaggtggctcccagaaaggaactctaggggatgcctgttgctctaaatagaggctagagagggcactggcagttcagtcaaccaagaaagggggcccacttgcctcagcttcaggctttgtacacatcctcagcctttcttgagaactgaatttagattctcctcccctgtgctgtgtgcttggcccagaagaagggcaagtctcgctgggtggctgcttcttggcctggctgaaccagaaggccccagtgccactccaaacctgggtgtgagccctgcccccatgagcaaacagtagctcagagctgggggctgtgggggtcagtggcctgtcacatgagatctgatgaggccatctctgctctatattgggaaagggatcaattgtatcaagggctttcttgggagtgatcactctggccattggcgagagacctggcattctgacaaggcaccctccataccctgacccacttgccagctccagctaattttagcaggctttggcaggtgccagcaagtacatagcatgtggatgtcactcccaggtgagcccaaggagaggcctgggccagagcctggaagtcatggtctatgcccatggaggcacccaaagcaagcctgaggcctggactttgcagtcacaaaattaagaatgatacccctgttttttgtttgtttttgatcagttggccaccttcctccaccaccccttccccaagttccatacagacccctggattgtatgaaatgcaaatcgaacctctctgcagatgaaaatccactggggatccccttgcctccaagagcaagtccagacctgcaccagcgcgggccaggcccccttaggaccccctccctgtccaagggcatttcagtaagtgttctgtggccaaggcagcctggtgactttctgcccgcacaaggctgaggaatggaagatgggtaggctggctctgcacaccccctcctgctgggcagcaatccctaccccatgttcacagagtgtggccggctgccccatggctctgtccccgtggccctgtcaactgttacccacatggcctaccctccctttctgccctgcctctgaccccatggcagggggcagagtatttgagcagccgccaggctgagccctttcagtgcagaagccctgggctgccagcctcaggcagctctccatccaagcagccgttgctgccacaggcgggccttacgctccaaggctacagcatgtgctaggcctcagcaggcaggagcatctctgcctcccaaagcatctacctcttagcccctcggagagatggcgatggatgtcacaaggagccaggcccagacagccttgactctggtaagggtcacaccaaagttagggactttgcactgggagagcagcacccagggcagggcccttggttttgcagattaccaaaactaaggctgggggcagggaaggcgagcaggcttggggcaccttggaaggaggcacatgggccttgggggtcctggctagggcagctgtgcctgccactggccctctgcccaccacccctcctcactgtggctatccagtgtccagcctctcgaggggttctagggtacttattcctggagctaacggtgacccaggacaccagtgtccggggcctggcctggggcttttatggggggagctggctggctgcccagggctgtctggctctctgggggctctgcatggcatttccaggggttggtggatcagggattctgtccctcaggagaatgtgggcactagcccaaggccactcacttctgtgtacatagccacctgagggcccaggaatggagggggccaggctacagctggacatctggcactcggatgggctctggagcccccaggcctgcagcatctgcccagggactgccctggcccttggccatttcctcagggacccacagctccaccagccggcccctcccagtgctggaatagacagttcctcagtccacatctgccaaaggcggcactagaaggcatcctgccttttttactgcgttctggaggtggggtcacaaagcactgctcactgcataaaagggacagcatcctgcccctggcagccctgcctgaccagctccgcctctcccactgctatccaacctgtacaccctggtgaccatgtccaggccagtggccttaaggactgtctctgtactgatggctccacatctacctctccagccagactctcctctgaactcgggcctcacatggccaactgctacttggaacaaatcgccccttggctggcagatgtgttaacatgcccagaccaagatcccaactcccacaacccaactcccaggtcagatggaacctcttcttcccaggcccttctgttcctctcctcagcccctcccacctcccttcagaataagtctagactcttatcgctttcaccaagcctgcgcccagcatccctgcacagggattgttaggacagcctgacgccctgcttccaccctgccccaagatgcccctgctctgcagcccggcgcctccaggcttctcacctcctgctgctcacagctcagcctcactccctccctccccgcctctgctccagcctcagtgcaggtcccctgctcccatcttctggcagcagctgcccgacctggtccctcttcatctgtccccattccttcaccccccagcctgtccccaacttgactgaggttctttcctgcagatccccgcccttgagaggggttggtcccactgtcaactctgcttctgtgccctgtgccgcacctggcattcagtgagcatctgctgaagagatgagggtcagatgccctgcagggagtgtgggggcgtcctcaggcaagaaaagttgtacgtttggctgtgggccctgattatgtgtcctgtgacctcttgggtgaggtcagcaagagaaacctctgcaagctggctggggctgcctcccagaggctgccagggggagggacaggctctgtctgtgctcttcttccgaggctacacctggggcgccaggctctcagggctccccaggtaccaccacatttcctacactgcttgggaaagccctgtaagtttgcacagacacccagcatgaggctcgccagagagatacttgtagctggggtctgggcaccaggaacagcttggtgctgggcctgaagtcgggcaggatgcagcctggccaggtgagaggaaagcttggagccagtgcctgggttcaaactcctctgtggcctatggttctgtgggcttggggaagggtttgtacctctgtgtccagtttcctcacttataaaaaaaggagataataaaagtacccatgtcccagggtggctgtagcaataatagggaggggtgcccagagcaggtctggcacacaggaagtgtgcatcagcctcagtccctgccattgggcttgtcctgggagtctgtgaagccaacctctgctccacaatgtgacccccaggcttgtgagaccaagctgggtcagagcttcctcctctggggttgcaccaggaggggaacttctgcaggcccagatgcaccctgaggaaagggcttgttcccaccaagaacaaggctcacctttggaggatgctccccacatgagaggtgaacccccaggtctactggtgactgcagcctcggaagctgacagcatctatcctccaacccatgcccactgggaagtgtgtgaggggtcctcataggccctgcggtgtggacaatgcagagaccctgtagcatctggctagggcggggcccagataagagccctgtgccaggagagcctggccggttctgccactgtggggagacaggctcccccaccccatgtcccctgcttccctgcagcccacagagaatacagacctacttttacagaaatccagatttttgtgtaaaagtgtctctattttaagtagattttaagtggtggcagcaaatttaagcttttgagaatattatacagaacaaatcagattcacaggccagatgcaactttatttacagaaatgggatcaggtcctacctcaggtcccatctcacgttttcacttatgcctatacgtctccttcacgggaaaggccacaagaggccctgcggtaagtgtcccggtgttgatttaaagtccccaacagtgaatatgagggtcctcactgttgcagcaagaggatacccccctgtgtatcttggaaatgcctgcagccctcttgctgcagaacagattcttaggagagaaactgtcagatcaaagttaaacttagagaaactccaaattgccctctgaacagacggtatcagtttgacatcatccaataccgggattcctcggggagaactttctggcctagaaggcagtagagccaggacttcacccagtcagtggcagggccacacgtgggccttgatacagagggggaagacttgagcctcctcgacaccctacagggcccagcctcccaacatgtgataagagaaacaacagccaacttgtacctagctctccttattctccaagggctgggccagttctccccacagccctgcaagggaggatcactcaagggccccaactgtctgacaatacagccacactctgatcagccacctgggcataggctccatgccattgtcctccgccaagacctcagactgaaatgttggctcctcccatgaagaacctggggccaaaggaccagagtccaggtccgtggctgccaggatgggccacttggagagaggcacaagggtggtgccaggcaggtgtgagggctggacctttgcaagagcagcatcacttttgttgagagcccacaggtatcttataattgggtcctaggacttcctgccagtagccattgtgtgcatggatttgggtgctggcctcaccatggtgtgctggctgcccatgcctgcaataatgacttctgtaagcctttcttcatctgcaagatgggtgctgctggcacctcctccccggtgctgtggtgacagggcatagtgtgtgaggctgctatgtgaagcacctaatgcagggcctggcatatggaggaattcagcaaatgacagatgccttcacagttagttcctggcatcctctacattggtgggtgtaggaaagaaagacagaggaggcaaaagttgtagctgtggggcattgaggacagcctggattgttccacagagccctgaggacatctccaggggtgtgctctgcaggggcagctggattggagggttaggggtcggggagggcgtgcactcccacccatgctcacagcctcggaacagtgcctgctcagccaacatgggtgtttgattctgtgtcttttgtcacagactttatcagccccatccctttctgaccttgcctcagtttaaattttacatgtggggcctcattaagagacatggttcttaactaaagatctgtatccattaggaatgctttgggctgcaggaagacaaacacctgactcactgtggcataagtggtttgcgtctgctcccataagctgcacgtggagggtggatctggcattactctctcttccctacatttgcagtatgctaacagctttaacctccagccttgtttcttcatggttgcagggtggctatcacagcgctggccatcacatccttacacagctgtgtttacaaatttagggggacattgaagctcctcccctgctaaaatcaggcttcccttcacctgtcattggccagaactgggtgaaatgcccaactctagaccgatcatcagtaagaggagtatagaattgctgtgcccaccttagattaatcatggcgcaatgtgctccccataccaacaaaatctgagttctagaaactgaggaagaagaggaaaatggccgtcttgcctcctggctgggattcagagcatctccaaccctctgagcttatgtgtaagactgtgggcaaaagtgtgtgagtttttgtggaatggatccacggcttttatcagagcatctttcctttttctttttgattcaagatgaaaatattcttatgattatttttctcaccactgcccagagataaccagcacattaacatggccttttctccatgaatagcactagggtgcccagtggacagacacatagctgtccacacaccagcttgctggggatgcataggcagagtcacatctgcactcacggcctgtcctcacactgccatgtggagagccagcagccacaccatgggccgtccatgctcacgggagtggcagtatcagatctgagcttcgtgtgcccaggcgtctctcacatcagtgcatagggaccctctttgttctgtggcccagtgtgcccatgccacagatggcttcagtcagcagacacctccttctagacactcacactcactcctggctggcccttagcacacctgtgcagacaggcccatttattttcttgtgtaaatcccaagtaggaggactgggtctctctgacagcaatgccagctgcctggcaccctccagacaggtggctcaagccccacctcgccagctctcccagttagcccctcctttccctggctctgacctgagggacgaagcagggtgctacaggacgctgtgccacagggatatcgtcagggacagaagctactctgccctctgctgctcacccctccaacacgctgtgggctgcatttgttgagtggctggtaccagactctgctcttctgactttccagctggttttacctgtagtaaagtttgagaagatgggtcatcctgaccccggggtcagaagacagaaggaggcccatggcgtgtgggggagatgccccgtgaggccctcggtgtgcagatgcctggtgacagccccaccctgaggtccccagcctaccccctccccagcccgactgctcccatccccctccctgtgcaggtagagcagatcctggcagagttccagctgcaggaggaggacctgaagaaggtgatgagacggatgcagaaggagatggaccgcggcctgaggctggagacccatgaagaggccagtgtgaagatgctgcccacctacgtgcgctccaccccagaaggctcaggtaccacatggtaaccggctcctcatccagaagcagctgtgggctcagccctagctgggagaagcaccccaggcactcccagactcacagccagcccgagacagaatctcctggggagcaatgaagtcctcgacttgggccagttctcacccttggctcctctggtccggccctggggcactcgggctcaccctggagctggcaaacctcaggaaaactggcgttttaaatctcactcctggccaggtgcagtggctcacccctgtaacttcaacactttgggaggccaaagcaggcggatctcttgaggccaggagtttgagaccagcctgcccaacatggtgaaaccccgtctctactaaaaatacaaaaattatccaggcatggtggcacattcctgtagttccagctactcgggaggctgaggcataagaattgcttgaacccgggaggccgaggttgcagtgagccaaaatcgcgccactgcactccagcctggggtgacagggtgagacaccatctcaaaaaaaaaaaaaaaaaaagacctcactgctccccatgggcacttagggaactctcccagcccagttctgcagctgggccattgcactagatcctcagttggtccctgggctctcggtgactgtccagggcaggagtttcccattgacttttccctggttgacctttgaccccttccacagttgacactggtgtccccaggtgtctggtggccccttgtccagctcccttagtcccttgtgccttccctcctcctctttgtaatatccgggctcagtcacctggggcccacccagcccaaggccagcctgtgggtgtccctgaggctgacacacttctctctgtgcctttagaagtcggggacttcctctccctggacctgggtggcactaacttcagggtgatgctggtgaaggtgggagaaggtgaggaggggcagtggagcgtgaagaccaaacaccagatgtactccatccccgaggacgccatgaccggcactgctgagatggtgagcagcgcaggggccggggcagggggccaaggccatgcaggatctcagggcccagctagtcctgacgggaggtgccacctgtctaccaggggtggggagagcgggggctggaggaccacccagcctcagaggcagctggaggcctgggtgaacaggactggccaacatgtccccaagtcccacagtcaccatctggccagcattgagaggggaacgggctgaggaagagttagtggcaagaggaaccccagccagtcacaccttgtccagtttaccagaggaaaaaccaatgtgtaagaacagaaatgtgacccggcagccagtgcactgcccccctctccaaaggccacccctcaccctccaccagcatgcacagaaagtggggtgacagcaatcacaatgtctacccaggcagcaaggacccctgaccatggggaggactggggtgcagggaacatagaagcagaatgaggcctagggggagttgggcaaggccagagccctagctgcagccaagcacatggccaaggccagctcctggaagggcagggctccgaggcaggaggcaggaggctgcccgtggctacccgtcctcacacccctgcagcttgctagtctgtctgtgggctgggtgtgaatcaaggcagtgggatggtgtggggacctccctggccccagcagccagtgaggagcctggtcagtcagcagagcattcagcagtatccagttccatggagaggcccgtgtgaggggagtcggggctggtcttcagtaaggatgggtggccagggcccctagaagtagaaaaggagactccgggtgctggagacagaaatcaaggatgtgcctccatgtggagcctcaggaatagctggccaggcctgaggctgaacctcacaaggttcagctgggagggctaggctgacagagcacagccgggccagggaccagcctgccctgtgttgccttgtcccgagggccactgtcagcaggtctctggcatgggggaggcttagggcctgagcccaacaagcagcagcggaagaggagagggaaactgtggacaggcctggcattcagtggccaggtgttgcagtgtccctgaggaatagcttggcttgaggccgtggggagggctgccggccagcgcacccccccatgccagatggtcaccatggcgtgcatcttccagctcttcgactacatctctgagtgcatctccgacttcctggacaagcatcagatgaaacacaagaagctgcccctgggcttcaccttctcctttcctgtgaggcacgaagacatcgataaggtgggccgggtggaggggcagaaggcagatgaggggaggcacaggcaccccagaggaactctgccttcaaatgtagcccccataccatgtgctcagaagggagatctggattcaaattgtggccatgtcacctgccacctctaatgctgtggaaaagaagcatcacattagctaattctggctgtgcgccttgtgaggcaccagctatgatcaccccactccagtggaaagagcagctggcagtagggtggggctcaaactcaggcagccgggctctgggtcacctgcaggccacggtcatgtcacactgcctctagctgagtcagaaatgtgaaggaactgagattctacccttcctgcaagctagcaaagtggcctgccagttacatctgtgcatgcacacacacacacagttatatatgcacacacataaaacacgagacctttgggtcagggagaaagccagatcctcactcacggcagaagcagcagccaaagcaacatctcatgtggttttccaagccccagtccctacagagacagagagggccaggtggcacctgtgcatgcagcggggtaccttgcaggagggaaatcctgattttacacaaagctgctccccccacgccctgccttgactctgggatgacgtctcagagctgtgcagtacaacattcttaaattggctgggactcagccctgcagaaatatgatatcttcaaggagaatcgttcccaaaacctctcaaagctatggggctgctctgagcctgtttcctcagctgtaaagtagggtgcatacttttatggccctgtgcaggaggtagtgacaggccctagcaccctgcctccagtatatgttagcagccacgaggcctatctctccccacagggcatccttctcaactggaccaagggcttcaaggcctcaggagcagaagggaacaatgtcgtggggcttctgcgagacgctatcaaacggagaggggtgagggggcacctgtacctgccgggggggctgccctgggccacccaccccagcactgcctgcctttctccttggcttccagcactgcagcttctgtgcttcttggcaggactttgaaatggatgtggtggcaatggtgaatgacacggtggccacgatgatctcctgctactacgaagaccatcagtgcgaggtcggcatgatcgtgggtaagggctccttgcacccctgccccttccagactgctgaggctccctgtgtacaacaggcttcaagggccctgtggggtgaggaccaaactacttaacaaccggtgatgtcagagcagagcctggtgctacagcctgggtggtcttggggtatcaagatggaagcaccgtgtacagtaggaagcatttcaacgccatgatgccacattcctgcatcagatggtatgccagctgcatatccacctcacccatcaggattataattaaaacacttatctggtaaattgaccaactggacagattggtccaagtggaagaggataagcaaaagtggtaccatctccacccgaatggtctttccacgggcctgcccctgcccctgcccccacccaaagtgaaggcaggtaccaggaaagggagcagcagtccgcccctcccagcagaggggtcttccacaccaactcggacctttctcagaagttccggaggtcattataaccagccttcactgaggagcaatccaatcagatcagttatctgctgtgcgcacagccgtgtggttctatacttctcttacttccattttcacctttcagaaggaacgttgtctttaaatccagcatctaaacgtgagccccagccatccctggctgtgatccccccagccctttccaccctatcctctggaactgcctggggctccccaagacacttccacatgaattcccaccaagccaagctgcagctgctgggcccaggcataacccctcctggggcagaggtggcaaggagtgacccaccactcacatctgccccacatccactcttgactctgctcagtgtttaaaaacatgtttataacaattaccaagatctgaaaattaggagaattcacatcaaagtctggatttctgtttgttcataaaaaactagaaggcagccaggcaaggtggctcacgccagtaatcccaacactttgggaggctaaggcaggcgggtcacttgaggtcaggatttgaagactagctggccaacaaggtgtaacctcgtctctactaaaaatacaaaaattagctgggtgtgatggcgcatgcctgtaatcccaggtactcaggagactgaggcaggagaattgcttaaaccctggaggcagaggttgcagtgagccaagatcacgccactgcactccagcctgggtgatggagtgagtgagactctgtctccaaataaataaataaataaataaaaactggaagtctaagcatcactgagccctgattcctatgtggcagctcgactgaccagcatttgagttgctgtccctgacagctttgggggtgtgcagcccacacagtcatgctagcttgaggctctgctgtcagcagtttgaaactcttaataacttgtgaacaaaagactccatgttgtcactctgcacaggggccagcaaattacaaaattccatatccggaattgtctacaggagcctctgggctgctcccaagggcccacaccatgccttactcactttgggttgccatccaaacatgtctcatgacaaagaagctcaaacatgtgcatggacagtgccagaaaacaagggtcgtacatagacaaaataaaatgataacgtcccacaaccatttctttgatacacactgtttctctcagtcctcccaaccacctaggtaacaggcagggaaggtgttactgttgcctgttaggaaagaggacagccctgaaagctgtccctggccactgaagcaacccaggtcttccagccccagggagagccgcctttccattgttccagacaaagcagagacaggcatgggggagcgggagagggactcctgtgggcaggaaccaggccctactccggggcagtgcagctctcgctgacagtccccccgacctccaccccaggcacgggctgcaatgcctgctacatggaggagatgcagaatgtggagctggtggagggggacgagggccgcatgtgcgtcaataccgagtggggcgccttcggggactccggcgagctggacgagttcctgctggagtatgaccgcctggtggacgagagctctgcaaaccccggtcagcagctgtaaggatgcccccctcccccacaacccaggccctgggccgctctggtgcagcggcagatgggagccgggccattgcagataatgggcttgtttttaaacaactctggggaaaagcaaactgacaatccgttcgtaagctccatcccttctgctcagtcatgacctgcccctgtgagagatgaagggttagtcccagttgtgatgtgataagcccagacctctttccttccgacaggtgatcgtgcatgcagaggaggctctgagacgcccccagcaaggttcctgggtttaacccaacattccccaaagtatgtatttggccacattcacagaaagaatattagtcttttgtggaatgctgcgggttgacagtcacagcttggaaaccaacccacagagagctcatcattaatcatggctatcacttgtttaccacctactgtgccaggcctatgctaattactttattagcgtcctctctgccgctcgcaggcctctattattataggtcagtagtattcgatttatttaaattaaatacggaaggtcatagattaagcaagaaagtgccagcaacatggtgcgtgcctctgactgggcactaaccctccaagtcttagttttcccaaccataactggccaatgaacagcagctctggatgcagctaaaggaagactgaagctgtaggtcccgtgctcggcgcagggccccctgcaaggaaggtttcggagggactggatggggtctttgaactatctgtctttccctttactgcagtgggcccaggggcaggccaaagttgctcccgtgattgacttgaacgtgcacgttcctaatccctgacatttctaaagctctggctcattaacgagggaaagacgtgaaccagctgggggagtggggatcgcagtgccccacgtggccgcctcgtgacctcagtggggagcagtggggccggctcccggcttccacctgcatgaggggccctccctcgtgcctgctgatgtaatggacctgccctatgtccaggtatgagaagctcataggtggcaagtacatgggcgagctggtgcggcttgtgctgctcaggctcgtggacgaaaacctgctcttccacggggaggcctccgagcagctgcgcacacgcggagccttcgagacgcgcttcgtgtcgcaggtggagaggtgtgcggaggaggagggtgggtgcaaagggcaggggctggggacgcccgggcactgcagacttggtctcagggcgacgctgagtcccaggcccggggcgcagggatgggaaactagggcctggggcgggattccgggcgtgggcggggcccggggcggggcacagggggcgggggagtgggcggggcccgaggccgggcgctggaggcgagggcggggcagggacgggtccaagggcaggaggctgggacaggacggggatgcaaagggaggggcggggcccgagacggggaggagggggagggcccaaggggaggaggcggggtccggacggggatgccaagagcagggatgggagcgagcctgcgtccgggcactggtccccatccgtgagtcccctcggtgctccctgcccgccgtggccatcctctcacatcactcacaaccccaaggcgcggcatggttgacacccccacgttaggacggagaccctgggcttagttagagggggcagtactaaccagtccctggcggaaacgctttggctgggtgaggtgagcgggatcgcccccatttctccagagaggggtcccggctcagcgagggaaagaggccgccgctggggggacggctggccggggcccctccctggagaacgagaggccgccgctggagggggatggactgtcggagcgacactcagcgaccgccctacctcctcccgccccgcagcgacacgggcgaccgcaagcagatctacaacatcctgagcacgctggggctgcgaccctcgaccaccgactgcgacatcgtgcgccgcgcctgcgagagcgtgtctacgcgcgctgcgcacatgtgctcggcggggctggcgggcgtcatcaaccgcatgcgcgagagccgcagcgaggacgtaatgcgcatcactgtgggcgtggatggctccgtgtacaagctgcaccccaggtgagcccgccccgctctctccctggtaaagtggggcccaaaaagcgcgcgctccaaggttccttgcggttcccaagctccaagatttcgtagtcctcttctcgtcccccttggcctagatttgggggaagggtcgactgcgtgcagggcgcccggtaatgaatgtggaggatgaggtgggaggagggacggcagccctgcttctcttctgcccagcttcaaggagcggttccatgccagcgtgcgcaggctgacgcccagctgcgagatcaccttcatcgagtcggaggagggcagtggccggggcgcggccctggtctcggcggtggcctgtaagaaggcctgtatgctgggccagtgagagcagtggccgcaagcgcagggaggatgccacagccccacagcacccaggctccatggggaagtgctccccacacgtgctcgcagcctggcggggcaggaggcctggccttgtcaggacccaggccgcctgccataccgctggggaacagagcgggcctcttccctcagtttttcggtgggacagccccagggccctaacgggggtgcggcaggagcaggaacagagactctggaagccccccacctttctcgctggaatcaatttcccagaagggagttgctcactcaggactttgatgcatttccacactgtcagagctgttggcctcgcctgggcccaggctctgggaaggggtgccctctggatcctgctgtggcctcacttccctgggaactcatcctgtgtggggaggcagctccaacagcttgaccagacctagacctgggccaaaagggcagccaggggctgctcatcacccagtcctggccattttcttgcctgaggctcaagaggcccagggagcaatgggagggggctccatggaggaggtgtcccaagctttgaatacccccagagaccttttctctcccataccatcactgagtggcttgtgattctgggatggaccctcgcagcaggtgcaagagacagagcccccaagcctctgccccaaggggcccacaaaggggagaagggccagccctacatcttcagctcccatagcgctggctcaggaagaaaccccaagcagcattcagcacaccccaagggacaaccccatcatatgacatgccaccctctccatgcccaacctaagattgtgtgggttttttaattaaaaatgttaaaagttttaaacatggcctgtccactgttctttgacttctgtgcattaggactgtggggacaatctataaagagtctgcgtcacatgcatgaagacacttcagtatctcggcaatgccctccagacagctcctccagccatctgtgccaaggggagtgtgaggagtgacagaccaggctgtaggaacaggaatggggtgtcatgggggatggcagagcagtggacagtacactgcctggcccgggcccctgcttgcctgcccatggaatgtgtgcagagggagtgccaggccaggtgctgctctggagaagtgggggaatgaggctggtcctgctgcaggtcagtctcagcaccgtcctgtccagtcagagtcacttaggtttgccagtgagtaggggcccagatacatgttggatttctaaggtccctccagatgctcctgtcagtggaacgcctatttagagttagccaagcgtaggcataatgccatctttctgcagcataaaatacagtgacatagaaacatatttgtgtgattttcatgcattccttttttgatgagagatattacccagctaattaggaacaactgttttgtttccttcagatcataacccaaagttgtgattttgaaaagtcatgtcccccttcagatttcttgttttctgctacttctcatgtggaattgctttggctcttcttagttctcttgagtctaaattattccttataagttggtgcaagcatctgattattttgttatcattactgttatgctcaagcattcacagagtggaacacattttaatatcaattgctttctatttctcctttatattacagttcaggacattgtattaattattaaaattctattcgtaggtaggttatatgactgaattgaaatagataaaatgaatttcttttctagataacaaaggaggtgtcataaaacacttgttatgggccagtgtgatggctcatgcctataatctcagtgctttgagaggctgaggtggaggattgcttgaggccaggaatttgagaccagcctggggcaacatagcaagacc

SEQ ID NO: 1189 - DNA, 24840 bp, Homo sapiens
ctcgttggcctctctatggtgccgagcgcgcccgttcggacgttgcccctttaatcggcagagggcggtgcccaggaggtcccgcgagagctgcggggggcgggggggcggtgccgaggctgggggccggtggcggatggagcccgcgatggagccggagactctggaggcgcgaatcagtgagtgtccgggaggggcgcgggccggaccggaaccggaaccgggggcacgaggcgggccccttcccggcgggggcggggtacgggtcgccccctcctcacgccccgcccccggcccgggaggggcggtgtcctcagtcggcccctcagaccctggagcgatggaggaccccggccccggcgcggtccagcggtgggagcgggcgccgcccacctgtcggatccctgggccatgacccctgggacggcgagtgagctgcgccgggaacccccgggacggagagagcagcctccaacccccaaggctcacattgcttcacggagtagcggcccggggaaggagcacgcgagcggttccccggggttgcatctcacacccgggagggagggaccctactattttcaggccccgaatcctccactctctggccctgcatggcgttcctggagcccgcaagtagtcacatttgctcattaccccgtcctggaagggaggacccactgccccatttgattcctcccgccgctcctagtctctagccacatagtgagaaacccccgcaccctacaggcttgggagagtcttagactccagaagtattaataattccaagctccctgtcactcccttcagcctaacccctcagtctccaagatgcctttcccagctcttgctgaacttccttcaaaggcttctacacccctttttttcttgtttctcctcagacgtagcttcctattgcttaggcttcctagcccgcaaaccctccacctgagctccttaacccacagccctgatgatcccctgctctcacagccccgctcctggactctgcctctgaaagccgtggctggcttctccctggtctagtgagggttctctcccaaggctttaactgctgttgggaccccgtcgttgccagggcctcagggaaccctcttggacccgggcacaccggcaactgtctagcgtggtttggggtcatggccggccccttttaagccaggcttgagcagagttgaaccatgaggttggccccagaaccaaacctctagggatgtttcagagtcatcctagccaccagaggggcagggggtggaaaaggggcactcagcagcccttgaccgttgtgaacgccggaagtgtccgcctgggtctcagcagcaactgggctggggggatgggtgggcccctggctaactgatctcagacacaggtcttgagctgtgggtcatacaaaacattctcaggtttagaaacagtgggggttttctgagagtccagagagtctaaaaccaggcagaagttagagatacctgggtttggctgggccctgacacactggggctgggattttctcctttccttccccctttgtgtcctagcagaattgtaagatctttcctcttcccttgtggaggctggaggtaaaggatagcttcttctttttttttttgagacgggttttcactcttgtcacccaggctggagtgcagtggcacaatctcagctctctgcaacctccacctcccgggttcaagtgattctcctgtctcagcctcccgagtagctggaattacaggtgcgccaccacgcccagctatttttgtatttttagtacaggtgggctttcaccatgttggccaggctgatctcgaactcctgacctcaggtgatccgcctatataggcctctcaaagtgttgggattacaggcgttagccactcatccgcccacgtcggcctctcaaagtgttgggattacaggcgtgagccaccgcgcccggcctagtgaggtaaatgatgttattgtcagcactatagagtggcagggtggagtcttaccctgttgtgaaacacctccctccctctctaggtgttctccccaactgcctgctagggagggtactcccctcaggtagaattaagagggctgagggtcaggggccatgggccaaggaggtcagtcagatctccttggatctggaggccctggctttcagccagaggcagggggagaaagatgatgtctcatgatgccagcgcttcctcttcactggcgtctgacccaggagcagtccagaatcagcttctctgacctcactccaactcacgtgtctttgacactttaagggacttcctgttttagggtcttctggctgggtgtcattgaatgggcagtgattctctaactttagactgatgttccccagcctttgtttggggactcggaggcagagtagacagttacccttacccctgggttggggagggtcatattcctggtatccccaggaggtcaacaggggcttcatttttctgagggactagagggtcttgtggagctcctgggacagagatctagatccagagagaacattcgtccttccgatctcagctcagctctgagagccctcccagagagcagctcccgagggctccagagccctccgaaagccctcccagagagcagcccccacctcccaggctgtctgcacttctccttgctatgctttgctctgtaacattttgcaacagtctgcagtacacggggtttgttaatctgagtattcattgtttctcttgctgggcagtgaacttgaggagggcagggattttgtctgttcactgctggagccccagcacccagaatacttaaatctgagttggatgaatggcggccagccactgggattccagggctttgggccccctgccataacatatggcccagggcaggcgccacatgctgggtcagtccccagcctcctgtccacagatccttctctgttctacctcctgggctgtgtccttccacaccctcagctcggtgctcaggcgtgggcagaactggctgggaaggggtggtccttagaggtgggctgtggagaaatgaagatcgagctctggctgccgccatggccttcccatgcaaaaagtattttgtcatccaaaatcaatattttggtcaggcacagtggctcatgcctgtaatcccagcactttgggtggccgaggtgggtggatcatttgaggtcaggagtttgagaccagcctgaccaacatggtgaaattccatctctaccaaaaatacaaaaaaattagctgggcatggtggtggacgcctgtgatcccagctactctcaggaggctgaagcaggagaatcgtttgaacccaggaagctgagattgcagtgagccgagatctcgccactgcactccagcctgggcaacaaagcaagactctttctcaaaaaaaaataaaaataaaaaaatacaggccggacgcagtggctcacacctgtaattccagtactttgggaggccgaggcaggtggatcacgaggttaggagatcaagaccatcctggctaacacagtgaaaccccgtctctactaaaaatacaaaaaaaaaaaaaattagccgggcgtggtggcgggcacctgtagtcccagctactcgggaggctgaggcaggagaatggcgtgaacctgggaggcagagtttgcagtcagccgagatcacaccactgcactccagcctgggcgatagagcgagactccgtctcaaaaaaaaaaaaaaatacagccgggcacggtggctcacacctgtaatcccagcactttgggaggccaaggtgggcggatcacaaggtcaggagattgagaccatcctggctaacatggtgaaaccctgtctctactaaaaatacaaaaaaaaattagccgggcgtggtggcgggtgcctgtagtcccagctactcgggaggctgaggaaggagaatggcatgaacctgggaggcggagcttgcagtgagccgagatcgtgccactgcactccagcctgggcaacagcgtgagactcgtctcaaaaaaaaaaaaaaatccatatttcattccagctttacaagatggggaaatggaggttcagggaagcatgtaagctagattgttgtttaaccagtattgggggttaaaggggtagctgtctggtcgtgtttacaccacttcatgtagacctgttggccctctttccttgccactatccatttctggattcagtcttccccagaacctcaccctttgcctgccctcagctgactgctcattcatttgccaaggggagacaggtgtggacatgagtggctgggatgcagtgccgtagcaggctgggggacacaaaagagaactgacccagcactgctaccctgggcaggagtagaggattagagaaggggacaccggagccactcccaagggaatgaaggctttctgaacctggtgtgatggtaagactcacactccttactgaggcccctcattctctgcctcgtgtggttacccgcatctttcctgcccatacagccatgcgtgggtcagaggtgtaccagctccagcctgggtgactcctcctggtccctgcttgtgtgttgcctcttccaggcagcctcctcagccccaaactgaactgagtcccctcctctgtgtttcttttttgtttgtttgagacggagtcacccagagtcccagctctgtcacccaggctggagggcagtggcgagacctcggctcactccaagctccgcctcccgggttcacgccattctcctgcctcagcctcccaagtagctgggactacaggcacccaccaccaagcccggctaatttttgtatttttagtagagatggggtttcatcgtgttagctaggatggtcttgatctcctgacctcgtgatccacccacctcagcctcccaaagtgctgggattacaggcatgagccaccgtgcctggcccctcctctgtgtttctacagctccttggcttccctctgtcacacgttattgagaacctagcttcccttggcccacttcccggctacacagctccttgagggcgggactatgatttttttctcccttacttctggatctcctctgagcataaatttcatgagaattatggagacactgttctcagcagaatcagaggaggtggggctggcgtgatgggtccagctgcaggggtgggaggagtggggaggaggggaagggccctgaccatagtctctaaaagtggggccctttggagggcagctgtgctcatctgtctgtctacacccacaatcaggtcttgaggctgtctgggcaggaaggcagggggagagctttcccacgtgctcagtcacactcctctcccactcctgaccacacctttgccagggtcaggagtggaagagcaggaatcccactgccgggccacaatgaccccagctctcctcttccagatagagccacgaaccccctgaacaaggagctcgactgggccagcatcaacggcttctgcgagcagctcaacgaggactttgaggggtaggtggccgtccccacttgtttgcactgccctgcactctccagaacccagtctcgggtacaatggcctgggtgggtggagacccggttttcattctgaacgtattcacaaagtgatgaggatggggcacttggcactgaatgctgtttgggtgtcactctctggggtgggccttgctggaaccatttaacaggtaaagaaatcaaggctcagaggactcagatctgcccccacatctcacagggagaaaatgctagtcctgagcttggtaagacccaggcctgctggacctgcagccagtgctttgtggggaaaggccccccagagggagaactgcatgttccccaattgggaggaggccagtaggccctttgctcaaggacgaaccagaactacctgtgttagaatcacctagaatgttggccaggcacagtggctcatgcctgtaatcccagcactttggaaggccgaagtgggtggattacctgaggtcaggagtttgagaccagcgtggccaacatggtgacaccccgtctctactaaaaatgcaaaaattagctgggcgtggtggcacgtgcctgtaatcccagctactcaggaggctgaggcaggagaattgcttgaacccaagagacagagattgtaatgagccgagattgcgccactgccctgcagcctgggcagcagagtgagactctgtctcgaaaaacaaaacaaagaattacctagaatgcttgtcagaaatgtacattcttagccaggcatggtggtgcacacctgtaatctcagttactggggaggccaaggcgggaggatcccttgaggctagcctgggcaacatagcggggcaacatagcgagacatcatctcttaaaaaataaaaaaataggccaggcatggtggctcacgcctgtaatcccagcactttgggaggccaaggcaggtggatcacctgaggttgggagttcaagaccagccttaccaacatagagaaatcccatctctactaaaaatacaaaaaaaattagccgggcatggtggtgcatgcctgtaatcccagctactcgggaggctgaggcaggagaattgcttgaacccaggaggtagaagttgcagtgagccaagatcgtgccattgcactccagcctgggcgacggagtgaaactccgtctcaaaaaataagtaaataaataaataataaaaaataaggccgggtgtggtggcttacgtctataatcccagcactctgggaggctgaggcaggtggatcacgaggccaacagattgagaccatcctggccaacatggtgaaaccccatctctactaaaaatgcaaaaattagcaaggagcggtggtgtgcgcctgtagtcccagctactcgggaggctgaggcaggagaatcgcttgaacccgggaggctgaggttgcagtgagccaagattgcattactgcactccagcatggtgacggtgagactccatctcaaaaaaataaataaagtaaatgcaccttcttgggctgcccccagactcgactgtccagtggggggttgggagtggacattctttttatttttttttttgagatggagtctcgctctgtcgcccaggctggagtgcattggcacgatctcggctcactgcaagctccgcctcccaggttcacgcggttctcctgcctcagcctccccagcagctgggactacaggcgcctgccaccacacccggctaatttttttgtattttttagtagagacagggtttcaccgtgttagccaggatggtctcgatctcctgacctcatgatccacctgcctcggcctcccaaagtgctgggattacaggcatgagccaccgtgcccagctgggagtggacattcttagtgggctccccaggcgatactaaagtttcgggaccacaaacagcggtgtgtgtgctttggagtcgtgctgcttgggtacgagtcctgtcccctctcttagctgagtaaccttgggtgagtggttgcctctgagtgtcagtttcttcacagttgaaggaacttcccacggtgaggcgggaatgaccgtgctgcctgccttatgcagcttaggcaggaaagtgcatgtgagcctcctcacacatgaccagttcagcacatgtgagctcttaccgtcactggtgacgggtcttttacagtctgttagatgatgtcaccacctccaccatgaagctgctctgatttgccacagcagaacgtcctttgccaccttgagttcccagggaactgtgtctgcccgtctctcatggcatattgtaattgtctctatggcaagccaagccaaggacgtgacacatcagagttcttaggccagcccaggagctgagctcataccttttgaaggtccctgcctgcagtctctgtctggccctgccctgccacaatctcaggccataactgatctggagagggagctgggcctttgcatatgcctgcagaaaccttagagggctgaagtctcggcggcgggctggggtggtgaccctcccctagggcgaccagggccccttggaggagggctgcagtcccagcggcctggggtcgtggccctagggtgaccgggactccgtggcgactctggctctgtgttgttcctcccacccaggcctccactcgccacccggctgctggcccacaagatccagtccccacaggagtgggaggcgatccaggccttgacggtgagaaggggagaggccaccatccgtcccccgccatgtgacgacaccaagggaggccaagactgaggttcttggggtccataaggctcttcagagcccaagagagttgtgctaagatggcccaggatggaggtccgggcctgccccaagggtcccaccacagccagcgggctggcctcccaccccagcatccatacacgtaggcctgttgctgagggaaggccctctagggtcatctggtccaggggttctttgcttcagctgcacatcggctgcctctccaggaagcgtgttcaacacatggaatcagggctccacccagacctgccgaggccacactcctggagtatctgcatccagagatctgcacgtttgtaaagctaaggggtggtgcttgggctcaggcctgaggttttgcatctgttcaatagcagaggagagaggggtgtactgtctgtggcccccagcatgggccacataccaacccaccatggagcaaagctgattttaagtggtggtagagatacagtttctcttttaatacttacgtgtttagttgggtgcagtggcttatacctgtaatttcagcacttggggaggccaaggcaggaggcttgcttgaggcaaggagttcaaggctacagtgagctatgattgtgccactgtactccagactggacaacagagtgagaccccatctctaaataataatcattattgttacatatttgttttaacatttttttctcaagtataactagtcctatgatttcatagatgtagcttaggataaggccaaggtaggtgttgcctatataaggtttttttaaaaaaggaaaaataggccgggctggtggctcacgcctgtaatcccagcactttggcaggctgaggcgggcagatcacctgagatcaggagttcaagatcagcctgaccaacatggagaagccccatgtctactaaaaataaaaaattagcgaggcgtggtgggcgggcgcctgtaatcccagctacttgggaggctgaggcagaagaatcatttgaacccaggaggcagaggttacagtgagccgagatcgtgctactgcattccaacctgggcaacaagagtgaaactctgtctcaaaaaaaaaaaaaaaaaggaaaaatagtaagaaaataatgtacagttggtactcagatgtggggcctaagctatgaatgggactagagcattgctacaggttgggcattgctgggcactgtatgtaggtcgcctgaccctatctcccatgggagtgatgaccagtcccagaggcctgtgtgactctgaatcttccaacctcacaggccattccctcccttctgaaagcccacccatgggcttctggcccctgtccaaggcgtgggagggaggccacggcctctgatgcacctgggcgtcccctcccatcccccctccctgcacaggtgctggaaacatgcatgaagagctgcggcaagcggttccacgacgaagtgggcaagttccgctttctcaacgagctcatcaaggtcgtgtctcccaaggttggtgcccccagcccaagctcagacctgccctgtcggatgtggggagaggaaagaggaccttcagattgtggagcgacttttccagggagcctcccactggggtgtcacctcagccccccattagaactcagacctaggaaaaacacagatctcttctcacagtcctctcatacctgattctgggacagcctggggtctcggaggagtgtttccaggctggccaggggcggggcagccatggagctgcccggtgcttaggaagaaatgattccagggaatacataagctgacagatggctgtatgtgtcagccatctctggcctgaaatcactccctgtggacctggccacagaaccctacctggtctctggcaggtttccctgtccccaccacacaagagcaacctccctggacctcagcatccaaggccacagacctgagtgatggagcctgctggctccagacgggccatccccggctcagcccaaggagtcttcccacagaccatgaacgtttctttttctttatttttttgagatggagtcttgctctgtcacccaggctggagtgcaatggcatgatctctacgctccacaacctccacctcctgggttcaagcaattctcctgcctcaacctcccaagtagctgggattgcaggtgcacgccaccatgcccggctaattttttgtatttttagtagagatggggtttcaccatgttggccaggctggtcttgaactcctgacctcatgatctgcctgtcgtggactcccaaagtgccgggattacaggcgtgagccaccatgcccggcctacctaccgtgaacattttttttttttttttgacaaggagtttcactcttgtcacccaagctggagtgcaatggcgcgatctcagctcactgcaccctccacctcccaggtttgagcaattctcctgcctcatcctccagagtagctgcaattataggtgcccaccaccaagcctggctaattttttatttttagtagagacagggtttcaccatattggtcaggctggtcttgaactcctgacctcatgatccacctgcattggcctcccaaagtgctgggattacaggcgtgagccatggcctccggcctactgtgaacatttcttaagctgtttgagtgacagcccacccccttggcccttccttgctcagacccatcctttgaccagagctactgaataatccatatggcctcccattctcctcccaacaggggactctgctgtgagagccactttccccagcccagtttgctgctaggagacggagagtaggcccagggcctcccagttccaccctcacccctccctgggcagcctggagacctctggctcctctttcctgggatgtcaaggctaagtccccagagccgactatgagcaggcctgtccctcatgtcagttctgcatcctcaccatggtgccatctagcaggtggggaaacagacactgagggctgacccagctaataagtggcaggggtagtaggtgaactcagtctaccccaggctggttgggcggggctatgaggaccctgtaggctagagggcttcccggggagtcctggggaggcagtagggtgtggacagggcttgagactgaagtgagtggggctgggcagtatcaaaggcctccccactgtgtccctgaagtatctgggctctcggacatcggagaaggtgaagaacaagatcttggagctcctctacagctggacagtgggcctgcccgaggaggtgaaaatcgcagaggcctaccagatgctaaagaagcagggtgaggcacacagagggtggggggcgaccagggcctgccttcccctcccccaccatgagctggggctccagcggcttcaggggcttctgagccagcaaggtcatgggtctgtcctttaacttctggagaaagtacatacagctagtgcggccttctgtgctctgcctgaggctagcttgggtggaaagaaggtgagttcgaatcaagcttcccctcaaagagtggtctccagggagtggcctcaaaatatgggtccccaaaccatctcccccaggcaattttgatggagtaggtaggagtaggcccaggccactaagagtccagagccagcgtgctggcaaaagactgacctccctcttctgtcctacccttgcctgcccccatccccatgtcacccctacccctgggcctgggacatattgacagcctttctgacactcatctaatccagggattgtaaagtccgaccccaagcttccagatgacactacctttccccttcctcctccacggccgaagaatgtgatctttgaagatgaggagaaatccaaggtgagactccaaggaggcacatatggggactctgagcccaggtgggggtccgtgggttctgacctctagctgccctggcatcagccgttggaacagaggcacacactgagcccaggcatcgttgtagatgatgggcgctgtttactgggcatttaatatgtgctgagtatgtcccatacagcatccccacatttaataaacaggagtgtgtctggtgtccctggagtttgtttgagggtattttgaccttttctataagaatttcactaattttttgttaaaagttaataaaattaaaacttgtgggtgaaaagttaaacagcccaggaggaggtaagattaaaataaagaggttaaagtaaaaggtcccctctccccagtcttagccccagccctggagagtgtctactgttaaggttcttgtacattgtcccagaaaggttctcagccatggggatataaggagcaccatttgttgattacttatttctgctaggcgctgtggtgtgcactttacatgcagtgtctccgctggcctgtggccaccctatcaggcatcagtaaattctcaccatttcacagagagcttaagtaacttactcaggtcccacaggcaggaagcggggagccatcatgtgactccagtcttctgacccctggcccaggtgctgccctcacggtcacacccctctgtctctgcagatgctggcccgcctgctgaagagctcccatcccgaagacctccgcgcagccaataagctcatcaaagagatggtgcaggaggtagcggccgagcccagagcacagggaggaggcgggatgggggtattgagctgggccactgagatggggctgtatgcatcttcacatggaaggagccctgcagtgacccgggctggcacagcagagaagctgatgctgggggaccagggtgtgcagggaagaattcccggcagcctgggtgacttgctctggatgggcctttgggaggctggctacctcttcgtcaaaagttagaaatgaattaggccttagtatatttttaaaaatactaagtatttttaaaattactttttagtatttaaaaatactaagtatttttaaaattattttttagtatttaaaaatactaatgaatatatgtaagtatgtatacgtgtatgtatatgaggagactttttttgagacaaggactcactctctagcccaagcaggagtacagtggcatgatcatggctcattgcagcctcaacctcccgggctcaagcagtcctcccacctcaacctcccaggccgctggcactaaatacgtgtgccaccacaccggtatagtttttgtattttttttgtggagaaggggtttcgccacattgcccaggctggtctggaactcctgggctcaagcaatctgcctgcctcggcgtcccaaagtgctgggattacaggcatgagccactgcctggccaaatgtttaatttttaagtaaatatacatatgttgcctgggtgcctgctgaaactttttttttttaattgagacaagatctcatcctggagtgcagtggcacgatcatggctcactgcagcctcgacctcctgggctcaagcgatcctcccacctcaacctcccaagtagctgggaccaaaggcacacgctacagcgcccggctaattttattttttgtagagacagcatctccctttgttgcccaaactagtctgtaactcctgggctcaatgaccctcccatctcggcctcccaaagtgctgaaaaaaaagtttcaaagctggatgtggtggctcatgcctgtaatcccagcactttggaggccaaggtgggaggactgtgtgaggccacttttcactctgcaaaggaggggcacgcacagtaagcggaggggcaggggaaagccgggctgctcccaaaagcagcctttgaaggcacgggctcccccatctgccaggcaccgacagacactggaagggtcttcctgctcgtttccaggctgtacctggtgaccacagaggtccccttgcactatgaagtacaggaacctcctttgaaagggcaaacacaaggagggcaagagtcactgagaaccacagtggaggtctagggccctgggccttcagaagcacctggtgaggggtttggaaacccaggttcctgggccatctctgaagatcctgatgagcttgtgcagaggcctgggcactgggggcttcttggaccagcgtgcccttcctaggcatgaggggctcctggcagggcctgctggagccccacccagagtgtgatcccacagtcacccagctgtcaacccagatcccagcacacattctctcaagtggcagggggcagtgcctcgtccaggccaaaggttctcaggggcccttggccaatgtgtccccaggaccagaagcggatggagaagatctcgaagagggtgaatgccatcgaggaggtgaacaacaatgtgaaactgctcacggagatggtgatgagccacagccagggcggcgcagcagctggcagcagcgaggacctcatgaaggtgcacctgcctccctgcctaccccactccctgcccactccacagcccacgcggaccctgacccgcccatcctgctgccctcaggaactgtaccagcgctgtgagcggatgcggcccacgctcttccgactggcgagtgacacagaggacaatgatgaggccttaggtgagcccagggcaggtgctgaggtcaggtccccccctctccctccacctcctgcccccacctcccccaggccctgctaagtatctgcagttggaaggagccaccaccagggggcccccttctccagcaccgaccttgggtttctcctctctgaggacacagagcaggggccgcccccctgttgagaggccctgtgggccagcccccttaacaggcatcttatttactacccgcagctgcacaggaggcagacccatccccttttcacaactggggctaagggaggaaaatgacttgcccagatcacagagcagaacagtggcagagccaggggagacggagggccatctgcccccagaccttcctccctaatgagggtgaatggaagctaagagtgcatcccacagcccaggcagttccagacctgagcctgacggcttctgccagggccacataccaggttcttttccttgatctctgcccacgtgtcagcctgggccacttgggctgcggtctgggtaccatccactccctcattaagcaggagccccacccacaaggctcactgcccagattgccccacaccctggcacctggggaaggcagtgttgccgagggcctgattggtgccaggcactgttctaggccctcagggatctggcactgatcaaagtttgcaaaacgccgggtgcagtggttcacacctgtaatcccagcattttgggaggccaaggtgggaggattgctttagtccaggagttcaagaccagcctgggtaacatagagagacccagtctctatttcaaatatatttatattaaaaaaaaaaaaaaaaggttgacaaaaacttcctcatggtagtttagtgagaggagacagacaataaccaagtccatgagcaccgacagttcgtcacggtggtgagtggcatggaggaagagaagcagggaagggatgaggtggtgcaggagggatttaggacaggcctccctgaggtgagccttgggtgaagacctgaaggcagtaagggatgaagccatgcagagatctggggcagccagagagcagagctggagtggaggcctggaggcgggagcgggcccagtgtgttgagacagcccaggcagtatggcagggagtgaatgagggaagggtgggaggtgagaccagggaggtggcggagggccagagtctcagcagacgagatgggctgtttccctgcccctttcccttcccctcacacacaggctgtgatggatgtggggtcctcgtcccctgccgcccagaggcccccacagtccttcagcctggcctctcccctcctgcctgttccagcggagatcctgcaggccaatgacaacctcacccaggtgatcaacctgtataagcagctggtgcggggtgaggaggtcaacggtgatgccacagccggctccatccctggtgaggaggtggcaggagagctgggagggcacccatcaggctggaggggcacagagagtgcagggtggtgtgctggtctcagagcggctggaatgactgccagggtgaccctggccccttaagatggggaaggccccagggagggagctgggggtgaagtctgtgccaagcctgcagctgtgggggaagaagtctggtgggggagctgagggtttggtgaggacaggcagaagaaggaaggcattctttcatttgacaaatctggcacctgttgtatagggctagatgacaccccagaggctttatgtatcagaaaatgcgaggggggttagaaaagtaaacattacagactcaggtctaataagggtaagatggcagccttggggggtcacaaaaggggttagaattggttctgttagggagaagtggagatggaggcgctgcacggaagcagccaagtttcagcagggccttaaggatgggtagcagtttgcccagtagagctaagaaggaaatacattccggacagaagtaccatcatatgccaaagagaggtcctgttgagcagtttccaggcaggggctggtgtggccaaggaaggggaggcaggagaccagtggtaaagcatcgggggttaggtgttgctcccccgcaacccctgtggactctgagagacacgtgtacacccaggacttgccagcctcttctttcccaccccagggagcacctcggccctgctggatctctcaggcctggatctcccgcctgcgggcaccacctacccagctatgcccacccgccctggcgagcaggccagccctgagcagcccagtgcctcagtttccctgcttgacgacgagctcatgtctctgggtgaggaaggggccaggcctggaggagggcgggctcagcagcagatggggcatgatcccagggcccactcacagctagcggaaccacgtaccccaggtgtggatcctgtggggcacgtggatgagcattaggcccacttcacaactgaggaaactgaggctcggggaagttaggagcttgtgcgaggccacacggccagagggtgaggctggcaacctctaagccggcctcggataagctaaccagcattcaggctctggcagcctggggggaaaccaggggatttccccgcaacaggttagagcctggaattgagaactgtctgggcaaaagttcagcagtttcttcatccaccaagaggagagggagggctctgggctccagagcacccagaggctccagagaagccgaggccagagcgcgagggactcggtgatccaagctggtccagggccaggcctgctgttactcccgggcaggctccggctccagagcccagcaggggccaggcttccccggggggaagcagcaaagcgttcccagctgcccaaaccatttttgggtttccaactgctctcagggcagcagccccatccgagagctgagatcagaacagcctcctcctgagagccactgaagggatgaagagcagatacgttagggccacatcaaaggaatcctcagggatatgttggaagccaagattcagactgtggtttcctgagccagttctgaagcaaaaaccagacccgaaggccttgaagaagtgatggggacccggggcgccctgggcggggtctgcctgggttccaggagtgcttcctttggtggtgcccactactgcactctgtcctgtcttaggtgaccctcacggtctctgcaggcaggtgccgttaatagccccactgcacaatgaggaaacggcagcacagaaaggcgcggtggctcacgcctggaatcccagcactttgggaggccaaggcagagggattacttgaggtcaggagtttgaaactagcctggccaacatggcgaaaccccatgtctattaaaaatacaaaattagctgggcgtggtggcacatgcctgtagtcccagctactggggaggctgatgcaggaaaattgcttgaactggggaagcagaggttgcggtgagccgagatggcaccactgcactccagcctggttgacagagcaaggctccgtctcacaaaaaaaagaaaaagaaaaggaaaaagaaaggctgggtgacttgtgcagaaagggctctaggacttgagctgggctctgatcctgaagccacactctgagcagctgggctgctctgactcgttgttcataagcaaggaaaaggaaatgaggacccggagtgtggagggagagctgaaggggaaggagagctgaggggaaaggaggcccagttgtgagctccctttgtgaacccagcagccagcaccctccctgaagctgcttacgagccccatgcagccgccccctcttcattcagagccaagggtgaccgcagggagaggacctttaccccattctacagagaagtaaaggacggtcaagggacaggaacgttcatacaaggtttatcttcccctgtggagccagccctgggtggcagctacctgaggggcagtgggtggggaagtactgcagggccaccagcccccagccagcagctgcagcaccacctccacaagagaagcgagatgcagccgcacttcctgtccccgcactgcactggcatagttctgagccaccagcttccttctgttttcctctcagaggcaaagcatgggggcacaggagccggaagtgccagggcagcctgcagcctgggcctggggaatggaggaggccctggggccacacagggggctggtcctcactcttcacggcaggggtgggagacaggttcctgtccctcaaggagggtgttcaggcagccttaacctcccccgtctcaagtgatcctcccatctcaggctcctgagtagttgggactacaggtgtgtgccaccacacccggttaattagtttatttttagtagacacacggtttcacctgtgttggccaggccggtattgaactcctggcctcaagtgatccacccaccccagcttcctaaaatgctgggatgacaggcatgagccactgcgcccacctctttttggttttgagatgggggtctcactatattgctcaggctggtctcaaacttctggcttcaactaatcctcccatctcagcctcccaagtagatgggaccacaggcattggctaattttttttccttttattctttaggggtagagtctctatgctgccagggcttatctcaaaccccagcttcagcctcccaaatagctgggattacagacattagccactgcacctggctggtgtctccattttacagatgaggctgtcaccccccaatatcacacagccaagtggcagagttgtgttcaaatgctggcagtcaggccatgctctgtctgagtccagactctgccactttctagctgtgtgttctcgggcaggttatttaccaactttgagtccattttcttatccctaaaagagggctgagaagctcacccctacctttgaaggttgtttgaggattaagcaagaccagcatctgaagggcctgaagcatctagggcatcatcagtgcactttatctctggcctctaagaagtgcatctagaagggacccactgtcacagcttcctggtacccttgcctttgcctgtcaggtagcacttcggtttggacctcactttttcaggatttgttggaaacaagatcccttatcttctctaggtcagatttggggtgaacttggctgacagtattccagggcaggcagaggtcaggctggctggtgacctgctgcctccttcccatcggcagctagttctagggccatccacagggatccccagccctccatagtaccagtgagcctcactggcatgtgccagggccaagagggccttcagcgtcgcctccagtccagccctgtcctcgtattcttggggacactgtggctcagccagcacagtgcctagcccacagtcacccagcaggcgtccctcgagtgggccagtggcaggcacagagctgctctccccttgcctggatgcgtgaggaaaggaacctcttctccctgcagcccagccctgcaggctctctgctgccagatgacgagtgaagatgaaagtcctgatgtctattgtctgtgtgcacagagctttggagtggcctggccaggaagaggggaagcgtgtgtggggtcagcacaaggggttgccgggatcttggttactggttctgctctgctgctggttccctctgaaaatgtgggtttctcccctccgtgctgagcctcagaaaggggtagggagccccatgccagcacacatggcccctcggctctctggcctctgcagggtcagcccagctccttcacctctctcctgctttcccctcaggcctcagtgaccccacacccccttcaggcccaagcctggatggtaccggatggaacagcttccaggtaggaggggaccacaaactagtctggcctgtcccagtcccagggtcagggcagctgggacaagtggcctggagaaactaaaaggatggatgggctctactcaagagcccagggccagggggtggcccaggggcctggagacacccacccagggtacagggcctccccttacctccagctgtatcttccccaagtctcagccttggggctgcagcccagcctttgggattgggattgagatgggcaatccctcttcctttcccttgagggtgacagaggtccctggattgtagaacccccaaccagacccagccaccctgcatcatggacatgggtggtctggggtccccacctctgtggctgctttcccagatgtcatttgcaaggaggacactgagcctcagggcaggatcaggtgatgctgacacctctctagacagccccaccccacctgcatccttttccccacagtcgtcggatgccactgagcccccagcccctgctctggcccaggcccccagtatggaaagccgacccccagcgcagacatccctgccagcaagcagcggtctggacgacctagacctcctggggaagaccctcctgcagcagtcgctgcccccggaatcccagcaagtgcggtggtgagggcccaccatggctggcatggggtggggagcactccctgttcccacaaaccagcaacttctcctgggcttgtccaggcccagcagggagaggctcgttgctgtcttgttttgtaagcagcagatgccaagcagtgcacctgcctctggaaacacaacagtgcccaaggcagacctgggcccactggcctggcctccccccaggtgttcccagctcccttgagaaaggtccagagggccggcagaggggaggacactgggctggagtgaataggtggggtgcagggtggagggagaacacgagctgctccttctaaaggtaagacccaaggccagagagatagccacacgtgccagcctttcctgtgcccctgatctctccatcaccaaagaatcactttttctttttttgagagggagtctcaccctgtcacccaggctggagtacagtggcatgatctcggctcactgcaacctccatctcccaaactcaagcgattctcctacgtcaggctcctgagtagctgggaccacaggtgtgcgctaccacgcccagctagttttttgtattttttatacagaccgggtttcgccatgttgcccaggctggtctcaaactcctgagctcaagcgatctgcccgcctcagcctcccaaagtgttggaattacaggggtgagctaccacgctggccaagaatcacttcttaatgcactgtcccccgattaagggagaagcagcagccaaccccccggctcacactccgggacctgcagaataagagcagcagctgcagctcccccagctccagcgccaccagccttctccacaccgtgtccccagagccccccaggcctccgcagcagcccgtaccaaccgagctctcactggccagcatcactgtgcccctggagtccatcaaacccagtgagtagggctggggcaggtgcaggctgggttgggtcagcttgctgccctgtcaggagctctgtctggggaagctagtgggaaagcagggctcccctggctctgccactggccaaccagaggggagctctgaacaaggccctccccttcccaggagtcagtttccttatctgccccagagcaatcagaggactgctgtacaaactccaggcttatataagcaagaagacctctagggagtaggctctgggccccttccatccccaggaaggcagggcccaggacacagagaggtttggggtctcccccagattacagaactgaaccatgataaagacccagatccaaggctgggtttttccagcccaggagcagtaaggggaccatggcccagccccgggccccaagcagacacatgaggcctggtggtcctcagcattgccctctatgagctccctgtgaccaaagacactacccccacagtgtctcccagcagtgggcagagctgcccctctcaccagtaggagaaccctgagctcagagaaggggagtgactgccgcaaggtcacacagcgtgagactcaccctcaccaagtccctcaccccagcactccaggcagcagccacacagcatcgggggaagctgggctgtgactcggctctggggtgggtgtcctgcctccactatcagactgggggttcacctgccctctctgggcaccgctctgtgcccctgcctgcactgccacccagggtccaggtaaggccccaaaggaggactttgctcttgttgccagtacagcagccagctcctgaggccagccgggtgggggctgggggctgagcggatgtgctgcagctcagctgtcccatcgccctcccaccttctcccacaggcaacatcctgcccgtgactgtgtatgaccagcacggcttccgcatcctcttccattttgcccgggacccactgccagggcgctccgacgtgctggtggtggtggtttccatgctgagcaccgccccccagcccatccgcaacatcgtgttccagtcagctgtccccaaggtgacaagccagtcggacagggcatgcctccctcctctcaaggcagggtgacatggagctgggtggggagccacctgtcagggggcaggtctccctcccttgctgggtggttggtgtagaagggaccagaaggactgagccccaggatccccggaggggagctggcaggctgggcctggttcctcagagcaggacaagcagccagggctagctgtgcccatcctgccatctgcccacaggttatgaaggtgaagctgcagccaccctcgggcacggagctgccagcttttaaccccatcgtccacccctcagcaatcacccaggtcctgctgcttgccaacccccagaaggtaaggggcccccaggcagtgctgcagggtggggacggccacttctcctcctctgacccctctgcctttgccatctcttccccaggagaaggttcgcctccgctacaagctcaccttcaccatgggtgaccagacctacaacgagatgggggatgtggaccagttccccccacctgaaacctggggtagcctctagaacagaggggctggggagaggaaggggcagagggaccggtcactgtccagcctggagggaggcattggtggccaaggacaccctttgttgcccatggccattcacccccaggcctggtgcttctccccacacccctgtaggcctcaagtgactcttccccctcctgctccggccccgcccctgctgagccaaacccagtaggaggctgggcctgggtttgtgccgctggggtctccatcaccgggacctggagagggaggggctgtgtagccttggaagaacttgggtcatggggaggaagcacagctgttggggaagggccaggacctcaggcccagccccaaccccagctggggtggggtcttccccacctgtctcttatgccttatgggaaggcccagccataactcgggggccatgctggagctggggaccagcttaggcctcctccataggaacccagtgactggggggtgacgcctacacccccagctatttgcactctggtgtgtggtttgactctgcttttcttccggattggccctgtggtcacagcctcagggggccaggctgggggaacctcacctggcccgtactcctgggggtttccctttgccattgggccccctgagggactgtgggggctcaagggtaatgccagaggcccatggccccagcgaggggctgtggggcacctagagttctcggtgtgtctccttcattcattggcctctgctggggcctcctatgggtgtcttacgtctgtccatccatctgtccgtggtcagaagtggggtcagtgtgtgagtgagagcaggagtatttatgaaaataaaacgtcgtttttcctgga

SEQ ID NO: 1190 - DNA, 25765 bp, Homo sapiens
acaacaattcaggcccttgtcccaagtaggaggacattccccaagcaggcgggtaaagtctcctcctggtcaagtgctaacggtaaggatgggcttggcgcctacacacccatcccaattcacaggcgatcccagatctgagctctttagctgaaccgcactttcagctccgcgttagaaccctagatcagccagactccttaggcgagaggtagtcactaaaccttcggattggcgcagggtcacgcagctaacttagaagcttgaatccagatactccggcccccagggcaatgctctctctaggggcccacgcggcctgcctgtggcccccttccttcctcgcagcgcccccccgccgctgctcgccaccctctcaccctggaagctgcaagacagcccgccgcacgcccaacgccaggcccgaccatcctcgggcaaccttcactgcgggggcagccatcttggctggccacgaggaccccacaaggactgccctcggcgcgcctgagcgagtgacgggaaacgggtgaaaaagactcctcagggtcctaaatctgcgtttctctccactgatctggacgttagagtttttcactccggggtccaaaggggagcgccaaaaggaaacccttgccctccctgtatccgtcgcagtctggcgcggccctcggtgacggcactcactcctctcaggaccccatgcaggccccgccccgtctcagctcgtgcagactctcgcgagttttgaagccgcggggccgggcggctgcaatatggcggaggcggaaggggaaagcctggagtcctggctcagtgagtagccgcggccgtttctgcctgccctcgagccgctgggctgcccctgtcttcacccccacgtcccctccccgggctccacggcgtcgcctcttggcagcccacgcccggtctcgccctcgccgcgagcagcctgcgatcacgccccttccctatcagggcgccgggccccagtccggcccccgcttccctcgctgcggcgcgtcctcttgctctggcgcgcggcggcgtgaactcgggctcctgtcgggcaccgcaggctcggggaaaggcgacagccaagatcttcgggctgacatgcttcggcgctttggggagattgtggtggggtcgccgcccggcggtgacaccaggaacccagcgccccaatccctgactaagggagaagcttcggattggggctgagtctccggtagtggtgggtgctgccgactgcgttcagtcgcctggcagcttcagaattgtgaccatgtgttggagaagtgacggcttcgctcaggcagaatgcttgaagtgagaataatattccaaagagagcgatgatagagaacagagagctctacctttttcctgcagtgaccacagaagcatggtgaaatcggtgtcgggaattccccccccacacacatacatatacccccttgaatatcctaacgagtcagtgttgatagcctattctgagtaaggctgaggagcacagtctgaagctgtagttatagaagcgtattgctgtcattgcactgtgaattacagtgctacgaaggaaatgtgtgttaacctggttagcaggtagtactctgcctgagggttaataagtgaactttcctgtaggctagacctggaagcctcctttaagtggagagagaaattggactggtaatgggataggtgagatacctagtattgccttgttctgaggtctcttatttagtactgcttccgggatcttggaggtgatagctatttcctcaaattgtctgatttttcctagtaagaaacccccttcaggaggttgagcttcagtttaaaggggagcatatcccaaaagagagaaaaagtaagatcacgtttgcaaaatctgcagttgcaggcaggtcataaggcttctttatatatggaagtgttctccaaggagctcaaagtactttacagatattcattaaattagtttaccaagtattctagcaaagcaggcactactgccataatttcacaaaaagaggacatcctgactccagtcaaaccacttgcccagaaatgcccaacttgctataaccagagtggaattagtttgctttgaaggtattaatatgggtattgaataatttaaatgacctaagctgagtttaataggctacatttagagttacattttgtttttgttacttgtttttgagacagagtctcgcgcgctgttgtctaggctggagtgcaggggtgcgatcatagctcactgcagccttgaacccctgtgctcaaataagtcttctacctcagcctcctgagtagctgggactataggcacacgccaccatgcttggctaattcttttgatttttagtagagatgaggtcttgctgtgttgcccaggatggtctcaaactcgagttcaagtgatcctcccacctttcccttacaaagcgctgggattacacacgtgagctaccgcacccagcctagagtcacattatgaaatgagagggacacacttggtgggggggagtcacatggtatctgtagagacataagcttcacagttgttacgacttaatgtgaactgtaccagttgaacaaaccagcagttggggttcagcatcgtctcagtcagcgtccttgtcaccccacgtttgcctgaattgttgcagaagcctctgcttggcccagagacccaggtctctcccgtcctcacctctcctcagtccattctgctcccagaagcgcacttgtgttgaatcaaatcattccactgttgcctgtaatctggccttggttgttccaggcctttttctctgtggcttctacgttttcctgctctactcagtctgatgttcttggtttaccaatacacgttgctctccttacctggaagccctgctcccgtttcctcaactaaatgcttgaaaacccatctcagattctcttttctcacaaaccatctcttgatgacttcagtcttctttcaagtcccaccatgatcaatcaatcaatgtttaatgagtacctgctacgtggggtgttataggagttaggaagtttaagaagattttgcctttagttggatggaggtgatgctggagtggatgaagaactctcctgtaatcccagcacgttgggaggccgaggcgggtggatcacgaggtcaggagatcgagaccatcctggctaacacagtgaaaccccgtctctactaaaaaatacaaaaaaatagccaggcgtagtggcgggcgcctgtagtcccagctacacgggaggctgaggcaggagaatggtgtgaacccgagaggtggagcttgcagtgagctgggattgtgccactgcactccagcctcggtgacagagcgagactccgtctccaaaaaaaaaaaaaaaaaagatacaaggcagtgctaaaacgccggcattctctttagggaactggggatgggggaagagatgattcattgaggatactccatttgagctagccattaaataatgggaaaagttggaaaaaaaaaaacactagatggtgatgtggagagagcaaacctgtttggggcacacagtaacagaggtgtttgggaatgagggaagataaggctgggaagttaagaccagattctaccaagtctccaatttccagcccaagaagtttattttatttatttatttatttgagacagagtcttgcactgtcacccaggctggaatgcagtggcacaatctcggctcactgcaacttccgttgcttaggtgcaagcaattctccatcctcagcctcccaagtagctgggactactggtatgtgccactacacctggctcatttttgtatttttagtagagatggggtttcaccatgttggccaggctgttgtcaaactcttgacctcaagtgagccacctgcctcagctccctccaaagtgttgggattacaggcttgagctaccacgcccagcccagccgaagaagtttaaatttctgcagttatcaggccctcattccttctgtactaggtgaaatcggtgttttggtgtcttaagaggcttgatttgatataggtttcatgcgcgtccgtgtgaagagactaccaaacaggctttgtgtgagcaacatggctgtttatttcacctggatgcaggcaggctgagtccgaaaagagagtcagcaaagggtggtggattatcattagttcttacaggttttgggataggcggtgaagttaagagcaatgttttgcgggcagggatggatctcacaaagtacattctcaagggtggggagaattacgaagaaccttcttaagggtgggggagattacaaagtacattgatcagttagggtggggcagaaacaaatcacaatggtggaatgtcatcagttaaggctatttttacttcttttgtggatcttcagttacgtcaggccatctggatgtgtacgtgcaagtcataggggatgcgatggcttggcttgggctcaggcctgacattcctgccttcttatattaataagaaaaataaaacaaaatagtgttgaagtgttggggcagcgaaaatttttgtggggtggtatggagagagaatgggcgatgtttctcagggctgcttcaagtgggattaggggcggcgtgggaacctagagtgggagagattaagccgaagggagatcttgtggggatgttagaagaaacatttgtcgtatagaatgattggtgatggcctggatatggttttgtatgaattgaaaaactaagtggaataagagaaggagaaaaacaggtataaaaggtctaagaattgggaggacctaggacatctgattagagagtgcctaaggagattcagcatagtcctgccagcaaagattatttatttacttcaagagttaagagtggcagtttggggatagcacgaggagatatcacctgtgatggcttggagaaacagtgtaaaccagcagtgtaaacaagagcagggcatgtatgagtagttgagaacgttgaataggagtatgactagacagaagatagtagggatgatgacaggttttttttgggggggggggcacagtctaagttggtctggtgtctggaatgagactggggcctaataaaaaggagcatctatacaggagcttaaatgggctgtaccttgtagcattctgaggacaggtctgacttctgagaagggaaagtggtaaaagtattgtccagtcctttttaagttggtggctgagcttggtgaagtgtttttaaaagacctttagtccgttctgcttttcttgaagacggaggaccgtaagggatataaaggtttcactgaatactaagagcctgagaaactgcttggctgatttgactaataagggctggtctgttagactgtatagaggtgggaaggctaaactgaggaattgtgtctgaccgaagggaagaaatgactgcggtggccttctcagaccctgtaggaaaggcctctacttacctagtgaaagtgtctacttagactaagaggtattttagttatctgactcggggcatgttgagtaaagctaatttgccagtcctgggtgggggcaaatcttcaagcttgatgtgtagggaagggagggggcctgaataatccctgaggagtagtagaatagcagatggaacactgagaagttatttccttgaggatagatttccacaatggaaaggaaatgaggttctaagaggcgggctagtggcttgtactatagcatagcctgcctttgctgctgtgtggcgattaggcctgctggaactgccatcaataaatcaagcgtgatcagggtgaggaacaggaaagaaggaaatatggggaaatggggtgaatgtcaggtggatcagagagatacagtcatgggggtcaggtgtggtatcaggaataatgtgggaggccagattgaggtccgggccaggaacagtggtaattgtgggacttaacaaagagtgagtacagctgaaggagccggggagcagaaagtatatgcatcaggtatgaggaagaaaataatattggaagttatgagaaatgtagagagtgagttgagcatagtttgttatttttagggcctctaaaagtattaaagcagcggcagccactgcaagcagacatgagggctaggctaaaacagtaaggtcaagttgtttgggcagaaagactacagggtgcggtcctggctcttgtgtaagaattctgacacactaaccatgcctaggaaggaaaggagttgttgttttgtaagggattgaggtttgggagattaatcggacacgatcagcagggagagcacgtgtgttttcatgagaattatgccgagataggtaacagatgaggatgaaatttgggcttgactgaagtaatgggggctgtctgtgaagccttgcagcagtacagcccaggtaatttgctgagcctaatggatgtcagggtcagtccaagtgaaagcaaagagaggctgggatgacgggtgcaaaggaattgtaaagaaagcatgtttgagatccagaacagaataatggattgtggagggaggtattgaggataggagagtatatggtttggtaccatggggtggataggcaaaacaatttggttgataaggcatagatcctgaactaacttgtaaggcttgtctggttttaggacaggtaaaatgggggaattgtaaggagagtttataggctttaaaaggccatgctgtagcaggcatgtgataacaggctttactcctttcaaagcatactgtgggatgggatattggcattgagcggggtaagggtgattaggttttaatgagatggtaaggggtgcatgatcggtcgccaaggagggagtagaggtatcttatacttgtgggttaaggtgggggggaatacaagaggaggacgcaaaggaggctttggattggaaagggcagcaatgagatgtagctgtaacccaggaatagtcagggaagcagataatttagttaaagtgtctcggcctaataagggaactgggcaggtggggataactaaaaacgagtgcttaaaagagtattgtctaagttggcaccagagttggggagttttaagaggtttagaagcctggctgtcaatacccacaacagttatggaggcaagggaaacaggcccttgaaaagaaggtaatgtggagtgggtagcctccgtattgattaagaagaggacggacttactctccactgtgagagttacctaaagctcggcatctgtgatggtctatggggcttccgaggcgatcgggcagcgtcagtcttcagccgttaagccgagaagatctgggaaggagtcagagagccttgggccagagttccaggggctctgggagtggctgtcaggtgagttgaacagtccaattttcagtggggtcccacacagatgggactcgcttaggaggaatcccgggctgcgggcattccttggctcggtggccagatttctggcacttgtagcaagctcctgggggaggcagttatggaggaatgcctggccactgcggtttaggcgtttggaagttcttgtgtgctggagatgtagctggggtttgtctcacagtggaggtaaggaattgcaactcagaaatatgttgttacttggctgcctctactctattattgtacaccttgaaggcgaggttaattaagtcctgttgtggggtttgagggccggaatttaatttttggagttttatttaatgtcgggagcagattgggtaataaaacgtatattgagaataagacggccctttgacctcttagggtctagggctgtaaagcgtctcagggttgctgccgaacgagccatgaactgggctggatttttatatttgatgaaaaagagcctaaacgcttctgatttgggataaagaaaaaggagcattaaccttgactatgcctttagctccagccacctttttaagagtaaattgctgggcaggtgggggagggccagtcactgaacgaaactgtaagctggaccaggtgtgaggaggggaggtgataaaaggattctagggtggaggagcagaggctgaggaagaattgggacctagatggcctggcgacgagcagcctgaggagaaggggaaaggtcagatgggtctgtagaaaagactggaaagacccagcgacacttggggttgggactgaggggacaggcgggagggaaagaaggaggatttgggaggaatcgcattgggaacagagacttgagagggaacgaagtgtgaaaaatgcctggatgtgaggcacctcagaccatttgcccattttttgacaaaaattatttaggtcttataggatggagaaatcgaaagtgccgttttctggccatttagagccattgtcaagtttgtactggggccaagcggtgttgcagaagaaaataaggcatttaggttttaggtcaggtgcgagttgacgaggttttaagttcttgagaacacaggctaagggagaaggaggaatggaggctggaaggttgcccatagtaaaggaggcaagcccagagaaaagagagagtagagacacggagggaaggggttcgagggttcttaccctccagaaaagcaggaaaggggtcagggtgtggaaataagggattggggcacacagataagaggtcggggtgcggaaataagggattgggggttcttgccccctagaaaagcgggacttaccgctaagggtgaaggagaaggggttgaggggtacttgcccctcccccagaaatgcagagaaggggtagagacacggagagaaggggttgtggtacttgcccctcccccagaaaagcaggacttgccgctaagggtgaaggaccaaggcaggcgtccctgagtggtctgacacctttgaaacgtgagtgaataatcagagaggtgtccctgcaatgattaaacaccaaggaaaggctgccttcccagtctgtgaccagcgccagagttttgggtccacggataaaacgtgtctcgtttgtctctaccagaaaatgaaaggaattgaaattaagagaagggagagattgaagagtggaaaggagaaagtggttgagggatagtgagagaggttggagaagagagtaagaagaggccgcctacctgatttaaaattggtgagatgttccttgggctggtgggtctgaggacctgaggtcgtaggtggatctttttcacggagcaaagaacaggaggacaggggattgatctcccaagggaggtcccgcgatccgagtcatggcaccaaatttcatgcgcgtccatgtgaagagaccaccaaacaggctttgtgtgagcaacatggctgtttatttcacctggatgcaggcgggctgagtccgaaaagagagtcagcaaatggtgtggtggattatcattagttcttataggttttgggataggcggtgaagttaagagcaatgttttgcgggcagggatggatctcacaaagtacattctcaagggtggggagaattacgaagaaccttcttaagggtgggggagattacaaagtacattgatcagttagggtggggcagaaacaaatcacaatgctggaatgtcatcaggtaaggctatttttacatcttttgtggatcttcagttacttcaggccatctggatgtatacgtgcaagtcataggggatgccatggcttggcttgggctcagaggcctgacaatagggactttacataggattaggatggattagaacagaagttctagaagcaggtgagaaggagtggagggtagggataaggaaggaagggatttaagaagacattgagaaggaaaggaccacaagactgagaggaatggatgaggagagagggaagaaggagtcaaaaaagaggtgggggaataggggacttttggaaggtgcagcatttataggaatagtgacttaatagaccacatgcagtggctcattcctgtggtcccagctactcaggaggctgaggtgggagcatcgcctgagcccaggagttggaggctacagtgagccatgatcgcctactgcagcccggggcaatagagtgagacccccatctctaaaaaaagaacaagcacacgcctgtgggtggtcccagctactcaggaggttgaggtgggaggatcacttgagcctgggaggcagagactgcagtgagctgtaagagccactgcactccaacctgggtgacagagtgagaccccgtctcaaacaacaaaaaagaaaaaaaaaaacgaaagacgccaggcactgggactcacacctgtaatcctagcaccttgggagttaaaggcaggcagattgcttgagcctaggagttcaagaccagcctgagcaacatggcaaaattctgtctctaccaaaagtacaaaaaattagctaggtgtgatgtgagtgtctgtggtcccagctaggctgaggtagaagaatcatctgagcctgggaagttgaggctacagtgaagccatgatcgcaccactgcactcttgcctgagtgacagagtgagaccctgtctcaaaaaagaaaaaaaaaggaagaagaaaaagaaatggggaagtcaggaaaaagaagtgatgcttttttttttttttttttttttgagaaggagtctcactctagtcgcccaggctagagtgcagtggcacaatctcagctcattgcaacctctgccgcctgggttaaagcgattctcctgcctcagcctcccaagtagctgggattacaggcgcctgccacttcgcctggctaatttttgtagttttagtagagacagggtttcactatcttagccaggctggtcttgaactcctgacctcgcgatccacccacctcagcctctcaaaatgctgggattgcgggtgtgagccaccgtgcctgggccatacatttgtttttacactcatttctgtaccaaattagcccaattatctactgtcttgttttttgaactgattttttttttttttcatgtattgaaccaggagagcacagcctccttgagggtaaaatctgtgtctggaactttttctgtagtccctccagggtctggcatgctgacatgctgtttacttcattgtctgcgggtgcttaacaaagacttggtgattgactaagtttgtgtttccattcaggaccctagtgaaggttgacctttattccctttccagcccatgttcttgcttctgcttgtttgtaagtcatttgttacgtagatttttctttttggagatggagcctcactctgtggcccaggctggagtgcaatggcctgatctcagctcactgcagcctctgcctcctgggttcaagtggttctcctgccttagcctcctgagtagctgggatcacaggtgcgcggaaccatgcccagctaattttgtgtttttagtagagatggggtttcaccatgttggtcaggctggtctcgaactcctaacctcacgcaggtgatccgcctgcctcggcctcccaaagtgctgggattacaggcgtgagccaccgtgcccagaccatatgtatataattttttttttttttttttttggagatggagtctcactctgttgcccaggctggagtgcagtggtacaatcatggctcactgcaacctctgcctcctgggttcaagcagttctccagcctcagccttcaagtagctgagattacaggtgtgtgctaccgtgcctagctaattttagtatttttagtagagacaggatttcaccatgttgaacaggctggtcttgaactcctgacctcaaatgatccacctgccttggcctcccaaagtgctgagattacgggcgtgagccaccgcatccagcctgctatgtagatcttgttttctctggaatgtttgagccgtgctggaatggggtacccaatgctgctgtttccatccccacatgacgttttaagtcccacgagagtaggctagcgatggagtgaagctgaaaaatgaaagcaggaaatccagagacacagaaacagatgaggctttcaacagagactcgaaaatagacagaaaccatgagtcagagcagagcccggaggggcggttcgggaaggcaaggtctataggggaagctcgggtgtcacctctatgccaggtgaaggaaatgttgagtgggtgggaggctgtgtgcatctgctggggaggcagtaggcagatggaaagatcaagtcacccagaattatccccagaggttccttcccgttcctgtgggcgggtgagctctgctttctgagctgcccagagagctggaggagatagacatggaactgaccattgcagaaactagggctttttgtgcccgtgagtaggcaaagagctccctgtggatttgccataaaaaggtctatcaaggtggaagaaagtgagattctagagaaattaatacaagtgaaaagtgggcaggagtgttcttggaagtagaaatgctgttggaagtctaatagacttgggaagaagataacgtatggtgaataccagttgcttcgggggttggggggatccacattttactctgtactcagaagatgcttttccccgtgcaaaaagtgaaagtgagtgggccagtttttcttctgtcacaaggtgtatgactgttcccaaaataatagccctgggggatggggattgcttctcagaccattcaatttttgtaccctgtagacttttggtgttatgtgagaactttaagcacctgataggaattagtaacagagctacgctaatgcctgaggaaatttcagacaattggtgggagagacttggcatttggaatgtgatagctggtaggctaccatacagtaatgcaggattgccagacatttctttccaaatggctacccttgattacatttaactcccctcctttcaagctccagattttgaaggacctgttaattctctttcaagattgaagacagacaccttctttttcttctaaagaggaacctaggcggggtgcggtggctcccgcctgtaatcccagcactttgggaggccagggctggtcttgacctccttacctgaggtcaggaggcctggccaccatggcgaaaccccatctctactaaaaatacaaaaagtagccaggcatagtggcgcatgcctataatcccagctactcgggaggctgaggcaggagaatagctcgaacctgggaggtggaggttgcagtgagcctagatcgcgccactgcactccagcctgggtgacacagcgagactcaatctcaaaataaataaataaataaatatgaacctaaaccatcagaatcttccccttgcagccacaacagaaacactgccggggaggccgagccccgacctgggaagcagggtgatacactgggtgccacgggccttccctctgcctggcagctgtcgctactcagatccctgcagccctgttgccagtgaaggagctggagtctctgttatgatgtgttcatccagctggtgagtttttttttttttgttttgttttttttgtttttgtttttgttttttttttagacagagttttcacttgttgcccaggctggagtgcaatggcacgatctcggctcaaggcaacctctgcctcccaggttcaagcgattttcctgcctcagcctcctgagtagctgggactacaggcatgtgccaccatgcccagctaattctgtatttttagtagtgatggggtttctccatgttggtcaggctggtcttgaactcctgacctcaggtgatccgcctgcctcggcctcccaaagtgttgggattacaggcgtgagccactgcacccggcccagctggtgattttttttttttttttttttttttttgagacggagtctcgctgtcgcccaggctggaatgcagtggtgcgatctcagctcactgcagactccaccccccgggttcgcgccattctcctgcctcagcctaccgagtagctgggactacaggcgcccgccaccttgcccagctaactttttgtatttttagtagagagggggtttcaccgtgttaaccaggatggtctcgatctcctgacctcgtgatccgcccgcctcggcctcccaaagtgctgggattacaggcgtgagccaccacgcccggccccgtagctggtgatttttaaagttaacaaaatacaattatgagaaatcagaattcagaaagtaatgacagagagggccttgtcgggaggggctctgacaccctgctttgggccctcatagagatctggggagggagcaggagtgttttaaggggtgtgcgtcttcagccttccatttgtcttcagaacccaaagccctaaatttagcaaacagctggagagtgctttctgaagagggaggctctggacctgaatcagagatgggaacccatgtaaccaccctcagctgggctcttcagtgtaatcacaggtttgggaaggtaactgaggagagcccatgccaaatatcagaactttgcatttggtgcctggattttaaatcccaggggccctctgagaactctagtacttgtgtttgtgcttgaccatggaaggccattagagcctgggggtgctagatactcaagctgcaatcccaggcaagttgcacggtgaccagggcttagtaggggctaagtaaatgttgttggcttgacaatgatgagcattatgtgcaatttcaaaaacacttaaagcattatggaaggctaggtctggaaaaaccttttgacaggtatgtggaaaatattcgctgggcgcggtgactcacgcctgtaatcccagcactttgggaggccaaggcgggccgatcacctgaggtcgggagtttgagaccagcctgaccaacatggagaaaccccgtctctaccaaaaatacaaaattagttgggcatggtggtatgcacctgtagtcccagctacttgggaggctgaggcaggagaatcacttgaacccgggaggcagaggctgcaatgagccgagatcgtgccactgtactacagcctgggcaacaagagcgagactccatgtcaaaaaaaaaaaaaaaatttgtggttacaaatatgtatttttttatctagttcagtctgatttcagtttccccaaaaacccttcttgaccatctccacttgcttaacactgagctcatttttatatagctggagttccctttattatctttacatgtttcatgtaggcatttttttgggaatattttaattatttgtgtttgtccttttgaccttgattccactctaagcttcatgagacagaatttgttttctcttttatttgtgactttcaaaatactggacagaaagcagtatttgtatttgctctccgactgaattttttttttttctgtctccttgctactgactgttctactgaggcttctctattagagagtaaagttgaaagcaaactcttagtgcttaaaacttgcgaagaaaaccttccattgcatcctcattgctcttcctaacacttgtcctcttctttgttgtgttgcaagataaagccaccaatccttccaaccgccaggaggactgggaatacataattggcttctgtgatcagatcaacaaggagctggaagggtgagtctcagcactgtgggggcagctgagagggagcggactgggaaggggaacaaccatggccaaggagggccagccaggtagccccaggcttagtgcactggagtgtgttctgcttgtcccccaggccacagatcgccgtccgactgctggcccacaagatccagtccccacaggaatgggaggcgctccaggccctgacggtaggtccttcactctccggaggtggaaaccgcagcccttcacctgcccacgccattcctcgtgtccccatagcggttcttagggctcctgccaaaagccaacagaaagtccttgatacagactagatagatctcgaatctgttcagccagctgttccacaaatctgtgtgcattgtgccaggccctgaggcctcagaggtgactgcagtgccgtccctgccagcatggccacatggttagtgtgtgaggcagaggggctaaggaaagcagcccagagtcagggccctgagccccatgtggcgcaagagaaggcttggtgaagagatgctgacagggctgtgttgatagttcagagctggccagctgaagaaaagaggggtcggtccagttcattctgtagttaaacaatgccagtcactagcgaaggtgtcgcactgatggctgaggcccctagggcagatcctggtgtctgttcagactgagggaatttaaggtgtggaatggtgcctggccctcagtgcctccacatgctccgaaaacaaagagcagccgagatctgaggaatccggggctctagcctgactgcattcaggtcctggaaagcgaaaagaggaaatatcatctggttcacatgcacccctcagtcatatttgctgtagaacgaattccttaaaacagtgattctcagcagggcacggtggcttgtacctatagtcccagcaccctgtggggcctaggccgggaggatcgcttaagggaattcaagaccagcctaggcaacgtagtgagacattgtctctacaaaaaataaaaaaatcagccaggcacggtggcacacacctgtggtcccagctcctcgggaggctgaggttgaaggatggcttgagcctgggaagttgaggcgaaagtgagtggtgatcacaccgttgcactctagcctgaccaacatagcgagattctgtgtcaaaaaacaaaaaaaaaacgtaacaaaacccagtgattctcaacagggccctccagggaacatttggcagtgtctggaaacatttttagttgtcacacatcggggtgggggtcctcctggcatcaagtaggcagaggccagggatgctgttcgacaccctataaagtgcagagtggccccccacaacgaagaatgaccagcccaaaatgtcagccaggcctcacctgagaaaccttgctttaaaatgcagaagccaagaaagagagcctggacagtgcactcccccttagaaaccgcagtgccagggaccacaggcagcacaggaaagccaaagcgtgagttagggagataagcggagggaggagaaatatcctgtcatctttctcacagataataggatttaaacatccctcccattccctgcacaattgttggtgagcttgtggaaaaaacccaggacaccaagtcagagaaactttgtccctggacctcacctccctcattgtaaaacacgaggccagaatctttaaggaaggcaccttccaggactggcatccaggccttcttggggtcggggtctcggggtttcttgctttagtccctgcccagcttccccagcagaggtttgcagttggagggacatggtctgtgagtgatctcgttgcttaattacactgtccccgggcagtgcacactgcttttcgtgatgagctccttcctgtgggcgtgtttattcagtactctctgggtgccagggatcttgccagtgccaggttccagccccgagcacgccctcactgagcgcctctcctctgtgcggctacaggtgctggaggcatgcatgaagaactgtgggaggagatttcataacgaagtggggaagttccgctttttgaatgagttaatcaaagtcgtctctccaaaggtcagtcagcggcagattcctcgcttttagggacttcttttgtgttcattcccatctcccatcatactggctttcactgcccatccaacatctccagggagctgagattatttgtgtcttgtccttagagagctaggccctggaggtaacgggatgaccaaacaggccacagggaccggcagctttttctgaagcgccctcagcccaaatctgacaggtgatgtggtagtggctgtgtgtttgtccagggtgagggcccatgtagtgtgggactctaggcacctggcacatggcagttgtgggttttgtgggttttcttggcctgtgtcacgtggatacggggagctggcctccgtcattgctccgatgctcagctggccgtgttctgttgcacgctggtgtggcgcagctctgggcccccacttaaagcagagggaatactttaccatgctaaagacattctcatggacacccccaagataaaatgcagttgtgtttctggcaacttgtgcgtgaaaatgcactttcctcagaactcaaaatatccacccaaccatggcctgcaccacatgggcatcagggtcacaaggaagcctctctgtcttgatgtccccaaggtagtaaggaaaggcagagagcaggggtgagcaccgagggcatggtctctggtgtcagactcaggtttccatccggcccttacaccctgggcaagttagatgatcccaggcggcaaatggggacgccacccctactgacgtggctgctgtgcagatgagtaaggtcatgaatacacttacaggacacttcctggacaggaggtgatgacctcctggccccctgcctatccacagactgtatccagatggacacagccacaccacagggagtcgttcccctccccacgctgtctcacacacacttggacacctgcagattttgagtaggaccatagctgctgagcagccacgccattgctgtggagggagccttacactttctctgcctccgaactgcacttactaggtcctcattttcttttgccatgtagtacctgggggacagggtgtctgagaaagtgaagaccaaggttattgagctgctgtacagctggaccatggccctgccagaagaagcaaagatcaaagacgcctaccacatgctgaagagacagggtacgtgtctgcctgcccgcagcctccaggcagccctcgaaggctggcccaggcaaggagagaagggaaggtttgggatccccagagtccctcctgaagagaacagcatttgtccccaggcaaggctgagtcggagttggatgggataaggtgtagcagcctgccctccaccctgctaccctttgcaggtcttgatcacagggacgtggcccttggtgtatgaggaggggtgacaaggcaaccacagcctgagtgcacgtgctgccatgtcccctttcaggcatagtgcagtctgacccaccaattcctgtggataggacgctgatcccctctccaccacctcgtcccaaaaaccctgtttttgatgatgaggagaagtccaaggtaaaggacaccctgggcctgggattttctcatacgagagtgggtggcagcaggggaatgtggtttgcactgtgctgcggggagcctctggggtttccctggggtacgggtgctgcctcttcccttcacctctgatttcctcctctctcagcttttagccaagctgctgaaaagcaaaaacccagatgacctgcaggaggccaacaagctcatcaagtccatggtgaaggaagtgagtgggccccggtccttcaggcacggggtggaggagcccatggccacacagcagaagccgctttgccccggacacgggcctgttttgttctcccctgctgccagctgccctacctgtgccccggtggctgagagtgggaggaggagcacaatagcttccgcgggagcacggaagagaggagtgggttgggagcagtgttgtgaaagcagaagtatagactgggccccaggcaccccacactgaaaggagcttccgagcgtctgtacttgtgttgtggggtaaggtgtgacctggtggaagtggaaagacagtcaagtgacgctctctttctcttgaacttcttcactggggcaggacgaggcacggatccagaaggtgaccaagcgtctgcacacgttagaggaagttaacaacaacgtgagactgctcagtgagatgctgcttcattacagccaggaggactcttcggacggggacagagagctgatgaaggtgggaccgccgacggcaaaggctgcctcccggggctgcgctgcccttcaggagctcagccagcatttgctgagcacgtgccttgtcagagacacgggctgtgcacttggcagtgtattcatgaccttactcatctgcacagcagccacgtcagtagagggtggcgtccccatttgcctcctgggatcagctgacttgtccagggtgtaagggccagatggaaacctgagtctgactccagagaccacactctcggtgctcacccctgctctctccctttccttactaccttggggacatcaagacagagaggcttccttgtaaccctgatgcccatgtggtgcaggccatggttgggtggatattttgagttctgaggaacatgccagcctggaaggcaggaggggactgacttcccctgacccatcctggtgactgctacctagacaaacatcctgggtgatgtggtgtggtggtggtggctggtggcaagaagacgtgcgctgtgatcccagctttgctggtaattgaccgtggcaattggcatatcccggtcattttctgggcatgaaccctgaatgaatcagatgatctctaagggcctttgtggtttgatttttatgtccgagtctctttcaggagctgtttgatcagtgtgagaacaagaggcggactttatttaaactcgccagtgagactgaggacaatgataacagtttgggtgagtgaaagagcgacggtcagggataagccaggcatttggatatgtgggtgggaactgtcacaacaggagtgagaagtctctctttcctgctccaggggacatcctgcaagccagtgacaacctctcccgggtcatcaactcttacaaaacaattattgaagggcaggtcatcaatggcgaggtggctaccttaaccctgcctgactcggaaggtgagatgctctggtccccaactctaggctcctccagaccagcctcaggcccctatcatgaagctgcgggtgtaggctggccagcgtggtggtgttgcacaaggcccaagggagttctttgccattccaagcaatcctccggcttcccggaggcctggagatgtgggtaggaatttccccacctgctttctcgggcttgctttgcagcatcccctggcagagatgccgttggattaggccagaggctgtagcagtgacctctgtgcctagggtgctgcctcctgccacacagccactagaagacccctaattattcctgttctgctctgttgacccatccaggaaacagtcagtgcagtaaccaaggcacgctcatcgaccttgcggagctggacacgaccaacagtttgtcctccgtgttggccccagcacctactccaccctcctcaggcatcccaatcctccctccaccaccccaggcctcaggacctccacggagccgctcctctagccaggccgaggccaccctggggcccagcagcacaagcaacgccctctcctggctggacgaggagctactctgcttgggtgcggcccacagggggcgtcaggggcatcccctgacagggctctgggaggaagggtgtgtggaattaggagccctgagcggggccccagtgtgactgttggggtgggcaaagaaccctgagttggaggtactcagtgaagttcagcgaccctgagggccccagggccatcctcccggtggactctgcctcctgccctgcaccccgccccacaggccccccgcttctgcatcatggactggagcgctccattcccctctggaggctgcctgcagaacagcttctcccggcgccttcacccattgatgtcacttgtcacctgacccctcctcaggcaaggcggggctagggctgcctagctcagagcctcttctcatcctgttttcttctctattgtcaggcctcgccgacccagcccctaatgttcctcccaaagagtcagctgggaacagccagtggcacctgctccaggtaggggcacaggatcggtgacagcactactgtgccaaggacctccactttccagcgtcatgtctcctgggctgcagttagctgtccttccctccagagcgtgccagctgcagcggggaacaatgagtgcctccggggctgtcttccgtgcagtccttggagggctgcgccccgttccagcggcaggccctccccacccgccctcggctcaccaccctttctgttgttcatagagggaacagtccgacctggacttcttcagccccaggccggggaccgctgcctgtggcgcctccgatgctcctctgctccagccctcagccccctcctcaagcagctcccaagctccactgccgcctcccttcccagctcctgtggtcccagccagtgttcctgcccccagtgcgggctcctccttgttttctactggagtggccccagccttggccccaaaagttgagcccgcagtccctgggcaccatggcttggcgttgggcaacagcgcgctgcaccacctggatgccctcgatcagcttctagaagaggccaaagtgtaatgagtgggaggagatgtggggttgctgagggttgggcctgaatgtgtcagaaccagagctaactttgaaggggtgggggtgccttgtagtcccatcagtcaggctggaaggcaaggggtgggcctgggtaagagcatggtcaggggccttgggtgagagtcctgcagctctggctggctctctgacgtgctttccatccttcccacctcccaggacctcgggcttggtgaaacccactacctcccctctcatccccaccaccaccccagccaggcccctcctgcccttctccacggggcccggcagcccgctcttccagccactgagtttccagtcccagggcagccccccgaaggggcctgagctctccctggccagcatccacgtgcccctggaatcgatcaagcctagtaggtgttggaggattgaggtgggtggggcggtggggcctatagccacggagctgtaggacatgcgacagggatggatccaggcactctttgcagggggtcccttaaagccaggcaggcctccctgcctgcattctcagtcttaagctcctcactgagcgcctctcccagattccgttaggaagcactggactcatcatgaccacggagtagcccttttctcctcaccgccggggctctgttgggtgtctctggtgctgctcctcccacactcacgtcacgttcttacaggcagtgcccttcctgtgacagcctacgataaaaacggcttccgcatcctcttccactttgccaaggagtgtcccccaggacgacctgacgtgctggtggtggtggtgtccatgctgaacacggctcccttacctgtcaagagcatcgtgctgcaggctgcagtgcccaaggtaccagtgtctccctggggccaaaacggccttatcttgaccctgttgtgtagaggcctttgcagccagcaggtggcagtgtgtgtgtgcactgcaggttccatctgggggcacctaccagttctcttcaaaggagtttctctctctttagtcaatgaaagtgaagttgcagccaccttctgggacagaactctctccatttagccccatccagccacctgcagccatcacccaggtcatgttgctggccaatccactgaaggtgagcagcaaagaacccaggggtcccagcctgaggccccagctgccccagattaggacgtcaggcccaccacctcccagctggaagtgttttgactgtaggattgacacatccctttgctgccttaggttaagtgtctgagcatggttgggggttgcggggaaaagggaccattcctctagcacagagagggtagcagaatagagggcgtcctgccaaggggccgcctgggctggatctcacttgctgccctctgtcacaggagaaggtgcggcttcggtataagctgaccttcgccctgggggagcagctgagcacagaggtgggcgaggtggaccagttccctcctgtggaacagtgggggaacctatgaccccagaggacgctgtgatctccaccttgaagccaggcaggctgccctgagacgaggagggctctggtcccgtcactctccatgccctgacaacagtgcttgtagctttgatgtggaacaggggccctgggcatttctgctgagaaccaaactgctgctgtgataacctctcctttggcccctaaaaggacctgtttttatctacctgtgtgacttgaagtggccatatgctgtcaggggtgcggagtggcccctgacttcactgctgtcccgggaacatggacccccaggcttggcgtaggtgtttgcttccttctactggcattcactgaagccactggggtggggggtggggggtgggagtctctaaagagagactgtcatgggtcattccccacaagagccacatcctcacacctgacagatgcacggcccaaggggctgcagccctgttgcaattccatgcttcccccgccaaccagctcctgctgccatccccagggaggtggcccaggaaggtgcctggcccagaataaggaactggcatactgcaaagtccccagccctgcctctggtggacagcatcgtcctggaatggccacggagtgatgagttgtgtgcttgtccctggcagtggcaggctgtgtcctatggacatcttggcaggacatggaatttggcctcatgacaggcccaactagggataggaaggaaaatgaagagagccagtatttccccttctccagaagcaggtactcagctttctgggaaaagcgtgcctccagccgtggggacaggccatcctactgactacctcttgcttggcatgaaataaactgctatcctccccttggaatctaccgccactctacatcctactgctttggcctccctctcctctcaccagatggcatgtggtgtggcacctgtggctggacacaggaggcctcaggatcacaaatgttacactagacatatgtcctaatgtgctgcccagaaacctcaactgttccccagctactgaggggcactgtcagcgagatgttgggtctggaggtgatgagatcgggccacacttgagctgagtcaccagaccctattgcttcaacagtgcttggcccccgccagcttgtcccagccactctagctgctggatgtgatcctgggacatgtactccaagcctccgtcacaaaaaaaaaatcaccagctgccatagacacgggggaagcttgcggagcccaggtgaacaagctcagcaatcggacatctctggggaaaggaaggtggcacagaccatgttccctggttcctccctgccccttgccaggcttccttattccttactatgggaagaggtcatatcccttccctgcccctcgctgtctttagcaagcaggtttcactgcttcattagaagaggacaagtcaaaagtgaatcatttttcactacttaaggaataaatccaagagctttccagagactggctgctgcagccctgggaatgtctgtggaattactatgtggaaatggaactttgtgttatgctctagacattacagttatttgagtgttactcgttactgttgaggtcagtgcttcgtggcaaatggctgtactggatatcccagctctgctgcccttgttttgctgcatgttaaataaaaccattttcactgta

SEQ ID NO: 1191 - DNA, 34195 bp, Homo sapiens
cccggtcagagctttaagctgcagctctgatgccccagggacctctcagacccccctgcccagagcaggcagcccggtaagccctcctcctcttcccctgcagcctcagggctggagccacagctgggagggctcccagatcctgaccatatcctcccagaggctgagccaggcctgggcactgtcccctcaaatgtgagaatactgggcagggggaggggagaaaggagggaatggagggctgagcctggaggcatgaaaggggcaacctaggcagcggtatgggggagtgctcagagcttagagtcctgtggaaggcagagaactgccccagcccctgcctctcatcccccaccctctgtgtccctggccgagaggttcctggaggacatttttccagcaaaagagggagggtggtgtctgggcctagatccttggatgggcttttctctgcctgcttgtggggtgcctagggcgagtgggcttttggagacaatttctggcctaacctgacttggacagcagcccccagaggcacagctctcccctcaggcatgggggcatgattccacctcgctagcccacatgtgttcttcacggagggctgctggcccgtctccctggggttaccctgagcagcagagctgtgtttgttgagactccatggggtggagggattgcgatgttgtcctctcagttcccggggctgatgtggaagctcaagggcttgccctggattcttcagggtagccctgccatccctagtgagtcagtgagttgggaggttgggggctggagaatcaggtagggaggacacagctagacctcaggccctgatgggaacgtactaggctccaagtgggacctgccaggagacaagaattgatgacagccacacctttggagtctcaagccctctgccacccatgcggtggcctagttcaaatgacaggaacacaaggtccagctggcccaatgggcaggtagagggctgcagccagggctggaactggccttgcactgcctctgggcccttctctacccacccagtagtattgttcaagcccaggagggaaaaaggccagctcagggttaatgttacctcagcaagtagctgagtggcactgagcctcctggtagccactgtaaagaaggacacagaatggtttgggggcattcgctaggaggaaggaagcagatggatactctatggagacagaatgtcctctgtgtttgctctacaggaacgggttgtcaaccttctgcagggccaggaattgtcatgaggctgtagtaggcagcagagcttggcggggtgaggcgagatcacaggtataggctcagggcctggattcaaatcccctgggctgccacttgttggatgtgtaaccataggcagagtaaggacctgccatagcaaattaccacaaactcagtggcttaaagcaacagaatagttctggaggctaaaagtctgaaatccaagtataggccaagccacactccctttgaggactccaggggaagatccttccttgtctcttcagcttctggtggctcctggcaatccttggccttccttggctgctgctgcatcactccagtctctgaaaccatctaccctatgtgtctgtgtggccttcacatggcattccttatttttgcagtggggtctcactatgttgcccaggctggtcttgaactcctgggtccaagcagtcctcctgcttcagcctcccaagtagctgggattatgagtgagtgccaccatgcccggctcacatggcctccttgtaataacgctagtgcctgggtgcggtggctcacgcctgtaatcccagcacttttggaggctgcggtggacggaccatgaggtcaggaaattgaggccatcctgtccaacatggtgaaaccctgtctctactaaaatacaaaaaaaaaaaaaaaaaaaaattagcctggtgtggtgacacatgcctgtagtcccagctacttgggaggctgagacaggggaatcgcttgaacccgggacgcagaagttgcagtgagctgagattgcgtggtgacttcactccagcctggtgacagagcgagactctgtctcaaaaaaaaaaaaaaaaaaaaaagaactgaagctactggatttagggctcattcattctttttttaattttaatttttttttttttttgagacagtctcactctgttagcccaggctggagtgcaatggcatgatcttggctcactgcaacctccacctcccaggttcaagcgattctcctgcctcagccttccaagtagctgggattacaggtgcccgccaccacgcccagctaatttttgtatttttagtagagacagcgtttcaccatattggtcaggctggtcttgaactcctgacctcaggtgatccacccctgtcagcctcccagtgttgggattacaggcgtgagccactgtgcccaacagggctcattcattctaatcccgtatgatctcatcttaactaattacttatgtagagactctatttccaaataaggtcgtgtgaggaaaaaccaactcaaactgtgttttttggcctggcgtggtggctcacacctataattccagcactttggggaggctaaggtgggcggatcacttgaggctaggagtttgagaccagcctggccaacatagcaaaaccccatcttcactaaaaaatacaaaacaaaaattagctgggtatggtggcatgtgccagtagtcccagctactcaggaggctgaggcaggagaatcgcttgaacctaggaggcggaggtttcagtgagccgagatagcaccacggcattccagcctgggtgacagagtgagactccatctcaaaaacacacacacacacacacacacaaaacaactgtgtttcgcctctgttctcacaagacaataatcatcacagaagacttcttgtaaccaaatttgtggattctcccacacacccagcaagaatcaattctgcagcagactccagctggtgtcttccaattcaactcaattctggtgctgtctacctggagatggcctcagaaaccacaggttgagggcttggtcccacaagaccaacccccatcccaccagtcacaagtctgggcattgggaacatctgactaactggcttctagttggggttccaaggccccctctttgggttcaattaatttgctagagtagctcacacaactcagggagacctgtttatcggtttatttcaaaggatgttttattttattttctcctcagacatactttatcatcccttaaagtcagtagctcaaaggaaactttaaaagctataaataggccgggcacggtggctcacgcctgtaatcccagcactttgggaggtcgaggcaggtggatcacttgaggtcaggagttggagaccagcctggccaacatggtgaaactccatctctactaaaagtacaaaataagctgggtgtggtggcaggagcctgtaatcccagctacttgggaggctgaggcaggagaatcatcggttgaacccgaggggtgcaagttgcagtgagccaagatcacacctctgcactctagcatgggcaacagagcgagactgagactccgtctcaaaaaaaaaaaaaaaaaaaaagataaaggctacaaataaacagtcagatgaagagatacatagggtaaagactggaagactcctaagtacagaagtttctgtcctggtagagctggacacatggatgagttggttttttttgttgttgcccaggctggagtacagtggcactatctcagctcactgcagcctctgcctcccgtgctcaagtgatcctcccccctcagcctcccaagtagctgggaccacaggcatgtgccactatgcccagctaacttttttatttttgtagagatggggtctctctattttgcccaggctggtcgtgaactcctgggctcaagccatccacccacctcgccctcccaaagcgctgggattataggcatgagccactgcacctggccatggatgagttcttgttccccttcctgtcagcctccacatgaaactccccaaaccctgtcctcttgggccttttttaaaaaaattaattaagaaattaaagacagggtctctctatgtttcccaggctgctcttgaactcctagtctcaagtgatccacccacctcgtcctcccatagtgctgggattacaagattagagatgccagctgtcaggtggctaggtggattcagtgtaaagtcctagaagatgcattttagtaaaaacagctagccacctgacagctggcatccatccattcagtgaagattgttgggcactgtggatactgtggaggaggcagcagtcgcagccggcctgcagagtgagatgcagtgccagagggcttcaggaggaggtggcattgtgattgatgtctgaagagtgtctccatgataatggagtcagtgcaaagtcccaaagactgggaaggagcaagaggaaaggatagctcatatccagctgccccactccaaaaaaaaaaaaaaaaagaggaaaggacgggcaccagcaaggtaggacaaggggggcctctggagtgttttcttctcagttggggaggggtgtgctcagatttgcatgccaagtgcctgggctgcagtagggaaacagcagaggggctgggacctgtgattgggagtctccaggtgagagggttggcctatggggactggaggtcaggtgaggctggtagtgggttatagaggtgggagcagctggacaggcccagtgaggatgcaggggtagctgcccagggctagactctggctgctctggtggcagttgcttagctcaggcttgggcacgtccacctggcgcatctgaaacattagccagcagggcgcagactcgtcagtgagagcattcctgagcccagcatccaagaagcgagggaggtcgggaaggtgctgctatgaggcagggggaggtccccaaaagtccaggtgagagcatggcatgcgtggaaagtgctgcgcagttttggcatcagtgaagtcacagggggctgtgggtgaacaggtgtgcttgggcatgtcaccagggaggccttgagacaggagcgggttggctttcctggagatcaggctgtggcatggtgtcgggactggggcatggacagtcttcctccacccccatcccctccttggagctttcagacactgcagataattaccaggtgatgtgataaatactacctgtggagggtgccttgggcagggaggacagggcggccaggaggggggccctttgggcccctgctctgagctgctcatcaggaaaggggagaagctcctacaggcctggtgttggagcctagccagaccctgtgaggccttgaaagtaggaggtgcattgtctgtgcattgtcatctcaaggaatccacccagcaactgttctagttatccctgctctctaggtaggagactgaggctaggaagggaaaggctgctgtgatacccacactatcagtggctggggttgagtttaaacccagggactctagggcccatgcctctgccatcctgcctctgagttttggagctggacttgttccatcaagtgccaggccagccctgctgctgggtgctcccaggcattcacaagctgacaattctgaagggcccacgcacttggccatgcttcagtctgtgtcctgacatcacaggtgggtgctggaataacaaatgctacaaatggcactgggggtgttggccaggctctgggggcacaggagttctgcccatgcccacagctggcctgtgctgacctccctccatcacagctgagtagcaccagcacttccattgagctgaagtcttcctcccattccttcagtgtggtctttgtggctcagagaggctgtggccaggtacaggatctggagtggcccctgcttctctgctctgtgaccttagacagtgggcaggatctgaggccaggcccacctgcagcaggtgttacaaagaggcaaattggcgcttaatgttggtaagaacttgccagccaaccagagtcccactatctttggaggtagtgagctccccattggggaaggtatgtaagccaacctttctgggatgctggaagatcagagagcaaacacttgagattctgtgatcctaatattgaatccaatgctatgatgtttggatttgaagtcagttctatttagccagtttaccaagtgtctccttggtgcaggacaccaggagacacaaaatgtcctggataatattgggtttctggctcccaggggtccctgagatgttgttccagcggttctggagtatgggccaggcaccgcttgcatctggaccgatccgcattgttcgatcattgtgagcctcatgatggcagttcgggatgtcatgcccccatgcgccccccaaccccaccccgccatggccctcaccatggcccactcagggcatgaggctttctgggtgattgctggtattcagtgttgtcagcttcttggacctgtcagtgggggtggggctgcaatgagatgccagttgcaggaagtggtttgcacagccttcctggtgtcatgggtcactctcttgccgagtggctttgggcaggtcccttcccctctcaggctgcaggttcctatgccaggagctcccttcttgccccaccagggccttgttttcccagatacagaggtggggcagatcccagcccgttgaaacagactgggctttggaggccacagtgggcccatttctcagagggactgtgtggctggatgctgagccaggcactggactggccctttgagcctcctgtctggccaaggcccctgaggcactgtgggctgctggtgccagcacacaagggtgataaggagatgaaagtcactaggatggtggggcggcacccgccccgggctgtgttggcagctgcccctggctggaggccagcttggccctggaaccctcctcaaggaacaaggacacaaaagagccagctcagccagcctctacctagcaccccaatcagcactcccttcttcccatgacccctaccctctgcccagctcctgtaactggccaaggagctaatggacacccaccagggtcttaatgagtgagccagggttaatgggttactgggcccggtgacacattcaccagcctcccagggctctcaaagtccacactggcctggccttgaacgtcttagctcggccacctccttttccagctttgacacctcggggctcaggacgggcctagggtggtcaagaggtcccctgcagccctcacttcctggaaaaggctccatttcctggccttcaggctcaggtggttccttccgcctggcaggtcctccccaaatccaatcccagctcgggctggattcccaaggcccctattctggtgtctgccccttccctagggctcttccccctggggtgaccatactctcatgcccagccaggtcagggctccttgagagaagaatctggaggggccaggatttgatgggagaatgaatgatggaatgaaagaaggaacgtaagcgtgagccttgctaagagtgacaatactggcaggctgcagaccatgtgtggacctcgatctgagggcttagaggcttcggcctgccagcgctgtgggggcacccaccccatctcattgaatggggcagagcaggtgagggcatgagatggacagatgggcctcatccccctgcttccgttgcctggggtcctcggtcagcctgtttgctcagacccctgaaattgggggtcaaggaaggaccctcctggattatgtgactcccttcagtccaggtgaccagggtccttggagtgacagctcctagagccccacctgtagtcctgcaagctggggagagggcctgttaggagaggcatcccctgccctggggttgtagaggtgaactaggctcctcagaccttgtggggcctcagatgcttacatctccagcccctcctggcgtgggcatctggctgcagcccagctctgtggccccatctcccagggaacctttggtctaatctgcctcccgctgaaacccagcctcattcagccccaccgaggctttcagagttcaggtctctcattcagggtttgagaccccaccgggctcagagacacctgcagcctgcagcggtcccagatcacagcctcagggatgggaccaggagccagcccacatcccacctgcagcagttcctgtgcctttaaagcctcccctccccccgccccgcccccaggccactaggggagggaaggaggagctgggtcacagcagggaatcttagcttggttttggtgtgctgctggatgaccagaccgggcgtcgggtgagcccagaagtgagagcagttggctgtgccccagtgctgtgtgacccagaggcgccgctcaccctctctgagctggtggacatcataggtggggaagctcaggtcagggcactcccatgagtgtctggaggcctgagtcccattctcagctctgccatatgcttgctgcgctctagaggagttcctcttcctctccaagcctcggtttatgtacccgtgcagtgggagtgagttgcacttcggggtgaagggggcaagacttgtgtgggcgcatcctgcagaaggatcccacaggtgggcagagccctgggttctttatccgactgggtctgggctgggggcctctgtttcttggctgatgagtttatgtgagtttgagtgaggtatgcgagtgggtgaaggagggctggggggagtcacctgacttgtgcgaagaagctcttgagagagccgtggcttcttggaattaagaggaaagagtgcagcatgaacagacaggccctggaggatctggcagccctgagtgggggcggggggtcagctctggagtagagccagagctgtgatggggttgggggaccctgtgtccttgggccatgcttgcctcgctcctgggttctgtttgtggctgtggattggggtggggcagggccggttgtgcgaggggtcattgcccaactccagggggcgcctgccacctctcagctatatatatagggatatatatagttctttcgacaggtttccagcaggtagtggttattaaatcttactgaaggggtgttttttctgattctcggctctgtgccgcaagggtggaaactgtgagagacagattccaactccacgtctgggtagtaagcatccagtccagggctgtaggcagtcctggggaagacgccagagatctgtgcattctcatatcgagggatagcgactccaggctgggggctggcagggtaaggggtgggtgggtcctgggcttacccgcaggtctgcagacttcctggggccagctgacctcgtaaaatcccttttgtctaagcttcagtttcctgcctgtgaatggggttggggctgtgctctggtttcacccttgtggctctggggttgtggtgacaaagccatcaagctgggttgaaggattaaccaggaaacttcagactggctgccgtgtctacctcttcctcatactcctctctctgctgcatcctgggaagctgctctgctcagcctaaatgaggctcagttgtgtgtgtgcgcacgtgcttgcacgtgtgttggaagtgggtgatactgacaccagagtctgtgtctctgggtgagtgaggcttgcacatttctcgggacagggaactcactaccttatgtgcccaggacaagagctgtggggtctggagaagacttctaggccagcccctgcagtccttcctcaggtgacatggcttccccagacccacttccccctaggtgccctctctgcattcagggggtagagggctgactgggacagaatgtgacacactcagcatgtgaggaaaagcctccttcattctgtaggccctacctctattaacatgtcctttgataaagtgcctcccctcctgtctcccctctctggaatcctcagctgctgccaggcttcagctgtgccccattgaaggcagctctgtctccctactttccccagcccagggttttccttttggggtcagctgcagggatctgggccatcctttgcccactcagactttctttctgcccacctgctgctgtgaatcctgtatgtcatatatatatataaaatatgtaatatattatatattatatgtaatatataatatataaagtatattatataatatgtattatattatatattatataatatgtaatatattatataatatataatatgtattatattatatattatataatatgtaatatattatataatatataatatgtattatattatatattatataatatgtattatattatatattatataatatgtattatatattatataatatgtattatatattatataatatgtattatatattatataatatgtattatatattatataatatgtattatatattatataatatgtattatatattatataatattataatatgtattatatattatataatattatataatatgtattatatattatataacaatatataatgtgtattatatataatataatattatataatgtgtattatatattatataatattatataatgtgtattatatattatataatattatataatgtgtattatatattatataatattatataatgtgtattatatatataatattatataatgtgtattatatatataatattatataatgtgtattatatatataatattatataatgtgtattatatatttaatattatataatgtgtattatatatttaatattatataatgtgtattatatattatataatattatataatgtgtattatatattatataatattatataatgtgtattatatattatataatatatgatgtgtattatatattatatattatatgatgtgtattatatattatataatatatgatgtgtattatatattatataatatatgatgtgtattatatattatataatattatatgatgtgtattatatattatatataatatataatattatatataatatattacatataatatatcatatattatatttatataatttatataatatatcatatattatatttatataatttatataatatatcatatattatatttatataatttatataatatatcatatattatatttatataatttatataatatatcatataaatatattatatatagtattatatatataaaattatactttaagttctagggtacatgtgcacaacgtacaggtttgttacatatgtatacatgtgccatgttggtgtgctgcacccattaacttgtcatttacattaggtatatctcctaatgctatccctccccgttcccctcaccccacaacaggccccagtgtgtgatgttccccttcctgtgtccaagtgttctcattgtttaattccaacctatgagtgagaacatgcatgtcttatatgctctcaggcagagaggaaactgctgagcaggccggggcaggggacagagccctgtggctctccactttagacccctcctggctgactgccatggaatgcagccacttagcagggccaaatcccctgatgttcctgttggctgtctagccttcagggacaggtcatgggaccttggttcctgccctgtcatcttcccagtcaccctgatcttcacggggaggaatagcctgggaaaggacttggtcacagcacctccaccctagggctattgaggatctcacagttgtgtgtctggtgggttctgtccagagcccatttgagagcagtggatgacaggacaggcctatgtgacccaggcaggcagcaatattgggtcagccttcatgtccccttctgtcagctggggcagcctggaagcatgattgtggggtaggtgttatgggcacggaatagacctcaggtggaggctgcaggggctctccggcaccgtagacacagcaggcccaggagcaggggagggagccatgactcagggagactctggcccatatccttggcagatgagggccacaggggaatgggcagcactgtccaaagtcccctgggctgggtccgcagctgttcctggctcagacttcttggtgggctggtcagaaacatgcagtaacttggggcagttaccaggtggccaagcctgcactgctgggctctgtgagcttgggccagctcaggccctctctgggccctgcctttctgggctgttcgggtggttccttgggcctggggtgctaatgtttctggatgggcagcagaaccagtctgcactcagggccccaggccatgttcccggaacacacctttagcattgacagcagcgtgtggtgaggccccttaggctgggttctggtctagtgccaggggcaccactactccaccgcctccagagccatctctgggacactggctgtgagttcagatgttctgaacagggacagggagagccagagggaaccagcctggggctcactggaggggctcgtgggcagacagcgccctttggagggaactgagtctgaaaggaaggaaaccctttccccggctcatagcacctgccatccagggccctcccagggctgcgtgaactttagtcacgtggtgacaggccgagtcaccatgccaagtcactgtgcgcctccttgctgctgtgacgtcagcttccccatcctcccagccaggctggacctccgtgagaggcctgcctgtcctgcaccctgtgcagatgcctcccactgtccgccggggctgctgggcacgccctggctggtctcttggactaggtaagctcatgagtcctctggccgctcctgctccttccctgcctctgctcctcctcggaggtggccacccccagatcccagtcccaattcggaggccccctgaggagtgctgcagggggccacaggcgtggctctgagccactctggagagtggcggggggcccagccagttctgtggctgggactttcccaggcagacaagtctgtctcttcctccccagcgggtgcagcccagaactgtcttctgaggaagaggtgctctcctgggcccccactgtccccaggcctcaggtaagcccatcagggtcccaaggaagggggtctgggtttgaggccaaccatggcagctgacctactttctagcctcagtttcccctagtgtgtgcagctctcacgctgtttgggtgagaaccaggcctctgggcttggacattctttcagtgagtttttagggtggagggatgggaaatggaagcccaggacctcagcagggtgtcttcctccgatccggggacatctgcctgtgggaggctgggcccaccctcccttgctgacctgccctgggaggaagggacagggcccagcactgcctactcccctccctgttcttcccagcagtctgagcctggctgggtgtcccctgctcctccagcagcctacttgggcctttgggtagacagattaacagacaggcgaggctgggtcatggttggaccaccccaggaccctgaccgggggctcagctcatgaccctgagcctgggagagatgaggccatgccctccagggcactcagcatgacccggcccagtggacgggactgggtagcttccttggtgcagggggctgtcatgctaggacggggtcactgaccaggccaggcccctgccccatgacttgtggtggaaatgtccttttgtttttgtttttttgcattttttttgagacggagtttcactcttgttgcccaggctggagtgcagtggtgcaatcttgcctcactgcaacctccacctcctgggttcaagcaattctcctgcctcagctcctgagtagctgggattacaggcacctgccaccatgcctggctaattttttgtatttttagtggagatgggggtttcaccatgttggccaggctgttctcaaactcttcacctcaggtgatccacctgcctctgcctcccaaagtgctgggattataggtgtgagccactgcacccggccatgtgatgggaatgttctgtgtccataatagatgctgcatattgctggcccagctcctgaggctctttggacctccaggaatcggtgtctctatcaggaacccttaaccctgacccggactcccagctgggacccggggtgtcggagtggcaagagcgctgtcaggcctggtgaagggtgtgagctgtccaacggggcagggaggaggcagggcctgttctgcagttggacagacagagccctctagctgctttctggaagactgaagggcaggtgatgttggagggagggagtgcaggcaggggctgtgagggagttcaggtcagaaacaggtggcgcctggattcaggctgtggtggtcacggtggggatgaggggctgctttggattgtgctggggatgtggggtggtgcgctgctgcatgactactgccaggtctctctgctcttagtgtctgcatccagggctgggagggggtcaaatgaatcacactatcggccccaggcccaccaagcctggggaggtggccacccttccatgatggcatttggatgttccctgtgtgtggggagggcacagggactccattcgtagaccacctctgggacagtgtgtctgcctctgaggtcagacgctctgcactgggacagggtggagtggagggaaatccagcttggggctcattggaggggcttgctggcagacaccgccctttgtgggaaactgactgtgggagaggggaaccccaacctctgtcaccacatccctcttccctgttgtcacacctgtcacctgctgccatagccatgagacttcccaagggtcactgctgccactcactgcacagcctggaagggagtccacaggggacatacagtgagcaagagacctgtgccactcaggcctcctgggggtgtccccagtgcagccatgatgataatcacagctaccattcaccaagccctgcccacagtctaacctactctattcacaacactcccagcagcaaggcaagtgaggtgctgccgtcatccaggctggacagttcagtgatttgcctgaggccccacagcaggtgagtggcaagtccagcatcagagcagggcaggctggcggtgccccctgagccccctttgccatgctgaccacatgcacatcctgggcttctgcaggaatgccctgtcccctacctgccctgctccgtgcaaaaccctctttgagctgtgcctgggagacatgctgagagaattcatggaaacaaatgtgttactgacagcctctttgcctccagagttcaactggagacagagaaaccagctagaggcagagggaggtaacacggagtcccccagaaaggtctgggctgcgcgtgcttcaggtaacctcccttgaccttcaggagaacgagaaggctgcctgatcagagagtccctgaagaagattctgtggctacaggcttcagcagagtgtgagggagaccccggttatttcctcagctatttccaccaaatcctcctgtctttcgtggccaacaccccaggcaaggcttggggcccccgtctgctgctggacggtaagtcctggccccgtggcagtgaatctgtggggcgctctgattgtgggcactatggaagctaaaccccatgctccaggtggggtggagggtcttcagaggactcctggacagtgccaggctctaggctggggtgggggacacaggagaaaccaggccaggcccatccctactggagcttctccctaagcagtggaggctcagccactgtaaggaggtaggcaaggccctgcagaaagaggggtgtggaaatctgggggctcccaggaagggccgctgctggagatggggttcttaccaggatgggctctgaagataagcagggaggatttgggagggcagagatgaggcccagagcttctggcagagggcatggcctgcgcaaaggtctgggggccggacagcctgcacgtattctgggaagcgggaaggagacacaggccttgtgtttctgaggcccgactttagactgtgccctgttggggaggggccagggaatgtctgaggctaggcctgaccctgcttcttaccccgtgggtgcagcagagccatgaagaagaagttagtggtgctgggcctgctggccgtggtcctggtgctggtcattgtcggcctctgtctctggctgccctcagcctccaaggaacctgacaaccatgtgtacaccagggctgccgtggccgcggatgccaagcagtgctcgaagattgggaggtgagcagggcagggcatgggacatgggccctgaaaactgggcaagtggacctgagcaataccttcacccccctgagactcagtttccccatgtgtaagcttcgcttggactctctcagtagcctttgggaaggggacagtgactccgagagcagggtgtgggtctctagagccaaacagggccccttttctcagttctaagagtctctgtctctttggaataaactgcactgttttgttgtttggttgttatttttacttatttcttcctatctatctatctatctatctatctatcatctatctatctatctatctatctatctatctatctatctatctatctatctatctactatctatctatctatttatttagagatggagttttgctctgttgccaggctggagtgcagtggtgcaatctcagttaactgcaacctccgcctcccaagttcaagtgattctcatgcctaagtctcccaagtagctgggattacaggcgtgcgccaccacgcccaacaaatttgtgtgtgtgtgtgtgtgtgtgtgtgtgtgtgtgtgtgtgtgtgtgtttccaagacagagtatcgctctgttacccaggctggagggcagtggtgcaatcttggcttactgcaacctccacctcccaggttcaagtgattctcctgcctcagcctccacagtagctgagactacaggcatgtgccaccatgcccagctaatttttgtatttttagtagagacagggttttgctatgttggccaggctggtcttgaactcctgaccttgtgatcctcccacctctgcctctcaaagtgctgggattaaggtgtgagccactgctcctggcctaattatggtgtttttagtagagatggggtttcaccatgttggtcaggctggtcttgaactcctgacctcaggtaatccacccacctgggcctcccaaagtgttgggattacaggtgtgagccaccacgcccggcttattctttttttttttttttttttttggttaggagacaatttctttctttctttttttttattttattttattattattatactttaagttttagggtacatgtgcacaatgtgcaggtttgttacatatgtacatatgtacacatgtgccatgttggtgtgctgcacccaccaactcatcatttagcattaggtatatctcccaatgccatccctcccccctccccccaaggaacactgttgcccaaacagggacatgaagggcttattcttttttgttgttgttttgttttgttttgttttttgagacggagtctcacgctgtctcccaggctggagtgcagtggcgcaatctcggctcgctgcaacctccgtctcctggattcaggtgattctcctgcctcagcctcctgagtagctgatattacaggcatccgccaccacgcccggctaatttttgtatttttagtagagacagggtttcaccataatggtctggctggtctcaaactcctgacctcaggtgatccgcctgccttggcctcccaaagtgctgggattacaggcatgagccaccatgcccggccgggcttattctttttttaaggtggagtcttactctgttacccaggctggagtataggggagcgatcatagcccactgcagcctcaaactcttgggtttaagtgatcttcccgcctcagcttcctaaagtgctgggattacaggtgtgagccatggtgcctggcttctactgttttattctattttagactcttatctcatgttatatacaaagatcagttccctcctaaagacttaaacagaaaaaatattatgtttttcatattttgagacagggtcttgttctgtcacccaggctggagtgcagtggcatgatcatagctcactgcagccttgaactcttgggcttaagcgatcctcccacctcagccccctgagtagctaggactacaggcgtgcatcacacctgactaattaaaaaagactgttttctagagatggtctcactctattgcccaggctggtcttgaactcctggcctcaagtgatcctccaccttggcctcccaaagtgctgagattacaggtgtaagccaccatctctagccgggaaaaaaaatgttattaataaagtatagcaatttccctttttgtcccagttataaaagtcatgtacatttgtttgcttgataaagaggaaactgtctgggcaaggtggtccacacctgtaatcccagcactttgggaggttgaggcgggcagaccacccgaggtcaggagttcgagaccagcctggccaacatggtgcactctgtccctactaaaaatataaaaagttagccgggcatggtggtgtgcgcctgtaatcccagctactcaggaggctgaggcaggggaatcacttgaacccaggaggcagaggttgcagtgagctaagatcatgccactgcactccagcctgggcaactgagtgaaactccctctcagaaaaaaaaaaagaaagaaaagaaaagaaaaagaggaaactgtaatcccagcactttgggaggttgaggcgataggattgctttagaccatgagttcgagaccagcttgggcaacatagaaagaccctatctctacaaaaaagacaaaaaattgccaggtgtggtggttcttacctgtagtcccagctactcagcagactgaagtgggaggattgcttgagcccaggaggtcaaagctgcattgagccaagactgtgccactgcacttcatcctgggtgacaaagtgagaccctgtctcataaaacaaaggctgggcacagtggctcatgcctgtaataccagcactttgggaggccaaggtgggtggatcacttgagcacaggagttcttgaccagcctgggcaacatgatgaaaccccatctctacaaaatacacaaacaaacaaaattggctgggcatggtggcatgtgcccatagtcccagctacttgggaggctgagatgggagggtcaattgagcccaggagactgaggctgcagtgatctgagatcacaccactgcactccagcctgagcaacaaagagagactttgtctcaaaaaaaaaaaaaaaaaaaaaaaaaaaaagaggccaaggcaggcggatcatgaggtcaagagatagagaccagcctggccaacatggtgaaaccccgtctctactaaaaatacaaaaattagctgggcgtggtggcatgcacctgtagtcccagctactcaggaggctgaggcaggagaatggcttgaacccgggaggcagaggttgcagtgagctgagatcgtgccactgcactccagcctggcaatagagcaagactccatctcaaaaaaaaaaaaaaaaagaaagaaagaaactaaaaacaaaaaccccaaaactcgaatggacttctcttccatcctcctttgggcaggtgggcagcagggtgtgtatgcggggccagggtggaagcctgcaggttctcatgcctttatgtgccacatggcagggatgcactgcgggacggtggctctgcggtggatgcagccattgcagccctgttgtgtgtggggctcatgaatgcccacagcatgggcatcgggggtggcctcttcctcaccatctacaacagcaccacacgtgagtgcctcgggagaggagagggagaggggcagggggtgtgggttgggccgaggcacagctgggcggtccccaggctcacgtggcataaagggtttgggtgggcgggcctgcctacctgcttctccttctaggaaaagctgaggtcatcaacgcccgcgaggtggcccccaggctggcctttgccaccatgttcaacagctcggagcagtcccagaagggtaagccatgcggcagacttggggcgtgggtgcagagctggctgagccaccgggaaggggccttgcccacaggagcctgctcccgtcagggttcaggggcagttctgtcaccccccatcccttcctgtccccatagcaccctcccacaatgagtggtcaggaccatcatcaccatggtaaagggccgggagcttctgttatttctgctaaggcctccggggccactctgtgcagcacatggagagaataattattatgctagcagacctcatggaccagggctcactggggcccacactctgctctgtgcttttcacccatgagcctctcacaaccctccctgctcctttgggctaggggatgctgtgtggattcccattttacagggtggggatgctgaggctcagacaggtcacgcaaatcagttgaggtcacacagctgggaggtggtgaagctaaaattgaacccaggctgtctataccgtgccttttcaacaggcatcccattcactcatttgttcatttgtggggatggtgctctagaatgtgaggtggagtctctcttttctaatctggtcttaagtggagaggaggcccccaaattccccaggtacctgaagggaagccactgtccatccaggaagccactgtctgtcctcaaaggtggtacagtagattgtgagataaaagttggaggatgggagggtctcaacaactcacgcctctaatcctagcactttaggaggccaagtcaggaggagcgcatgagcccaggagtttgagacctgcctgggcaacatagcaagactccatctctacaaaaaacggaaaaaaaaattagctaggtgtggcggtgtgtgcttatgttcccagctacttgggaggctaaggtgggaggatcacttgagcccaggaggttgaggctgcagtgagccatgattgtaccactacactctagcttgggcaacaaagtgagaccctgccaaaaaaaaaaaaaaggctgggcctttttttcacaggctcacgcctgtaatcccagcactttgggaggctgaggcagatggatcacctaggtcaggagttcaagaccagcctggccaacatagtgaaaccctttctctactaaaagtacaataattagtcaggcgtggtggcacaggcctgtaatcccagctactcaggaggctaaggcaggagaatcgcttgaacccaggaggaggagattgcagtgagccgagatcatgccactgcactccagtctgggcaacaagaatgaagctccgtctcaaaaaaaaaaaaagttggaggatggaggggcaggacacactcaccatagcaggtcttagacttcaggtgggggtcctgggtggtgccctttggagtcttctgcaacatactcaatctttgacttttttcttttttttttcttttttttttttttgtcacccagactgtcgcccaggctggagtgcagtggcacgatctcggctcactgcaagctctgcctcctgagttcacgccattctcctgcctcagcctcccgaatagctgggactacaggcgcctgccaccacgcccagctaattttttgtattttttagtagagacgggttttcactatgttgcccaggctggtctcgatctcctgacctcgtgatcccccggcctcggcctcccaaagtgctggaattacaggcgtgagccactgtgcccgatcaatctttcatttttttttaatactcattgagaaactcagcatttgtagacatgaagttgctcagggtaagagaatgcgggaatcataggcttggcaccttgtggactcttagaatcatttatttaacttgaatgtattgagtattctcttaaagaatcagctgttgttcctgaagctggggtgaaaaacaaagatggcagatgaaatctgtgacactccaggtgggaggagaaactaggcaggtgcaggtgtgttacgggctgtagaaaaacaggtctggagggcctcaaaatctgggactgtatagagggtgacctagtcagggaaggggacatctgagcaaagacccagaggcagagatggggtcaggggagttatctcctggtctgctatccaggtgtgatggcagggacagagccctgtggggagctggggaggctgcagcaagtgatccaagggaaatggcccaggttgtgtgggatctcttaggttatggtgaagcctctgcttcctgtctgagggaagtgggggctcgtggagtatgtgagtggaaggggatggatctggcctatggaccccgtgggttgctgtgtaaggggcagggagcatgtggggacctgtctggaggtcactgcagtaattcgtggagagggtgctgggaagtggctgacgctggacagacacacttggaagtggagtctgtggatttgaggatgggttgggtgtgacgcttgtgtagggagtccccggggacccctgatcttttgtctgtacctggaaggatggggtgaccctaatggagacaggcagggttctcaggaagcaggttgagcagacactcaggagctcggttttgggcacgttgaagtttgagatgctttcttcgagcaggcaggtagatcctcaggtctggtgatcggaggagcagcccaggccagcaggtcaatttgagagttgtcagtgcataaatggaggctgaagctcagatgtcaagcagaccaccaggagagagagcaaagacagaggggagagtaggagctaggatggcaggcgggggagactcgggtggagccaggtgctgggatgcaggggcagctctcagggaaagtgatgagcccagtaaagctgagagggggcactgggtctggcagtgtgggggtcaccagagaacttggcaagtgtgctggcatgagagtctgattggcctgaggtcaggagaagattttttttctgatattgatacatgatattttctatatttatgggtacatgtgagtgcttgttacatgcatagagtgtataatgatcaaggcagggtatttggagtctccgtcaccttgaatatttttcatttctgggtgttagcaccatagtcctctcttcgttactttgaaatatacaaaatactgttgctaagcatcgtcaccctggtctgctatcaaagattagaacttctcctgtcttggctgggcacggtggctcacacctgtcatcccagcaccttggaaggctgaggtgggtggatgacctgaggtcaggagtttgaaaccagcctggccaacatggcaaaaccccatctgtactaaaaatacaaaaattagcctggcgtgctggcctgtgcctgtaataccagctactcgggaggctgaggcaggagaatcgcttgaacctgggaggcggaggttgtagtgagctgagatcatgccactgcactgtagtctgggagacagagcaagactccatctcaaaaacaaacaaagaagaaaaacaaaacaaaacaaaaaataacttctgtctaactacaaggtggaaggaatcatgtgctgggtgtcagaccttccgggatgtatgtgcagcttctaggaattgaaaccaccagctcttggaaacttgtgccaggcttcagggtgggagaggcagttctagagccacagctgccaagccaagccaaatggccccatcatctctcgcaagagcaggagagtccctgggggcagaggccatagttgtacctttctgggcaaagggtcagtgtctgtagtgtccttatgggcagcggggctcaggggggaagcaggcccaggggtgtgtttccaatgacctcctcaaaagtcagaactggaaggcaaaaccccttataggctgagtgcacctgtaatcccagcatgttgggatgctgaggtgggaggattgcttgaggccagagtttgagaccagtcttggcaacgtagcaagacccctgtctctacaaaaaataaaaataaaaaattaggctgggaatggtggctcacgcctgtaatcccagaactctgagaggctgaggaggatggatcacctgatgttaggagttcaagaccagcctgaccaacctggtgaaaccccgtctctactaaaaatacaaaaattagcaaggcatggtggtgcatgcctgtaatcccagctacttgggaggctgaggcaggagaattgcttgaactcgggaggtggaggttggagtgagccaagattgtgccattgcactccagcctgggcaacaagagtgaaactccatctcagaaaaaaaaaaaaaaaaaaaaaagccctgtgtagtggggtatgtctgtagtcttaggtacttcagaggctgaggtaggaggatcgcttgagcctgggaagccaaggctgcagtgagccatgattgcaccactgcactccagctgggacaacagaatgagaccctgtctcaaaacagacaaacaaacaaaaacccttatagttggatggagaaactgaggctgggagaggggacaggacggaggttaaggctcagtcttgcctctctggggccgtagaaaagaggcagggagccctttcttggggctggctgtgtcttgaaggtggcctgtgcttgacctcggtcaaggtgggatctgctcttgttttggcacattctcgtggagcccatgagtcttacaggataaggccttgtggtcagtgagatgggagggggtctggcctggcacaggattttagacatgcaggcacctgcacagacagacacctcatcctgggacagcaaaacccagccgcatgctactgcttcccctgctgtgccctcctcagacatccctggtccatgtacactcctacctgctgagcccctcctaaaaaaaaaaattaaacatcccctcctaaaaaaaaacaattaaaattaaaaaataaatttaaaaattaaaaatccccttctgctaggtgtgctgttcacgcctgtaatctcagcgactcaggaggctgaggtgggaggatcgcttgaatccaggagttcgagatcgggctgggcaagatggcaagaccccaactcaaaaaagaaaaaaaaaaaatctttcctcctaagcctcattgccccatctgtaaaatgagtcagggactgtgcctgggatgctgcctgcgagagatcccgatgtcccccactcagggtcactaactatggctctctctccccaggggggctgtcggtggcggtgcctggggagatccgaggctatgagctggcacaccagcggcatgggcggctgccctgggctcgcctcttccagcccagcatccagctggcccgccagggcttccccgtgggcaagggcttggcggcagccctggaaaacaagcggaccgtcatcgagcagcagcctgtcttgtggtatgtctgtgggtgcggccccctgacacaggcagggcaggcacagcccaaggaccttgcaggccgtagcagcagtggagcagccctctgccttcaggaccctgtgctgataatgggatgaggagatacagacccttcccaccacgtgtggggacacattctgagcgtggggtcccagtggccactgtggctggccatgtgtcctgagtggcaagggacactaggaagctcccggaagggacactaggaagacgagcgctgagtgacagggccacccacctgtgacaggcgctgcccctgttctgctccgttctcctgtgtggacgggtgtgaggggtggtctagctgagtccaccccacctgctgcctcacatgagccccctctgccccagtgaggtgttctgccgggatagaaaggtgcttcgggagggggagagactgaccctgccgcagctggctgacacctacgagacgctggccatcgagggtgcccaggccttctacaacggcagcctcacggcccagattgtgaaggacatccaggcggccggtgagtgggtaacctcaggggcctgggtgaggaactctgcagtggaaaccctgagctgtagcccagagctatggggtcctcctgtcttgcctgagcctgcaggaagttcctggtggaggagggtcagtgactggccatgtgggtccacagctcctgcttatatcaaaaccaagagaggccacacagtccaggagagcaagtccctgttggggtaaatgcaggtgtaggcaagagccagggctagggaagcactagaatacagcctgaagatccaggaggacttcttggaggaggtggcggctgggctgcagataactttgttaggcagagagaggaagggattcctagcagaggaacagctgggctaaggcccagtagagggcgctttgattcaccaagagggttacaagggatgagggtctccttgagagaggcatggggaaggggatttgtggggcaggggcctggagcttggctgtggctttcttcaggtaatttttgtcacgtttcatggaggagggtgattagcgtgtcgacctttaccactgaggctggaaattggcatgccaataccctgtctgtctggagctgactccaggagaattaagagcctccctcctctattcattcatcatgaggagaagaggccaagcggcagggagactggcaggaattctccagttagaaaaggccctctgagccaggcgcggtggctcacgtctgtaatcccagcactttgggaggccgaggcgggtggatcacctgaggtcaggagttcaagaccagcctggccaacatggcgaaaccctgtctctactaaaaatgcaaaattagtcaggcatggtaggttgtgcctgtaatcccagctacttgggaggctgtgccaggagaatcgctagaacctggggggctgaggttgcagtgagccgagattgcaccactgcactccacagagtgagattccatctcaaaaaaaaaaaaagaaagaaagaaaaggccctctgaggccaagcttggtgtctcatgcctgtaatcccaacactttgggaggctgaggtagaagttgaggccaggaggtccaagacaagcctgggcaacatagtgagtctacaaaaaaaatattgagaaactacataaatatagtgggggtgggggtggggaacaagaaaacaaaaaattcaaagcatagtgaaaagaaatatagcaaaacccggccgggcatggtggctcacgcctgtaatcccagcactttgagaggccgaggcgtgtggatcacggggtcaggagatcgagaccatcctggctaacacagtgaaacctgtctctactaaaaatacaaaaaaattagccacgtgtggtggcgggcgcctgcagtcccagctacttgggaggctgaggcaggagaatggcgtgaacctgggaggtggagcttgcagtgagccgatatcgcgccactgcactccagcctgggcgatagagcgagactccgtctcaaaaaacaaaaaaaaagtagcaaaacacaacaaaaaaattaaaatttgctgggtgtagttgtgcctttagtctcagctactggggagggtctgctggaggatcacttgagcccaggagttcaaggctgtgattaagccactgcactccagcctgggtgacagagcaagatcctatctctaaaaaaaaaaaagaaaagaaaacactctgtggccacagatgagagaaggcagacaggaagccagtaagccaagcaggcaaagggcaggtggccccagcccggctgttgggtggtgagcagtgtcagggagacaggagtgccggagctgatgaggttcccaaggaggtgaggttgcctgtggccccctcccagggcacagtcccacccctccagtagtgcactctgtcctccctggtaggtacaggcttttccccaccaccatggtgcagccatgcctgcccccaacaccactgctgcagctccatcctccacgcagtggtgcagccccatcccagcacccatttgagctgctgtcccattgcagggggcattgtgacagctgaggacctgaacaactaccgtgctgagctgatcgagcacccgctgaacatcagcctgggagacgtggtgctgtacatgcccagtgcgccgctcagcgggcccgtgctggccctcatcctcaacatcctcaaaggtgagtggtcgcaccacagccgtgtggtaggacccatgacactgcctctctctccccacgccccacccctcctgcatctctgctcgccccccatgccacgtctttccatcactgagctcccgaggtgtgtccctgcgtcacagttcaccatgtcctgaaggaggcagtgcagagcgacagggctgaagcgggcaatgctcaagggttggaggaggaacaggagtcatcaggagggagagaggtgcaggagctcagggctgcagggccggtccagagggtaccccggtccagtgggtgaccctgccacttggtcattgaatggccagagctgatgcgtgacgtgaggtccaggctcgggagccctcaccttacttcactctcaccacagccttctgaagcagctgctgctattggttattaaacgctccttgaggtgggcaaagtggctcaggcaggtgttaaccctctgagcccctcagagcctctggggctcagcaacatgcacctggctctgatcaaccagggtacaacttctcccgggagagcgtggagagccccgagcagaagggcctgacgtaccaccgcatcgtagaggctttccggtttgcctacgccaagaggaccctgcttggggaccccaagtttgtggatgtgactgaggtaaggggcaggggctggcccactgtgggtgtggggcctgccatagaggcatcaggtgggctccccagggtggctacagcctcacatatgctttatgaatccattcctgccacagacttcgattgcgggcctactgtgtgctcggatggactcgtgggtgacccccagtcttggcttctgccgcacagaactgacagtgtggggaattagtggccaccctcctacctcaggtcctttgcacatgctgtggttctcgagtgctcagtgctgagatgaggaatgcatgggggcattgcagccctcgggcatggtgagatggatgggtgaaagggagagggccaggtgaacagagaccttggccacccactccctgtcactccaaactaacgcttcccagatgccaccctcagccctgcaccacctgacccactcactcagtagttgccccagctccacactgggtccctataagaccctgtcatatcccttcccgctgaggatcctcacatccctccttacctacttgggtccttggcattcctgggcggatctgcagacccccccacactgaccagtgacctcccaggaggggcgtcagctgcccaggtggtgtcttctctttccccgtgagcattctgcacctctgactcccgctgcagccagtgacctggtgtcttgtctctctgaggggacagagccactgcagtgtgtccctctgccctcctttttggctaaggccagctccttcatctactcgctggctcggggtgctgttcctacaatgctcctttctgcctctgatgatttacttctttatcacggcttattcccgaaagaaaggcagctgttgttgctctagaaacttctatctgctgcctccttctgtcctttgctcctcttagagcaaacatggctgggctatgtcctctctcccttcagggtatcccctcccctgctctatccccatgccaccagatcgccatgtccagcctcagtttccccatcaggccccactcagcagcatctcacacagctcaccacactctcctcgagttttcattttgcaaattttcgcacctacaaaaatgtaaaaaaaccccaaaactgcccaagcatcaatgctcccttttcctggagtctgcagtgtggatgtttctgtcggatttcctaactctctccgtctccacccacatctattgggattcgtgtttttctgagggattccacagtaggttactgatgtcgcacctcagggtgtgtctcaaaagtgagacttgaacatagcacagcaggatgtcggggtgacacaacctgttgtcccttctctttacctacagtaggctcccttggctgttttgtttttgttgtgtttttgtttgtacacagagtctctgtcatccaggttggagtgcagtggtgtgatcttggctcactgcagcctcaacctccagggctcaagcaatcctcccacttcagccccctgaacagctgggaccagaggcacgtgccaccaaacctggataatttttgtattttttttagagacagggtcttgcccagactggtctcaaactcccgggatcaaactatcttcccacctcagcctcccaaagcgctgggattacaggtgtgtttttttttttgagacagagtctcgctctgttgcccaggctggagtgcagtggcgctatctcggctcactgtaagctccgcctcctgggttcacgccattctcctgcctcagcctcccgagtagctgggattacaggcgcccgccacaccgcccagctaattttttgtatttttagtagagagggggtttcaccgtgatcgcgatctcctgacctcgtgatccgcctgcctcggcctcccaaagtgctgggattacaggcatgagccaccgtgcctggcctgttttgttgatttttaaagcccagggcagtagtcttggaaaatgtcccacatcgtggatttgcctttctgtttccttgagggcagattcagacagaacacctttccctgggattggtcaactaatccgtggggtgttgctgaaactttattttattttattttatttttgagacggagtctcgctctgtcccccaggctgtcccccaggctggagtgcagtggcgggatctccgctcactgcaagctccgcctcccaggttcacgccattctcctgcctcagccccccaagtagctgggactacatgtgcccaccaccgcgcccagctaattttttgtatttttagtagagacggggtttcactgtgttagccaggatggtctcgatctcctgacgtcgtgatccgccctcccaaagtgctgggattacaggcctcggcctcccaaagtgctgggattacaggcgtgagccaccgcgcccggtgttgaaactcccttgaggcattttcttcggccttcgggtccatcctctgtctcctccttgacctcctcatctcctcgccactgccttggggaccttggccaggctcatggcatccagcagccactcaatgtcaatacctccatgttcatctctcagcccgcccttgcccgtgaacccatgcttatttatttattttttttaatacgtgcacccatgctcttcaggtctgatgaagtatccaaaatcaagctcctgaccatccccaaacctgccccttctgcagggtttacctcgctagtcggcgccatccttgattcttctctttctcccacccaggccatcatctcttgcctggttgatacccacagcctcccctttgggctttatccttatccccatcatagctgccagagggatcctgtgaaaacactccccagcctgctcattcctctgccctaagcctgcatggcacagagcaaaagccagttgttatgggacctaggaagtcctgtgggatgggccccagcctgcatcttcatcctcttctccccaccccactccattcactctctgcctatcactcaccagcctataccacctgcctcagggcctttgcactgaccatttaggccacattccaggctcttttcacacgttgcctcctctgagaagccctccctgaccactctgcccatacctcatgcctcttgattccccttacctggcttgtggtttcagcactttccctgtgtgtgtttgtttttcttggcatgagagcaggacctaagtgtctgttccctgttgattccccagtgccaggcatgcagtgcaaactctagaaatattttttgcatgaaggaatgagtgattgaatgcagcaagggtctggaggctgaggaccaggcagacagacattcagagttgctggaacgcgacagagacagggagtcagactggtcatgcaaggtcctgggcctgcccttgggtcctggggagccacggaaggttgtgggtgccagagggttgcggtcagagtcacagtcaagggccttctgagacctgtgccccctccccaccctccctccccacctcctcaggccagctctggggtctcggcaggtggtccgcaacatgacctccgagttcttcgctgcccagctccgggcccagatctctgacgacaccactcacccgatctcctactacaagcccgagttctacacgccggatgacgggggcactgctcacctgtctgtcgtcgcagaggacggcagtgctgtgtccgccaccagcaccatcaacctctagtaggggctgctgggccgcctgggtgggaaagggccaggggcgggtggcccagggactgcccacttatccagtaaggtggctccgtcacctcttttcctggtgggaaactgaggcccaaccttggtagcttatcctgggcctctcagtgagtatgtttgagcctcagtgggtggatagggaccaggctgggccaggcaaggtcgggcactgtctgacctggctgggcggtagctttggctccaaggtccgctccccggtcagcgggatcctgttcaataatgaaatggacgacttcagctctcccagcatcaccaacgagtttggggtacccccctcacctgccaatttcatccagccaggtatggggtggaggtccgggggtgggggactggggtggagaggggcgggtgtcctgggcaggcagctgacgggcatccctgtcttctcccatcggccgcagggaagcagccgctctcgtccatgtgcccgacgatcatggtgggccaggacggccaggtccggatggtggtgggagctgctgggggcacacagatcaccacggccactgcactggtatgtgtcacaccttttctccctggccgtgcccaccctgcacagcccccaagccatgctgatcacactcccatgccccaggccatcatctacaacctctggttcggctatgacgtgaagcgggccgtggaggagccccggctgcacaaccagcttctgcccaacgtcacgacagtggagagaaacattgaccaggtgggccgggggttggagaaactgagtcaaggtgtggggccccagggcatcctgggctggaggcctggatcatcacagagtggacaatggttggtgtcctctctctagtgcctgggccatctggagcccctgtgccatgagggccaagccccctgctccagtgagacccagcaggccccaacctgctcttcctgatgacctggcccgaaatggcaccacctgggctgaggcctgtgaccacacagatgtggttcaggtggcatctggagccctgctcaggcttcccctctcctcccacccccaggcagtgactgcagccctggagacccggcaccatcacacccagatcgcgtccaccttcatcgctgtggtgcaagccatcgtccgcacggctggtggctgggcagctgcctcggactccaggaaaggcggggagcctgccggctactgagtgctccaggaggacaaggctgacaagcaatccagggacaagatactcaccaggaccaggaaggggactctgggggaccggcttcccctgtgagcagcagagcagcacaataaatgaggccactgtgccaggctccaggtggcctccctggcctgtctccccactc

SEQ ID NO: 1192 - DNA, 52586 bp, Homo sapiens
agaagagcgggctaagacgccggaggaggtggcggcggctgggagaggcgagggttctggccggtaagtggagttgtggagaggttcagggtggccagggctcgcggttggccgtgagccgcggcggacttggtgctgcgggccgactaggccacgcgaggtggtggagcctgcccacctaggcgagcaggaatcggaagacatggcttcctctgatgcagcccgcacgcgcgctggggtgttcactcgccttccagcgcgctgccctgaggaccgggctgactcgcgcccctactgagggcttggggccgagccttgccgccaggagaagcgatggtctcctcctgaaggccgccgttgtcttgtctccgtgtgatacagtgatttcactagctggattgatcactttggggactgcaactcctagagagaaatggaatggagggcatctgaatcttcaccccctatagataagcttgtgttgcaccccaatttttgtgaggtgagacattaaaaatgaaaaatcccctgatgattagaattttgatttcaggtccaccttttggaaattttttttcagaaaagaagtgctttgctttttaaaagccctttagttcgtatatgcctcgcctcttgggagtgctcgagaggttttttttgtttttttttccttcaaagtagctttcaaaactatgctcctagaaaacttaaaacatgcaataagggcttctaaaaaaacactttattttcttaggcaaacatactaagattcagtaataacatttcaactttaaaactttacattttctcctagcatgctattggaccaaaaaacacaacaacaaaaactttccattttctttattgtatttactaataatttatcacactgaaacataacttttgaatacttaagtgtaatatcacggatagttaacagtgtgttttgtatttgtagattttagcatcgaaactaggagaaataagaatggctgtagaggaacttcagtctataataaagagatgtgtaagtattaatttttgtaaaattaaatacctttcaaaatatgggaagggcacagattgtttttaattatatttgtggtcactcaaattgtttatcttctttaatccttgctttttttgacctgtaaagagcatgagtgggggaggcagattggattatttctccaggtgacatacttatctaaataaccttttacattttaatcctgatccttttcatagatttcactggtacagtagatttcaaggtcacttattaaagtatttattagggtaatcctaattttgatacgtgtgttatttacgttacatttatctagaatttaaacagatttccttttttcatagataaatcaagaagttattgtatttaatttttatttgcatatacttttttttgtttgttttttgggttttttttttttttgccagcaaatcctagaagagcaagactttaaagaagaggattttggcctatttcagttagctgggcaaagatgcatagaagaagggcacacagaccagctattagaaattattcaaaatgaaaagaataaggtgcgtacaatcttggtgtttacttttcagtcttgggaagagaataatcacatgatgctattcatccagtcatttatccatcaaacatttaagaatctacttaaattttcacagtagggaactgaaaacaaaaaaagaattagaaatatttaggccaggcgcagtggctcacgttcgtaatcacagcgttatgggaggccaaggcaggcagatcacttgagcccaggagtttgagaccagcctgggcaacagagtaagaccctgtctcagaaaaaaaaaaaaaaaaaagaaaagaaacagtcatatacttgaaggtttttaccatctggtcaaacataaacatgtaaacaactaacaataatgaggcaaaataaataattgctatagttgaagtaaagagtttttagaagaaacagaattacttctggtttagggagtccaaaaatggtgtttgagtcattaatttacaatgagaaatatacatatcaagcaggctaaatattcattttgggtgatcagcccattctcctccagccaaatgtgtatggaaaaccaaattttaattaaaacagtattttatgtgcatagaatcagaacaggaggaaaacgatatgtcattatactagccagtatcatccagttacaatggtttgagaaatcatcctccacaatggaaaaggatcttatttgtggatcaggaataactttttcctgggacactgtgttggcaacatcctgccaaattttgtgtctttggatactccttataaggaagacggctatggtttggctctgtgtccccacccagatctcaccttgaattgtaataatccctgtgtgtcaaggatgggaccaggtggaggtgattgaatcatgggggtggtttccccatgcttctcatgatagggagtgagttctcaccaggtctgatggttttataaccatctggcatttcccctgttggcactcagtccctctcctgctgccctgtgaagaggtgccttccgccatgattgttaagtttcctgaggcctccctagccatgtggaactgcatgtcaattaaacctcttttctttctaaattacccaggcttgggtattttttcatagcagcatgagaacagactaatacaaagaccatcttccttctaggtacacactctttcttcatttgcagtgctacttatttattagaagttttctttcttgatatcacagtgtaatcatgttgatctgtgtttctctccagggcatcttgattggatttgggggattcctaaaactttttaatcatatattattataacatctcttagtcagtagttcaaatggcttatacccttcttattttttattaaaataggacattttatttagtttttgatacatgtttatgataactttgtaacctccaatataataaatcttatgttttttaaactcttcttgatttttttctaattgcgttctcaggataaccttctaaagtacttagctttcagctaataataaaaaaattaataacaactaatatttattgcatgtttacatgtaccagatgctgtctttagtcctttacatttattaacttaattagtctctccaaaatctcagaaggtaggtgttcattttgtaactgaaaagttaaatgacttgcccaaaagtaagtcagcttttatgtaacatccaagattcagacctgtgtagcatggttttggagctcctaaccactctgctctacctctggttagtgctgtatggcgtatggttttagggtagaatacaggggattgcttgattgagagggagaggcatcaaaaatgactgggtttctagcctctaaaaggataacatatgatatcaaacagaaaaaggcaacctaagtagagggaaaagttttctgaaggaacaagtgagttgacttttagaaattttgagtttaagtacagcagtcaattggaaaataaggttttgagctcagtagagatagaggaattaagatgtagatctctgagacacatatctgtgagactttaattacctaaagattgggtaattgaagcattgaggagtgaaaaaaaaaaacaagaatttacctgagttcacataaaaggggcagaagagaagaggcccaagatcccatcttgaagaatttaagaaacaggtagagagaagaggcctgccaaggagatgaggatcagcaccacatcagtgaggcagaaggaaaagggaagtataaacaaagtatttttcaggcattgcatgccttagcgttttatttttagcatgcttctgaatagctaatgggatagatttaaacatgtgaggcttagtcttaatagtttgagaatcacctttgcaatatgtggtcagctaaatgcaaaggtttagatattgataagacaatgttcaaaactgactacaggctgggcacagtggttcatgcctataatcccagcactttgggaggccgaggcgggtggatcacctaaggtcaggagttcgagaccagcctggccaacatggtgaaaccctgtctccactaaaaatgcaaaaattagctgggcgtgatggtgcgcccctgtaatcccagctactcgggagactgagatggggggattgcttgaacccaggaggtggaggctgcagtgagccaagatcgtaccactgcactccagcctgggaaacagtgagaccccatctcaacaacaacaacaacaaaaaactgactacaatttaattttcttgccaggtgacactatcaaaattgaccaagatttactattatcttcacctataagactgaattaaagaaaaaaaataaaaataaaaagatttactatttactgctttgtgagagaccattcacatactatttattacagtatattataattgttgtagttattgttaatctcataaattaaactttgtcacagatatgcatgtatagtatttatatatagtgtttggtactattcatggtttcaggcatccactgggggtcctggaatgtaccccctgcagataagtggggagactactgtatcgtatactctatttttattatcttacaagactggggtcaagatgaggtattataggtgtcattttgtcttcttcctagatcagattttttttaaaaaaattctaatttttgtgggtacatagaaggcatatatattgatgggtacatgagatgttttgatatagacatgcaatgtgtaataagaatatcatagagaatggggtatccatcccctcaagcatttatcctctgtgttacaaacaaaccaattatactcatttactttaaaatgtacaattagttattgactatagtcaccctgttgtgctatcaaatagtaggtcttattcattacttataacttttttttttttttttggtacccattagccatcttccctgcctcccactaccattttcagcctctggtaaccatcctcctactctctacgtccgtgagttcagttgttttggttttcagatcccacaaaaaagtgagaacgttcaatgtttttctgtgcctgacttctttcacttaacataatggtctacagtcccatccatgttattgcaaatgacaggatgtcattcatttttgtggccaaatagtactccattgtgtatgtgtaccacattttctttatccattcatctgttgatggacacttaggttgcttccatatctgagatattgtaaatagtgctgcaatgaacatgggagtgcaaatatctcttcaatatagtgatatcctttcttttgggtatatacccagcagtgggattgctggatcatatggtagctctatttttgtattttttgaggaactgccaaactgttctcattaatggttgtagtaatttacattcctaccaacaatatctaaaaaaaaaaatacaaaaaattagccgggagtggtggcgggcacctgtagccccagctacttgggaggctgagacaggagaatgacgtgaacccaggaggtggagcttgcagtgagctgagatcgcgacaatacatgtcgcgacaatatatgagggtttccttttctccacatccttgccagcatttgttattgactgtcttttgtatataagccattttaactggggtgagatgatatcccattgtagttttgatttgcatttctctgatgataatgatgcgtaccttttcatatgcttgtttgccatttgtatgccttttgggaaatgtctattcaaatcttttgccaattttttaatcggattattagattttttcctttagtgttgtttgagcttcttttctattctggttattaatctcttgtcagatgggttagatctgctttttcattatttatatatttttttgagatagggtctgtctctgtcacccaggctggtttgcagtggtgtgatcacaactcactgctacctcgcctcccaggctcaagccatcctcccactcatcctcccaagtagctggggctacaagcgtgtgccaccagacccagctaatttttgtattttatacacagggtttggccgtgttgcccaggctggtcttgaactcctgagctcaagtgatccacccacctcagcctcccaaagtgttgggattacaggcatgagccaccatgcttaaaaaaaaaaaaaaaaagaaaagaaaagacggggtgcggtggctcacgcctgtaatcccagcactttgggaggctgaggtgggcggatcacgaggtcaggagatcgagaccatcctggctaacatggtgaaaccccatctctactaaaaaaaaaaaaaaaaaaggcaaaaaattagccaggcatggtggcgggtgcctgtagccccagctacttggggggctgagacaggagaatgacatgaacccaggaagcagagcttgcagtgagctgggacagcgccactgcactccagcctgggcgacagagcgagactcagtttcaaaataaataaataaataagaatgtatttaactttaaaaaacagagacagggtctcactaggttgcccaggctggtctcaaactcctgggctcaagtgatcctcctgcctcagcctcctaaggtgctgggattagagacatgagccactgcacccagccaaccaccgtgcttttaaagaaggactctaggagggtagtgatcttatccagtgtgttcctcactttatttctaacctctagaatattatagtgtaggcttggtaaatactgatgagttaaaatacaaagcaggccagagaagtggaatacattgttgatcctttgagaattagtggttttgataatgaatgtgaattagtcattataaagataaacttttacttgtatggtaagcattctgaaatatctttgaacatagaagccacttgtatgtaggagagaaaattaatgaagttgtatcccttcttttttttataaattacaaggattatatttagagactccaagaactttaaaaggtacatgagcattggctggatttctttatgaataaggggagcaaaattgtctgtggaagttaagtacctgtattaagcaaattaactcttttgttggaaatagaggcactatttaaatcttgggaaacaccaacttgcctgataaaaagtaaagacccttttgcctttcctcagggaacatattaaaaactatttaaaaatgttgatgtctgttagtagccaaccctggaaagtctctggtgaaatgtcataggcttcacttgtctcatcttcctatttcagaaacaattctgagctcttccaagataggaaagcacactgcgagagtcctatagatggcagtgtttgctttactctgaaaatgtttttacaggtcatcatcaagaatatgggctggaatctcgttggtcctgttgttcgatgccttttgtgtaaagataaagaggatagtaaaagaaaagtttattttttgatctttgatttattggtaaaggtaagttaacaaaacaaggttctctttatcataacacacagcagtattttataattccctttaatgtttattgtttggtaagaaagcttttggttcatgaaagtacatgcagaaaggaactcgttggagaaaagacccagtcttattgattggataggcaattccatttcaggatttcccaaattttctggataaaagaattgtctaacctcatattaacctcatatcggacccattgattcagcatctccagggagagacctgggaagctatatcttaacaagtagccttatcgtatagatgtggaatacaagctttagagaggtagttcaaggtcacatttatcttttggcaacattggaactagattaaaatctcagtcctctttcctttgtggtatgttccctaaaagaaaatggaaggcctagaatacaagtgattaaaattgaagtaggaatagggtagaatacagatcagttgtgactaacaaccttagaaagcgaccctgggtaaaaggctagtagagtttacagtcaatatttgatggccaagaaagataaattctgagaaaaagtatattataagaaactgtttagtgatcagtgcaaatatacccaaatatatattggaaggagagctccatctgtatgagttattgactatgggagctgggagcttttaaaaaaccagtcaagtgagatgataagatatggccagtcagaaagcaatgcaaagttttacctgttcaaaaaatacaaaagagattccagactagtctaaataggcttgcagcatgggattgaaaggtcccacctgctggagcccctgagaatctgttaaggcaatttcagagtggacaggtgaagctcaaaggaaacctgagcctaaagatccattgacttcttgctttttagttttatagttacttgaccatcacagattctgtgttttgctcatgcatattttttcaacaattgtataaataattttaatgttaagcaaaaacataattgtataatattttgtcgatacatgccttcttaaaaatagtaataatgtggctttaaatacaacttgtattaaacaggttcaattgtgaatatttttatagttatgcaatccaaaggaattattgttgggtttgcttgaactgattgaagagccctctggaaaacagatatcccaaagtattcttcttttgcttcagccattacaaacaggtaatgagaattttgatatcagagtacttcttgttgtatctctaaatgccttgatggttacctcaaaatgtcaatactacaccaaagtaaagtttacagctaattagtgagtactctgcttaaaccaataatagcaatgccaatgtgaatactgctgctcatagaaagattatagtatctggccagagtgggtacccagtaaatattctgttgaatgtcatactatttttcatgtgctatattgaaaactatacctttttgcctaaccttcctatctgctgcttaaatctagaattttctctctaaacatgtttcaagggttacctctgtggtgtctgcagtactaaatctgatagcattatggtagtctggaagagtatcaggcaaggcattgctcagcctctgctttgggaggttggattgggcatagcaaagctactactgaagaatgaaacgaggagatatgggatgataaggctccatggctgagtgcagtaacagtattggtaggtaatgggtcttagcaaccaaggcagacagtatccataggaagaggttatttttcattttaggaaattcgtttatctcacaatctgatagagggacctagaatcagaaattaaatttgttttaaatatgaatgcctgccagcttcatactacctgtaatattcagtcttctagggaaaaaaaatctaataataccacctcctatttgtgtagtgctttatagtttacaatacacttatattttgtgcttataacaacccaaaaacatggaaagaacatgtttctgtcttaagtacatagcctgttacacatagtctgttataaacataacctaaacagcatttcatggcaagatgctgtattattttatgcacaactaagaagaaaaaaacactgccaattagactgtgatgtgtcatcttgattcaagagttgttaaaatgtgggaggaggaagtgtcttataattccacatttgccgaatttcttgtcccatgtttagcatacttgatgagcgacaacttgatctctgttttagtgattcagaaacttcataacaaggcatattcaattggattagcattgtctaccctttggaatcagctatctcttcttcctgttccatactcaaaagaacaaatacaaatggatgactatggcctttgtcagtgttgcaaggccttaatagagttcactaagccttttgtggaagaagtcattgataacaaagaaaactcactggaaaatgaaaagttaaaggatgaattactgaaattgtaagtataattttaagaacatctcacagtggacttaagtaattgatagttcagttattttatgtttcttcactttgtttgacatgtaaatagaaatctagtttcagattttgaattttagaagaatgtggggttcagttgatacagcatgggaacttgagacatttatattttaaaaaattataggccgggtgtagtggctcacacatgtaatcccatcactttgggagactgaagtgagaggattgcttggggccaggagtttgagacgagccttggcaacatagtgagacccccatctctataaaaaaatttaaaaattagctagatgtagtggcatatacctgtagtgctactgcttgggaagctgaggctagaggatgggttgaatccaggagtgtgaggctgcagtgaatgatgattggccactgtactccagtctgggcaacagagcaagaccctgtctttaagaaattaattaataaaataattataaaaccaaaatccattcatttactttatattcttctttgtattgccttattcatcatagtaggtgaataatgaaagtgggggaaatagatacatgtagctcagggtgagtgtgggaaatagatataggtagctctgtggagaaattgtgttttactctttcaaaggaagcagcagaaagaccaccagacagaacatccaactggaccacaaaaatagtggtagagtatccacccaatagcattccctccatgggtactatagactaaacatctactgttcaatatggctgtagcacttgacatatggctggtccaaattcagatatactttaattataaaatatcccctggattttgaagacttgttatttaaaaaaaaaaaacagtaaaatacctcaatttttatattgataacatgttgaaatgacaatatttcagatatactgggttaagataaattattaaaatcatctctcccattcttactacttttttcatgtgtctactaaaagatcttaaattatatatggggctgtgttatatttctattggacagtgatagactagattaattacatggaccagtaatttttaaattttggctacttgggaggctgaggcaggaggatcacttgaggccaggagtacaagaccagcctgggcaacatagcaagacctcgtctctaaaaaatagaatataaaataatattttaattttggagactaatactatttttagcttcctacttgtcaggttaggacatttaaaaaaaaatttacagccagacgtggtggctcgcacctgtaatcctaacactttgggaggtcaagctgggagattgcttgagctcaggagtttgagaccagcctaggcaacatagtgagaccctgtctctacaaaaaataaaaaagttagctgggcacagtggtgtgtgcctgtagtcccagctacttgggaggctgtggcaggaggatcctttgagcccaggagtttgaggttacagtgcactattattgtgccactgtactccagcctgggtgacagacaccctgtctcaaaaaaaaagttttttaccatttataaaacccattatttcataaaagaaaaggtattttaactaaagaaataggaaaggcttaatcacagaataaagtttggttttctaaataaaacaaatagagctgtgtgaaaaaatgactgtatttcttgattttttctttgaactaatgaaaacaacatcatagactagcaccagccctcaaacattcagaattcaatggaatagttcagatgtagaagtcagtcttagcatgttgagtctagcaaggtgttctcatgttctccccattactagtacgaacgacgttacatcaccagttttatagaccattgagttattgatgcttgtcttaatccatttgtgctgatataacagaatacctaagactgggtgatttataatgaacagaaattcattggttcacagttctggaggctgggaagtctgcaattaaggcgctggcatctggcaagggccttctagctgtgtcataatgtggctgaaggtaaaagggcaaaaggcaaaagtgggctgaacttgcccttttataacagcattaatctcatccgtgagagtggagcccccttggcctaattcccacctccttatggcagttaaatttcaacatgagttttggagagcagagtcattcaaaccatagcagtgcttatgttatttttcaagtaaaattaacttagatttgaagacctagggattttatacttggaagtgttgatttcatagttacctatttcttatgccttagttgtttcaaaagcttgaaatgccctttgctgacagcacaattctttgaacagtctgaagaaggtggaaatgatcctttcaggtattttgcatcagaaataatagtaagtacagctaatttaatctgctataatcttaaatgttatcccactatattctcagtactgcacatgtaaattgatacattcattaataaagaaatgtgtattttttgtagaacacacataaacaaaagatggaaaataaaacagcaataattttattatccaaagataaatattaacatcctccaggcttttttcttatatacttatttataataatacatatatataaatttttcaaagattttatatatatatataatcttgtaatctacctttttcctcttcaacagtatattatgaatatttttccattggcttaatagtgttccatggtatggacttagtataatgtatttcacctgtgccatatagttcaacatttggattgtttctaattttccattattgtaggacaactccaagttttctttttttaactgttaagtctatgataagtaacctagtaattaaatttttgcatacttttcaaattatttccttaaaactcctagagtggaaattccatgccctgtgataaatattttcaaaatagctccatatttaagtaaattttattttaaaagcaatttggctttatgcatcaatagtattttaaaatgtgctcagattctgtattagagaaataatctgaaatattaaaaaatttattttaagttgatgtttctgaatttcaaaagagaaagtccatgtggctgtgtagttttcttcagccatgttcagctacatgagtgcaggtgcagcataggagtaacatttggttgaattagggtggggttttaagaacagggtaagttgtagagagcaagaggggggcaagggattgagcatgtatgtaaggtgatttctttttcaattatactttaagttctagggtacatgtgcacaacgtgcaggtttgttacataggtatacatgtgccatgttggtttgctgcacccatcaactcatcatttacattaggtatttgtcctaatgctatccctcccccagccccccacgccccaaccagccatggtgtgtgatgttccccaccctgtgtccatgtgttctcattgttcaactcctaccaatgagtaagaacctgcggtgtttggttttctgttcttgtgatagtttgcttagaatggtggtttccagcttcatccatgtccctgcaaaggacatgaactcatcctttttaatggctgcatagtattccatggtatatatgtgccacattttcttaatctagtctatcattgatggacatttgggttggttccaagtctttgctattgtgagtagtgctgcaagaaacacacatgtgcatgtgtctttatcatagaatgatttataatcctttgggtatatacccagtattgggatggctgggtcaaatggtatttctagttctagatccttgaggaatcgccacactgtcttccacaatggttgaactaatttacactcccaccaacagtgtaaaagcgttcctatttctccacatcctctccagcatctgttgtttcctgactttttaatgatcaccattctaactggcgtgagatggtatctcactggttttgatttgcatttctctgatgaccagtgatgatgagcattttttcatgtctgttggctgtataaatgtcttcttttgagaagtgtctgttcatatcctttgcctactttttgatgggattttttttttcttgtaaatttgtttaagttctttgtagattctggatattagccctttgtgagatgggtagattgcaaagatttttctcccattctgtaggttgcctgttcactctgatgatactttcttttgctgtgcagaagctctttagtttaattaatcccatttgtctattttggcttttgttgacattccttttggtgttttaatcatgaagtccttgcccatgcctatgtcctgaatggtattgcctaggttttcttttagggtttttatggtgttaagtcttacatttaagtctttaatccatcttgagttaatttttgcataaggtgtaaggaagggatccagtttcagctttctacatatggctagccagttttcccagcaccatttattaaatagggaatcctttccccattgcttgtttttgtcaggtttgtcaaagatcagatggttgtagatgtgtagtgttatttctgaggcctctgttctgttccattggtctgtatatctgtttcggtaccagtaccaatctgttttggttactgtgtccttgtagtatagtttgaagtcaggtagcttgatgcctccagctttgttcttttggcttaggattgtcttggctatacgggctcttttttggttccatatcaactttaaaatagttttttccaattctgtgaagaaagtcagtggtagcttgatggggatagcattgaatctgtaaattactttgggcagtatgaccactttcatgatattgattcttcctattcatgagcatggaatgttcttccatttgtttgtgtcctcttttattttgttgaacagtggtttgtagttctccttgaagaggtccttcacatcccgtgtaagttggattcctagctattttattctctttgtagtaattgtgaatgggaattcactcatgatttggctctctgtttgtctattattggtgtataggaatgcttgtgatttttgcacattgattttgtatcctgagactttgctgaagttgcttagcagcttaaggagattttgggctgagacgatggggttttctaaatatacaatcatgtcatctgcaaacagagacaatttgacttcctcttttcctaatcaaataccctttatttctttctcttgcctgattgccctagccagaacttccaacactgtgttgaataggagtggtgagagagggcttccttgtcttgtgccatttttcaaagggaatgcttccaattttttgcctattcagtatgatattggctgtgggtttgtcataaaagctcttattattttgagatacgttccatcaatacctagtttattgagagtttttagcatgaagggctgttgagttttatccaaggccttttctgcatctattaagataatcatgtggtttttgtcattggttctgtttatgtgatagattacgtttattgatttgcatatgttgaaccggccttgcatcccagggaagaagccgacttgattgtggcgcataagatttttgatgtgctgctggattcggtattttattgaggattttctcatcgatgttcatcaaggatattgccctaaaattctctttttttgttgtgtctctgccaggctttggtatcaggatgatgccggcctcctaaaatgagttagggaggattccctctttttctattgattggaatagtttcagaaggaatggtaccatctcctctttgtacctctggtagaattcggctgtgaatctgtctggtcctcgactttttttggttggtaggctattaattattgcctcaatttcagaacctgttattggtctattcagagattcaacttcttttaggtttagtcttgggagggtgtatgtgtctgggaatttacccatttcttctagattttctagtttatttgcatagaggtgtttatactattctctgatggtagtttgtatttctgtgggatcagtggtgatatcccctttatcattttttattgcatctatttgattcttctctcttttcttctttattaatcttgctagaggtctatgtattttgttgatcttttcaaaaaagcagctcctggattcattgattttttttgaagggttttttgtgtctctatctccttcagttctgccctgatcttagttatttcttgccttctgctagcttttgaatttgtttgctcttgcttttccaattcttttaattgtgatgttaggatgtcaattttagctctttcctgctttcttttgtgggcatttagtgctataaatttccctctactcactgctttaaatgtgtcccagagattctggtatattgtgtctttgttctcattggtttcaaagaacatctttgtttctgccttcatttcgttatgtacccagtagtcattcaggagcaggttgttcagtttccatgtagttgtgcagttttgagtgagtttctgaatcctgagttctaatttgattgcactgtggtctgagatacagtttgttgtgatttctgttcttttacatttgctgagtagtattttactaccaattatatggtcaattttagaataagtgcgatatggtgctgagaagaatgtatattctgttgatttggtgtggagagttctgtagatgtctattaggtccacttgttccagagctgagttcaagtcctggatatccttgttaaccttctgtctcattgttctgtgtaatattgacagtggggtgttaaagtctcccattattatcgtgtgggagtctaagtatctttgtaggtctctaaggacttgctttataaacctgggtgctcctgtattgggtgcatatatatttaggatagttagctcttcttgttgaatttatccctttaccattatgtagtggccttctttgtctcttttgatctttgctggtttaaagtctgttttatcagagactaggattgcaacccttgcttttttttttttgctttccatttgcttggtagatctttctccacccctttattttgagcccatgtgcatctttgcatgtgagatgggtctcctgaatacagcacaccaatgggttttgactctttattcaatttgccagtctgtgtcttttaattggagcatttagcccatttacatttaaagttaatattgttatgtttgaatttgatcatgtcattatgatgatagctggttattttttctgttaattgatgcagtttcttcatagtgtcactggtctttaccatttggcatgtttttgcagtagctggtaccggtcgttcctattcatgtttagtaaatccttcaggagcttttgtaaggcaggcctggtggtgacaaaaatctctcaccatttgcttgtctgtaaaggattttatttctccttcacttatgcagcttagtttggctggatatgaaattctgggttgaaaattcttttctttaagaatgttgaattttggcccccactctcttctggcttgtagggtttctgctgagagatctgctgttagtctgatgggcttccttttgtgggtaacctgacctttctctctggctgcccttaacagtttttccttcacttccaccttggtgaatctgacaattatgtgtcttggggttgctcttctcaaggagtatctttgtggtgttctctgtatttcctgaatttgaatgttggcctgccttgctaggttatggaagttctcctggataatatcctgaagagtgttttctaactttgttccattctccctgtcactttccggtgcaccaatcaaacatagatttggtcttttcacatagtcccatatttcttggaggctttgttcgtttctttgcactcttttttctctaatcttgtcttcttgctttatttcattaattggatcttcagtcactgataccctttcttccacttgatcaaatcggctattgaagcttgtgcatgcgtcatgaagttctcgtgccatggttttcagctccatcaggtcatttaagtgcttctctacactgtttattctagttagctatttgtcttaccttttttccaggtttttatcctccttgtgatgggttagaacatgctcctttagctcggagaagtttgttattaccgaccttccgaagcctacttctgtcaactcatcaaactcattctccgtccagttttgttcccttgctggtgaggagctgtgatcctttgaaagagcagaggcgctctgttttttggaattttcagcttttctgctctggtttctccccatctttgtggttttatctacctttggtctttgatgttggtgacctacagatggggttttggtgtagatgtcctttctgttgatgttgatgctattcctttctgtttgttagttttccttctaacagacctctcagctgcaggtatgttggagtttgctagaggtccactccagaccctgtttgcatgggtatcaccagtggaggctgcagaagagcaaatattgctgcctgatccttcctctggaagctttgtcccagaggggcacccgcctgtttgaggtgtctgtcggccccctactggcaggtgtttcccaatcacgctacgcgggggtcagggacccgcttgaggaggcagtctgtctattatcggagctcgaatgctatgctgagagaaccactgctctcttcagagctgtcagacagggatgtttaagtctgcagaagctgtctgctgccttttgttctactgtgccgtccccagaggtagaatctatagaggcagtaggccttgctgagttgcggtgggctccgcccagtttgtgcttccaggcctctttgtttacactgtgagctactcaagcctcagcaatggcggacaccccttcccgtctagctgcagcctcgcaggtcgatctcagactgctgcgctagcagtgcgcaaggctctgtgggtgtgggacccaccaagccaggcatggcagggtatctcctggtctgccggttgctaagactatgggaatagcacagtatttggtcaggagtgtactgtttctccagaaacagtctgtcacggcttcccttggctaggaaggggaaattcgctgacccctcgcacttcccgggtgaggcaatgccccgccctgcctcagcttgccctccgtgggctgcacccactgtccaaccagtcccagtgaggtgaaccaggtacctcagttggaaatgcagaaatcactggtcttctgcgtcgatctcgctgggagctgcagacctgagctgttcctatttggccatcttggaagtgactcctttttttttttttttttttttgtgacagagtctcgctctgttgcccaggctgtcgttcaatggcatgatctcagctcactgcaacctccacctcctaggttcaagcaattctcctgcctcagcctcccaagtagctgggattacaggcacccgccaccacacctggctaattttttgtatttttagtagagttggggtttcgccatgttggccaagctggtctcaaactcctgacctcacgtgatccacccgcctcagcctcccaaagtgcagggattacaggcgtgagccactgtgcccagccgcaaggtgattttaatgtacaaagtgactttaatgatggacatagaatttaagctgggtaaggagtaaagttaggacatgcaagagacagtgaaaaggtgattggatcattaggttgtagaacctggtgtgggtgacagatgtttggagttaggttactaaaaggggtgaactgaaaaaataggtgtaaagaataggatgcttgaaaatagtattatggaaagattatagttactagtatcaatgtctggggtgtgaccatgagagggtgttctaaaggagaggatagaggcaaaggtcattgggctagagaaaatgaaatacttgagatttcagagtatcagaagatctttggttgtacatttaaatcacacagaattataatgttggaaagccatgtgatggggtgaccttggggtctactaactgcaacaaggaggggtagaaatggtaaagtcataaaaaatgagtttcagagttgagggatttttagagaggatggggagagaatggtgtagaagcagcaaggagaacagatgtattcccaggctcagtggtacaatgggtatagatgaaaaatacagtagtcttttgaagggttgcagagaaagcagctgttttcagatgagagccaattttaatttaggagagatggaaaaaggggtcagatgaagggatgctagaagtttatgggaataaattctgaagatgagagatgacttggtgactgatataattaggaatacataatttaataaggttaatgctgatggtcacgataatagtgaagaggctgtgagggatgaagtaggagaggtgacgggttttctctggagcacacaaaagtctgggggctcttcattgttaccagtgctagagcacagtatcatcttctggaggtagtataagcaccatcacatatgatatgtattttgagaagacaactatgaaagttggaaactattaaaggaaatctggtgatgtagaaaaaccaaactcagtttctcctactatagtcataacaagtttctgacaccagatgtatggagttccctgccctgccccctgcccttcacggcaagcaagcaagcagttgtacaacggacaccaattgggtgtcctctaattcaattccaacgttacctacctggagatagtgtcagatttcacaggttgagggctaaatacctcaagactgcccccccttccaatgccagtctcaagccctaggatgttttacctgtgctctaactgactggcaataaatcaggattcccaggaccccctccttgggtttgattaatttgctagattggcttacagaactcagggcactgcttacttacatttagtggtttactataaagaatattaccaaggatacagatgaagagatgcatagggctaggtataggggagggggcaccaagtttccataccctgcctggatgcaccaccctactggaaacttcgtgcgttcagcttccagaagctttctgaatccaatcattttgggtttttatggaggcttcattatgtaggaatgattgattacatcattgaccgttggtaatcaacttaatattcagcccctttcccttactggggtgggatgggggtagggctgtgggactgaaaggtccagccttctaatcacagggttggttcccttggcaaccagctcccatcctgaggctatccaggagacgcagctatcagtcaactcaatagcataaagacacttatcactttggagattccaaggattttaggagttatatcccaggaagtgggaacaaagagcaaatatatatgtcacagtatcacagatgttaaatctgggagtgatgtaatcaaactgtgtttaggattcatcactttaaaggaagatgactaactgggataaaattggaagtagggaagccttgggagttaagtaagcaatgatgggagcctgagtatagatgtatggatattttttgtttgtttcctttttttaattgactaaatttatgacacattctgttagtagggatatagttttaaagatgaagaaagggcagatttgagaactttatagtaggtaaaattggcaaaatttggtcattgattggatttagaataaaacatggatgagggtttttgcttggataactgggcagatgaaggtgccaatacttgagatagagaatacagagcaagaatctgggggtcttgtgcctttaaaacaaatgtattgtaaaaatttacaaacattcagaaaagtactaaaaataatctagcacatgcccatgtacccatcacccagcttcaataattatgaacattttgccaattttgttttatctgtcctcctccttttcttgctgtagtataacaagtcctaaacataattcatctgtaagtctttaaggatgcttccctaatgacaagggcttttttaaaaaaacaaataaccaccaggctattatgacacctaacaagattttattaccttttgttaaaattttttgagacagggtttcactcccattgcccaagctggagtgaagaggcatgatgtcggctcactgaaacctctgcctcccggactcaagcagttctcctgcctcagcctcccaagtagctgggactgcaggcacacatcgtcccacctggccaatttttgtattttgggtagagatggggtttcaccatgttacccaggctggtctcgaactcctgggctcaagcgatctggctgcctttggcctcccaaagtactgggattacaggcgagagccactgttcccagcctaactcctaacaagattaacaataattttttaatatatatctaataaccagagagagaataggtttttaaggaatttaaaatataatattttaatatgtaaatatatgtatatttaatatagaattatatgtaaatgtgtatatatattttttgagatagggtcttgctctgtggcctaggctggagtgcagtggcacaaccatggctcactgcagcctcaacctcccaggctcaagtgatccttccacctcagcctcctgagtagctgggacttacaggcataccccagcatgcctggctaatttaaaatttttgttttgtaaaggtgaagtctcactatgttgtacagactggtcttgaactcctgggctcaagtgatcctcccaccttggcttcccaaagtgctggaattacaggtctgagccaccatacctggccaggagatactttgaatgagagggggtgagattacctaaagaggtgacaagagaaaagggctcaggagtgaactctagagagtaccagcacttaaaatgagcccaagaaggaagtcggaagtggtagaaatacacagaaactggtgtagtagagttttagaaggatagaggtgatcagtactgttaaatgcatagaggtatgctgaaaagcatctgtaggatttaggaagtaagatggcattggtaatcttagcaagaacagtgtaagtacagtgttggagacaaatcagagtggagttgataaaagaatgaatgacagatgagaaaaaggagatgactagtgtaagctattctttaaaagaggttggatgaataaggaaggagaggtaatagctagaagacatgagctaagggtaggaaggtaatggaggtgggaagacttgagcatgtttatagctgttggggtgcaaactgttgagggaaaaatacaagtgtttatgagataactgaaataatgtggcttatgagcaaatggctggacatagtatcaaggccataaggaaagtcctagacaggaagaactagtgggtatcaaggtaagaaaacatgttgagaaatttgtagcaggaatggaatcttacaattgaggggagtcaaacccactggcctcagatttctaggtgaaggagagatgatctcttaataatgaggaggtagaaatgggcattgagtaaaagggcttaaggaaactggtaaaggtttggaatactgaggggaaaggaaagagatggtggaagaccacggaagcatgagtcagtagtactgagcactcaatggtgcttggaaaccacaactatagtggtaacagtctgtatttttttatccagcaatactcagctccctgtgtgtagaagcagagaaggtagattgcagttatttttccaaggctggcattttactgggtagatactgctgaaggaaatacagggtgcagatagttcagctggtcaataatccatgattcaggttggatagggaaagaaggggggttaggagggaatgcctaggtaggtcaaaatgtaggaatcacaggactggagaagtcagaagtagaaaagcagattgctaggagagacaggatgacagattttggtcagaaaatgggatattggagtttaaagtatcaaatacagaatagttccagatgttcagagatccagcatgggattaggtactgaaatggattagaactaaaagtcactagaatttagaaattgagaaccatgagagtggatgcaatgacttgttgcttgattgaaaaataaattaataataataaaggaccatgagactagcctgttataggggttatctccatgaacattgaattttcccaggatcatagcaggaattgggtagagaaaaagattatgagaaggtgccagagtcttcagtgaatgtcaggaaattaccaggaagtcagcatatgacagagaaaaggacagtatgttatctgcatcaaaggaaaatgtgcttttgttgaaaagtacagaaaaagccaatactacaatactgtgctaagcccctacctgtactcctctacccaacagctgcattccaggccctgtggtataaaaggtgtgagaatgagcatctcccaccagaaatcagacaggtttagttaaagcagtgaggcagaacaagcatcctatgaagagactgaggatgtaggtgagtggttctaaaatctcagtagaaggaacattgcaagtagaaagagccagcagtaaggatgcacgtagcagtctagaagtagaggtgagaccagcttggagatgaaatgaggagatgtcttctgttctgtgctggagaagtactggtaagtgtggtgtggttgggattcacaggcctcagccatcctcactttggtacaagttattttggtacagaactactagaatgtcccaaaggctgtagtacaggaacatttctgaaaggacaaaagctgccatgaatattgagaaattgtatggtgccaggtacagcctggatctgagcaagactgctggatggtgtgtggatagatagtgaaggcccagatttgggaacagattggatctcagatatccagagcagcactgtagaatctagttgcatataataatgttttaaaaagggtatcttaggctgggcacggtagctcccgcttgtaggcccaggcctttgggaggccaaggtgggcagatcacttaagcccaggagttcaagaccagcctgggctgcatggcgaaaccccatctctataaaaaataaaaaaaataaaaaaaaaatagcgggcatggtggcatgtaccagtagtcctagctactcaggagactgaggagggtggattgcttgagcctggggaagtcaaggctgcagtaagccatgatcatgccactacactccagcctgagtgacagagtgagaccttgtcgccaaaaaaaaaaaaaaaaaaaacagggctaccttactctggaaaaaacacatgtagcattggctgaataaagaaatggagcttcatgattaaggacatttggaatcagagtgcaataaactttttgtcttgtagctataaccagaatgcatggctttgaaaatcactgcagcagtatatatttagcatctggtcgctgaatagcagtctcttgtgactgaggatgattttccatggttcctttttgtattctgaaatgactaatggaaccatctgggatcagcagattttaagtccctgaaggctggaaaagacttatacttggctttataattccccacaaagtcaggcccagcaccttgcacttaagtgtttattgaataaaagagtgacttgtgtggaagttattcattctgctttagctgtttttgtcattcattcccttttaactcttgtagtttgttgtgactttaactttcttacgctttttttgtggagctgctcgataaatatttgacataggtattatgtcattttatggctcatccagtgtcacacaagtagtaaatggtagagccaaaactcaaaatcaatgtcagtggattctgaaggtaggtgctttctggtacgctagaattagtaccagtataagaggcataggagtgatcttgtttcctgagcggaaagctttatttagccctgtggtcctacccactcatgcaaggatgcttctctttctcgtctcacatgagaaccctgatgactgagagatcaacagtgtttcctcaggcccagctgccctgcccagcgttcctgcatcccactctctacaggcacaatgttagtggagcattgttcctagagtattcttcatcttagttgctttacccttgcttcatatatttgtatgtctcacgtttcagattgctctcaaatatccctgaagcacttttttaaaaaaaattgtggtgaaatatacataaaattcatcattttaaactttttaaactatgattctgaattaatttagaatacttctgatgtataaaatgctatgtaaaatacgattttgctgttggcttctgtattagtttttcattgctgtataacaaattcctgcaaacttagcagtttaaaacagcatacctttgttatctcacagtttctatggatcaggagtccagccacagcttaattgggtcctctgctcagggtctcattgggctacaggccagttgttgactgggtctgtagtcttatcagaagcttaactggggaaagatccactttcaggtttcctccgctggcagaattcatttcctctaagctgtaggactgaggtccccattttcttgctggctgtcagccagggaccacatttagcttctaggagctgcctgtagttggtcccttgccatgtagttctgtccatgagccttctcataacatggcagcttagttctttaaagccagcaagggagagagtcagagagcaaagtttctgactctcagggaaggcctggaccccctttaaaaatatacctgattaagttagggccacccaactcaaaatctactgatttgggaccttaattacatctgcaaaaaccccttcacttttgtcatataatctaatcatgggagtgacatcttggcgcattctgttggttgaaagcaagtctcataggtcccactcacgctcaaagggagtgattacacctccccttggtgagaatgtggagtttgaatacacggggtggggggcattttagagtctgtgtgctatggtttccttttttatccatttcatagggttttttatcagcaattggacaccctttccccaaaatgatttttaatcatggaaggaaaaagagaacttggaattaccttgaatttgaagaagaagaaaataaacagttagcagactcaatggcttctctggcatatctagtatttgtacagggcatccatattgatcagcttccaatggtcttaaggtaagagttagtgtttggtttattcatgtattctaaaaggaatttcataaaattctcatttatctaatgtccaatatatgcatattaacacactaatacattttaaataaatagtaaaggctatttttaataagaatgatcccagctataatctgttaaagatagcagtagacaagtaatgaaagtggggagtgttgaaataggtgtaagggaatggtggggacaagaatcagaagatgataaacagggcttggttttgaagcttttgagaccaccctggaactagccaggtacccaggggtatcatcatcttttcactggattactgctgtaatcctgagtggatttatatatctacttttacttccttttaatttaacacattctcaacataccagaaagcgaagccttaaaagaagtcccttactgaaaaccctccagtggctttttattgctttaagaataaagtcttaatgcctttgcataacttctgagacaaacttgtgcctggtctggtccctgcttaattgacctgattcatctcctaccacctttcctcttgtttactatgctccagtgacacagaccttcttttgtttctagtttaaatgttatgaattttcctatttggcctttgtatatgcttaaaattctctttatccttaaatgtcactttctgaagaaagccttcactcaccacccaatttaggttgaatccttctattataattaccttgaccttgtcttcttttcccacaatgtttattaaaattatttttaaaatatataattttataatgtaatatcttctggactttgagttctatgataataaggattgtgtatttgtcttataggcattgggtatttgtgtgagtttgtgcatttatatatgaatatagctaggagtacattcgtatgtaaatgttgaaatactggctatcatttgcatgttcaccatgtatgaaacattatgctaataactttatatgcattatctcatccttataataagcctgtgaaatagagcattctctcattttacagatgaaaataacaggcttagacaagttaatataccactgaagatctaactactttgtggcataggtgggatgcagatagctctgtctgaccccagagcctatactcttaagcatcacattctatcaccaaaataacttatacagcatatgtatattaacttgctagggctcctgtaaaaaagtgctaccaactggatggttgaaataacagaaatagtttgtctcatagttctggatgctccttctgagggttgtgaaggagaatcttctccatgcctctctcctggcttctggtgatttgctcacaatctttgatggtctttggcttgtagatgcattatcctgttctctgccttcatgttcgtatgctgttctccctgtgtgcttgtgtctgtctccaaactttccttttacataaggacaacagtcatattggattagggcccaccctaataatctcattttaaattgattacctccataaccctatctccaaataaggtcaaattctgaggtactagaggttaggactccaacatatcttttttgggggagatacaattcaacccataacaatatgtatgtgtgtacatatctctgtgtgtgtgtataatatatatatttgttttgtttctattttagcccattgtaccttttgcagtttaatatggggcacattgaagtctttttgcaaaggtaagatcgtttagatggtatctcaaaatgaaatagtagtgttaaaatagtccttgttaagatcagcggagactgccttttctttgctaagctctaattaattaattggttattttataaaacagcgaggcaaataattcacgagagagacagaaatgagtcaaggaggttttacaccaaagtctgttttattttaaacttaagacagtattaagattttgtcttaagggcttttacagtcatctgtttctaaggtttcttctcttactccaaaagttggtaaattaaaacacctctaccccactgcatcctcctccatcttaaggaagggcagtcaataaaagaagttcttccgtatttttccttcatggacacagtctgtgaattgcatcaaaaggaaggaggtgtcttgacttccaccttttataatttagattattgacagtgatgtcattcaattacaacttttctcatttgaggtgctaagcagcaggactttctatttaaaaaaaaaaaaaaaaagccaggcacggtggctcacgcctataatcccagcactttgggagaccaaggcgagaggattgcttgaccccaggagttcgaaaccagtctctctctctacaaaaaatagaaaaaattagccaggagtggtggcgcctgcccgttgtcccagctacttgggaggttgaggtgaaagaatcacctgtgcctgggaggtctgggctgcagtgagcagagatcatgccactgcagtccagcctgggcaacagagtaagaccctgtcgcaaaagaaaaaaaaaaaaaaaaggaaattacagagtaacaggtatacataatttctagacagaaattaaagaatttcacagaactatatgctttgttttctttcactataacatgtaacatgtttaaattatcccctgagatcagttagggctttgcaattatcctctatgaacactagtgacagtttatcagtcccatctcttaccaggtgaaggaagatttgtaacatggcaatgtccaaagcttcagcatacaaggcaggaatttccaagggtctcctggcacaagtagttactaattctgtaaatttgctgtattatgtatgttttaatgattttatattcattacatttagtttctgttattcatacagtgataatatgtattgttttgaatctaagtcctaaattcttgagatttccaaactgcagagtcattgagtctttttttgaataaaaagaattggaaagattttacagaataatcaactggaatatatagcattggttatatcaggtttagttagtttcttagcacttgctgttgaagatctattgttttgaagttaggaaataatccctgagtagatttattttggtcagatttagtggccttagccaaaccgaaagacagatcaaagatggattaaaacttttgatcaagttcttcaacagaatttctccttaatgatatgcattttaaaagtgttaaaatttcagtttttgctgtatttttcataagatgaagtatcattctaaaatagtttacaaattcatgataaattttaatattatttttcagaacagaagagtctgttatctccaaaggattggtaagatgtttgttcccattataacttaaatacatagttatgtcaacaaataacagctgttgacttcactatatatgtatctgcatatattttaatctgtaggagctgctggagaatagtttattgagaatagaagacaatagtctactttaccagtacttagaaatcaagagttttcttactgtacctcaggtaaataaaatatgtattctaatattgaaaatagccctttgcctgttctgaacttaaagtaaggtcttttctgattcctttcccactcttttctctgcaacctttgaaaactctggtgtaatgctgtccagtagaactttgacaatatgaaagccactagccaaactgaacacttgaaatgtgactaaggaactattttttttttttttgaggtgtagtcttgctgtgtcgcccaggttggagtgcagtggtgctatctcagctcactgcaagctccacctcctgggttcattccattctcctgcctcagcctcccgagtagctgggactacaggcgcccgccaccacacccagctaatatttttgtatttatagtagagacggagtttcactgtgttagccaggatggtctcgatctcctgacttcgtgatcagcctgcctcagccccccaaagtgctgggattacaggtgtgagccaccacacccagccggaactaagtttcaaatttaaattttaatttatttaaacacgaatagctattagaggccaccattattgatagcacagcatccagtagaaaagcataactttcttcttttaacactttatttctgtagggatcttggaaaatgaagcttctttatgtttctcataactcaagttctcaggactccatctaaggcatccactgactcattaccagaaagactaatacacattgtgtttttccctcctatggtttattttgcccaatcctctttgttagttatgatatccaaggaaatccttagatttcagtgtgggaactggttttcctaatatttaaatagaaaaacatggtttttgttaacatattgtttgattgtttttaattaataaattatatttctgtagatttgatttcattttcttgccactgtagacataattgaaaattatcgtttgcttttaaaagtacactgtgtgacactctactcaatatcacttaaaaaatcaattgtagttagctttctggaatggaaggcttagggaaaaattaatttacttcacttttaaatctcctaccctcacttctctgaatttttagtatcctattgatgtattatagttgtttgtttgcagtcagtataatctgtttacatctgaattttacatttttttatttccagggcttagtgaaagtaatgacactttgccccattgagacactggtatgtaaatatttggtgactaaagaataatgagttacagtgagaaaatttgacaaataatttaattttctttttaaaaattttaatttgtgaaatttttatttaggaggtacaagtgtggatgtattacatgcataaaatggatagtgatgaagtctgggtaagctttattcattttatataataatattgtttgttccattttagaggaaaaagagtttagctatgcttcagctgtatattaacaagttggattcacaaggcaaatatacattatttaggtatgtatcaagcatggctaattgctaagtgtgtggttgattaaaagtcatgttaatgccatgtaattgttttagggcatagtatgtcggtatgttttacatgtaattcaactctggttggaacccatattataaattctcagtgatggctagagaaagggttaatcaaatatttcagacatactatatatatgtctatattttgtatgactaatagtatatattgcagttcaatcaattggaatactctaaatttgaaatagacttaaaaataattaaactgagattgatgatgctcctgctggaactttatgtatgtcactaatctccattactcacagttcaaattgatggctctggaattacaactttgataggctatgcactatgttaatagtaagagcttactaatactgctctttgaggtggataagattctagcaactctctaagttaaagattggtaaactttctaattaattttctgtgaagagccaaatagtaaatataggttttatgggctatacagtctctgttgcaagtgctcaactttgactttgtattggggatgggtgtgttccagtaaaactttattgataaaattgggcatcaggctggatttgctaaaatgtcttacctgggattggccaatattagtactgttcttttttggcgggtgcagcagtgtgatcatggctcactgcagccttcacccttggccccccagcttcaggtgatcctcccgcttcagcctcccaggtagctgggactacaggtgcatgccatcatgcccagctaatttttttgtggagatggggttttgccatgttgcccaggctggtctcaaactcctgggctcaagcgattcacccacctcagcctcccaaagtgttgagatgacacgcatgagccatcatgcccagccaacactcttgattctatcttttcttgttttctattgatagtaagagcaagtttatgaaatctcaattcttaggtattataccggctttcctgttctgttctatgtgtatctctaccaataaatcccctttttttcttaagctagtcatatctagttttttttttttttttgcaattaagctactctagcactggactactttcacaggaaataatttggggattttttagaccattatgttagtgccctttcttgccatgttaaattattgtaactatgttcataaaaatattcaaattttggtttgatagaaatggcttgttggaagatccagttataaataagtatttaccggccgggtgtggtggctcatgcctgtaatcccagcactttgggaggctgaggcaggcggatcacgaggtcaggagtttgagacaagcctggccaacatggtgaaaccctgtttctactacaaatacaaaaaattagccaggcacggtggcgggcgcctgtaatcacagctactcaggaggctgaggcaggagaatcgcttgaacccgggaggcggaggttgcagtgagccaaaattgtgccactgcactccagcctgggcgacagggcgagactctgtctaaaaaagtaaaataaaataaataagaatttaccatttagtgagagcaataactattacaggtgactttgtaattggttgatgaccttgctaattaccattactgtggggtttttattcctagaagtaacacatggcctctttgaatttgtaaaacttttatcaccatttaattctaatgctgtccaggataatttcacatctattgtaattttgctttcaaggtgcttattgaatacaagtaatcactcaggtgtggaggcttttattattcaaaatatcaaaaatcaaattgacatgtcattaaaggtaagaacatagccaaagtgtcaattaccaatttatttcgtagggtatatttattcatatgtagaatacattaatgtgagttattgctctatctctagtattactattacttaaatattattaaggcatattttttcccctatttctactatgttttaaaaactctgaatttggaaatttagttaactataagtttaaattgtattctttgaggttttggtttttgtttttgttttttttgagacagggtttcacgcctgtcacccagcttggagtgcagtggcatgatctcagctcactgcagcctccacctcctgggctcaagcagttctcccaactcagcctcccgagtaattgggactacaggtgtccaccagtgcgcctggctgaattttgattttgtagagatggagtttcactgtgttgcccaggctcgtcttgaactcctgatctcaagtgatccacccaccttggcctcccaaaatgctgggattacaggtgtgagtcatcactctgggcctctttgagctgatattgtggcttatttttgctttgttatatgcttctcaaaaatgaatggaaacttaagtctcttctgtttctgagtgctcagtaattctaaatggaaaacagagtgaccagtgttctcaaactggcagggttcgttcctggtgtctggaaagtgaatgaaagtacggaaattaaagttaaaaactgtattttaaatgtgcaattcttcatttttgtagtgtcaaggtattagaaaaacacatgaattacatgaattataaagctttctcaatttttcgtttgcttttcagagaacacgtaacaacaaatggtttacaggaccacagttgatttcccttcttgatttggtactttttctcccagagggtgcagaaacagatttactgcaaaactcagataggtgaggtgaccattaccaaagttcacatagtaaattcagaataaaatgtgaaacatctgcttagggaacctaaagtaataaaatgtcttttcctgtgattttatgatctatggctaattcattaagttacataaagatttttcatatttaagtgatttgataatgtgtagaaacaaaattaaaacctcctctttctagatgaatgaccagcactatgatttgatagcttttatgtacccagcattccatagaaatttgcaatgacagcacttgtgacttaaaactaaaaatctgtgtatgtaatttatgtgtttaggttttgttgttttattgttttccaggtcattttttttttcatatagaacatataatttcagtttcagtatactggaatggatattgagaaatggtttaaagcatttaaaaagtaatcttaaaattcagaaagcaagagatgatgctctcaaatattaaagataacaaggctttctttaaacaaggatgataattttcacaattgtatgatttaaacaaatggaaaacagtgataagttattactactcaaaaagatattaatggaaatagtttctattggcaaacctaattataaaaatatgaccaaagttttagcttattgagattgctgttgactatataaaaccatactgtaagtaacatatatttttaattaacaggattatggcttcattaaatttattgaggtatttggttatcaaagataatgaaaatgacaatcaagtaagtgaagtatttgaaaagaaactgtgagtatattcaaaaggcataaggaatgtttcagatattcagtacctaaagccaatatttaatatcttacccagatataaaggccgggaagagtgccaacaattattctgaaacctgaagttaattcccaggagcatttaccaccccacatccagctttcctttccctttccatttcctattgtacgtctgctttcttgctgaaagcacttagtcctgttgggtggataagttgcaggtcctaagtcaactaaccttgtggagctcaacgtacatatggtgtcttgttcagtttcctccacctatagctcatgagctgtataaaatcatctgatattttaatattgcctcatcagacatgacaaattgaagcattttcagcactaaaacagaatttgttaacagcaccttttagatatgtttaggaagttggattttttaaaaatagcacatcattagaagtattcaataaatagagaagtattcaataaatagaaaactatttgagggagatttgtcatacagtaaaattatatttgctttttatcttctctttctaccctgttctgatcattgctttccctatatgtgtcacctctattagctagaactacctgaatcatgtgttgttaattggtttttttttagtaattcatttttatataaagatgccaaagaaaattttttttaaattaggtaaatcgtgatttgggatgaaggtttatgagaaaagtagcagtctctttccttcctgacagatctatagtagattcagtgatttgaacccccgttcatccctcttcagctgaaaatagctatttgccatcattgactagtgcttactctgtatcaggtgctatttttttttaacattttgttgtgaaacttttcaaatgtacagcaaagttgaaagaattttatagtgatcattggtttacccaccacctagagtctatgattctactgtactaacttcatcatgtatctatcactccaccctctgtctatcactccgtcagtctattttttgatgtatttcaaagtaaactgcagacgtcagcatactttctccgaaatatttcagcatgtatttcattacattgattaaatatttgtctgtagtttttctttgaagtaaaatttacataatgaaatgttcaaattttaagtgtatattcactgaattttaactaatacatagatctatattactcaaacccatatcaatatagaacatttccagcatcacaagaggttcctcataccccttcctagttaattctgacctcgttgtgctactcacccctgccagggacaaccactattctgcccaagtgctgtatatcattcattcttcagagagcgtctcgttctcttgcccaggctggattacagtggtacaatcatggctcactgcagcctcgacctcctgggctcaagagatcctcccacctcggcctcccaaagtgctggggtaacttccaggcatgggccaccatggaaaaccaagaaaagtactctttatttttcacttttcatagataatgtaggtgaaaaaagttcattaacttgcacaagggcaaacatctggaaagtggtagaaatagctatgaccccaggcagtggccagaactttctaaatcacaaactaaatcctgattcctgaaggagcttgtgataaaaattgaaaagctacaatataaaattcagcagcagtagaggccctgagacttcaggaaggtggccttagggtagggtatgagtttttatttttttagtaatcaagaaaggctgtacctacttgagagattatctgacttgcctgacaaaaagaaaaggaatcttgttgattaggattgataggtgtgttagatatggaacacagagtaatacaaaggcagcagattggtctctgcttagagagggaagacctgagagcagtttagcattgtgcaatgtctgctatactatccatagataattcctcacttttgtttgtcatgtacattttatggtgaagaaaaggatacagccagcctataggactgcctttttttttttttttttttttccatctcaaagagacagtgtctcactgtattgcccaggctggagtacagtggcagtcatggctcactgctgcctcaaactccccagctcaaacaatcctcccacgtcagcctcccaaagtgctgggattacaggcacttcttttttttcttgagatggagtctcactctgtcgcccaggctggagtgcagtggcacgatctctgctcactgcatcgtccacctcctgggttcaaatgattctcctgcctcagtctcccgagtagctgggactacagccaggcaccaccacaccagctaatttttgtatttttactagagatggggtttcatcatgttgcccaggctggtctcaaacttctgacctcaagtgatcctctctcctcagcctcccaaagtgctgggattacaggtgtgtgccaccacacccagccaacaggcatctctcatttaatggtttttaataatttttctaagggatcaaatattctaaattattgctttataagttaccataagaattataccagggaaattagcaaaaacccagtccaagctggcagcctcacatcttttaggcgcttaaaagcctgtctatcttgaaaacatttctcctgagtgcaatgacaataggtcgtgtcaataactgagaggcaaatatgtctactgtggttaataaaaaatgacacttcctgagtttttggaagattttggttaaagaaaaaacaaaatgggctgggcgtggtggctcacacctgtaatcccagctctttggaaggccaaggcgggcggttcatgaagtcaggagatcaagaccatcctggctaacacagtgaaaccccgtctctactaaaaatacaaacaaaattagccaggcatggtggcgggtgcctatagttccagctactcgggaggctgaggcaggagaatggcgtgaaccgggaggcggagcttgcagtgagccgagatcatgccactgcactccccactgggtgacagagcaagagtctgtctcaaaaaaaaaaaaaaaaaaaagaaagaaaaaaaagaaaaaacaaaatgatggtctggtgatgctgaaatatggggcattttattcaaaaggactcctaccagtacctatttttgagcacttaagtgtgctaagagggtaattagtcagatgaaaagcagacacacagtcagaaatatgaacaggaagattaagaagagaatcacattcaaatacaaagacaacaaagtgattcataattgagtaataatccatttcttttcttgctattttgggttactgtcaactgacttattctcttcgtaagccctccttcctcaccctactatttcatgcctcttgtatctccttggttaagtttcaggcaccttctcttactcttgaatttcatataacttttcttgaatattatagtacaaacatgctcccatctttactggtaaaaccaacttagtttttataccaaatattatctatttaatagatatttaatagagtatctttaaataattattagttgtttcgaattacaataatttattctaatacatatccaataatcatgttatcccttaccttctgtcctgtgtactcatatcctttcccatccatctgtttactcatctttttttctaaaaagtttgtaattatagtatgtagaatgaaagctgggacaagggaaacaatgagatggcaaaggccacaggtaaatatcaggaattttaaaattgaattgcttagtctgtgtgagtgtgcttttcatttaggaaaaaactgtatcttgtataataaatacacatacacaaaattctatataatccatattttgggtgctcatttaagttttggttttttttcaatacttttaagttctgggatacatgtgcagaacgtgcaggtttgttacataggtatacacgtgccatggtggtttgctgtacccatcaactcaccatctatattaggtatttctcctaatacccctcccctagcccccgaaccctgacaggccccggtgtgtgatgttccccatcctgtgtccatgtgttcaaattgttcaactcctacttatgagtgagaacatgtggtgtttggttttctgttcctgtgttagtttgctgagaatgatggtttccagcttcatccgtgtccctgcaaaggacatgaactcatccttttttatggctgcacagtattccatgatatatatgtgccacattttcttaatccagtctatcattgatgggcatttgggttggttccaagtctttgctattgtgaatagtgctgcagtaaacatacatgtgcatgtgtctttatagtagaatgatttataatcttttgggtatatacccagtaatgggattgctgggtcaaatggtatttctggttctagatccttgaggaatcgccacactgtcttccacaatggttgaactaatttagactcccaccaacagtgtaaaagcgttcctatttctccacatcctctccagcatctgttgtttcctgactttttaatgatcgccattctaactggcatgagatggtatctcattgtggttttgatttgcatttctctaatgaccagtgatgagctttttttcatgtttgttggctgcataaatatcttcttttgagaagtgtctgttcatatcctttgcccactttttgatgggtttttttttcttataaatttgtttaagttccttgtagattctggatattagccctttgtcagatggatagattgcaaaaattttctcccattctgtaggttgcctgtttactctgatgatagtttcttttgttgtgcagaagctctttagtttaattagatcccatttgtccattttggcttttgttgccatttcttttggtgttttagtcatgaagtctttgcccatgtctatgtcctgaatggtattgcctaggttttcttctagggtttttatggttttgggtttttatggttttagattttatgtttaagtctttaatccatgtcaagttaatttttgtatagggggtaaggaaggagtccaatttcagttttctgcatatggctagccagttttcccagcaccatttattaaatagggaatcctttccccatttcttgtttttgtcaggtttgtcaaagatcagatggttgtagatgtgtggcgttatttctgaggcctctgttctgttccattgatctatgtatctgttttggtaccagtaccatgctgtcttggttactttagccctgtagtatagtttgaagtcaggtagcatgatgcctccagctttgttctttttgcttaggattgtcctggctatccggacactttttggttctatatgaaatttaaagtagttttttctaattttgtgaagaaagtcagtggtagcttgatggggatagcattgaatctataaattactttgggcggtatggccattttcacaatattgattcttcctaccgatgagcatggaatgtttttccatttgtgtcctctcttatttctttgagtggtggtttgtagttctccttgaagaggtctttcacatcccttgcaagttggattcttaggtattttattctctttgtagcaattgtgaatgggagttcactcatgatttggctctctgtttattattggtgtataggaatgcttgtgatttttgcacattgattttgtatcctgagactttgccaaagttgcttatcagcttaaggagattttgcactgggatgatggggttttctaaatatacaatcacgttatctgcaaacagagacaatttgacctcctttcttcctatttgaatacgctttatttctttctcttgcctgattgccctgagcagaacttccaatactatgttgaataggagtggtgagagagggcatccctgtcttgtgccagttttcaaagggaatgcttccagtttttgcccattcagtatgatattggctgtgggtttgtcataaatagctcttattattttgagatacgttccatcaatacctagtttattgagagtttttagcatgaagggctgttgaattttatccaaggccttttctgcatctgttgagataatcatgtggtttttgtcattggttctgtttatggaatggattacgtttattgatttgtgtatgttgaaccagccttgaatcacagggatgaagccaacttgatcatggtggataagctttttgatgtgctgctatatttggtttgccagtattttattaaggatttttgcattgatgttcatcagggatattggcctgaaattttcttttttttgttgtgtctctgccaggttttggtatcaggatgatgctggcctcataaaatgagttagggaggagtccctctttttctattgtttggaaaagtttcagaaggaatggtaccacctcctctttgtacctctggtagaatgcggctgtgaatctgtctggtcctgggcttttttttttattgtaggctattaattactgcctcaatttcagaacttattattggtctattcagggattcgacttcttcctggtttagtcttgggagggtgtgtatgtccaggaatttatccattttttttctagattttctagttaatttgcatagaggtgtttatagtattctctgatggtagtttgtatttctgtgggatcagtggtgatataccctttatcaatttttattgtgtctatttgattcttctctctttattagtctggctagtggtctgttttgttagtcttttcaaaaaagcagcttctggattcactgattttttttgaagggttttttgcgtctctatctccagttgtgctctgatcttagttgtttcttgtcttctgctagcttttgaatttgtttgcttttgcctctctatttcttttaattgtgatgttaggtcgtcgattttagatctttcccactttctcctttgggcatttagtgctaaaaatttccctctaaacactgctttagctgtgtccaagagattctggtatgttgtgtctttgttcccattggttgcaaagaacttatttatttctgccttaatttcgttatttacccagtagtcattcaggagcaggttgttcagtttccatgtagttctgtggttttgagtgagtttcttaatcctgagttctactttgattgcactgtggtctaagagacagtttgttacaatttctgttcttttgcatttgctgaggagggagtgttttacttccaattatgtggtcaattttagaataagtgctgtgtggtgctgagaagaatgtatcttctgttgatttggggtggagagttctgtagatgtctgttaggtctgcttggtccagagctgagttgaaatcctgaatatcgttgttaattttctgtcttgttgatctgtctgatattgacagtggagtcttaaagtctcccactattattgtgtgggagtctaagtctctgtaggtctctaagagcttgctttatgaatctgggtgtttctgtattggctttatatatatttaagatagttagctcttcttgttgcattgatccctttaccattatgtaatgcccttctttgtcttttttgatctttgatggtttaaagtctgttttatcagacactaggactgcaacctctgctttttttttttctttccgtttgcttggtaaataatccttcatccctttattttgagcctatgtgtgtcttttcacatgagatgggtctcctgaatacagcacactgatgggtcttgactctttattcaatttgccagtctgtgctttttaattggggcatttagcccatttacatttaaagttaatatcgttatctgtgaatttgatcctgtcattatgctagctggttattttgccaattagttatgcagtttcttcatagtgtcgatggtctttacattttgggttgttcttgcagtagctggtactggtttttcctttccatatttagtgcttccttcaggagctcttgtaaggcaggcctggtggtgacaaaaatctctcagcatttccttgtctgtaaaggattttatttctccttcacttatgaagcttaatctggctggatatgaaattctgggttgaaaattcttttttttaagatattggcccccactgtcttctggcttctagggtttctgcagagagaaccgctgttagtctgatgggcttcccgttgtgggtaacccagcctttctctctggctgcacttaacattttttccttcatttcaaccttggtgaatctgatgattatgtgtcttggggttgctcttcccgaggagtatctttgtggtgttctctgtattttctgaatttgactgttggcctgtcttcctaggttgggaagttctcctggataataccctgaagtgtgttttccaccttggttccattgtccccatcactttcaggtacaccagtcaaacataggtttggtcttttcacatagtcccatatttcttggaagctttgttcattccttttcattctttttttctctaatcttgtcttcacactttatttcattaagttgatcttcaatctctgatattctttcttccacttgatcgattcagctattgatacttgcatatgcttcacgaagttcttgtgctgtgtttttcagctccatcaggtcatttatgttcttctctaaactgcttattctagttggcaattactctaaccttttatcaaggttcttagctccttgcattgggttagaacatgctcctttagcttggaggagtttgttattactcaacttctgaagcctacttctgtcagttcatcaaactcattctctgtccagttttgttcccttgctggcaaggagttgtgatcctttggagaagaggtgttcgtgtgcttggaattttcagcccttttccgctgctttttcctcgtcttcgtggatttctacctttggtctttgctgttggtgacctttgggtggagtttttgcttgggtcatcctttttgttgacgttaatgctattgctttgtgtttgttagttttccttctaacagtcaggcccctcttctgcaggtctgctgcagtttgctgggggtccactccagaccctgtttgcccgggtatcaccattggaggctgcagaacagcaaagattgctgcctgctccttcctctggaagcttcatcccagaggggcacccgccagatgccagccggagctctcctgtatgaggtggctgttgacccctgctgggaggtgtctccctatcaggaagcacgaggggtcagggacccatttgaggaagcagtctgtcccttagcagagctcaagcgctgtgctgagagatctgctgctctcttcagagctggcaggcaggaatgtttgtctgctgaagctgcacccacagccaccctttccccaaggtgctctgtcccagggagatggaagttttatctataagcccctgactggagctgctgcctttctttcagagatgccctgcccagagagaggaggaatctagagcttaagttttttttcaatttccatttctatttaagattcaggggtgcaggtttggtacaggggcatattgtgtaagttgtttctttctctaagataaaacatatccatgaaatatttgcagagccggatgacttctatatgaattagaagaaaggggaaacctgggtcttgttcatggctttttatttcttcattaccatcactgactgtattctttgcagggttcctgactgttctggcaataaatttcattgtagtgtagaactgcctagtcttccttttgtgagagagatatgctacagtgaattttgaaatgtatagttttaagccttagaactggaaatcagtaagcctccttgggtatgaaattaaaagcaggtatttgtgaacatttcaaatttttaattataactattttaaaactcttaatttactttttctagacactgaaagattttaagaaatcttaaaatgtgattttctttgtagtatttattatttctttaaaaacgatctggtaaccttgagagaaaaaatattcttattctcacagcttcttcactcctacatgcttctaaaaatattacagtttatcatctgaaaaatttgtggaattatgctgaacagaatatgtaaaaaatttctttaggctacttttggcatgtgtttttattacctgaagttttatgattatgggctattgccattgaaaacagctaaggttttaacattcaaagatctagatttgcactgtccaatacagtagacagtagacacatgtgactatttaaatttatattaatttttttttccttttgagttggggtctcactctatagcccaggctggagtgcagtggcgcaatcacggcacattgcaataacaacctcctgtactcaggtgatcctcccatctgggattacaggcatgagctactgcgctgggccagtactctttattaatatgtgattatttccatttgagaaatttgaaacattaaaagaaaacgtttggttagagatacatttgctttttaaagtcctgatttagtaatttggttaaaatttttggctgaagagaattagtgaagcttaattgtatatttgtaccaatgaatgattataaaactttatcactgtaatcccagcactttgggaggctgaggcgggcagatcacctgaggttaggagttagagaccagccagtccaacatggcgaaaccccatctctactaaaactacaaaaaaattagctgggcatggtggcagacgcttataatcccagctactctggaggctgaggcaggagaattgcttgaacccagtaggtggaggctgcagtgagctcagatcatgcctctgcactccagcctgggcaacagagcaagaagacaccatcttaaaaaaaaaaaaaaaagttttgggaatcagatttaaaagaatttccattacaaagtaaaactgaaaggatgaaagaaaaaaattttcaacttagaacttctacaagaggaaagtttttcatggatacaaattctttggttatatttttgcaaatattccagtctgtggcttgtgttttaatagtatttttcaaagaacagaaattttaatatttatggagtccaacttatcaattttattcttttatgattcattatttatgggttctaagaagtctttgttaacccagatcacaaaggtaatttcttgtagaaattgtatagttttaggttttacacttaggtcaatgaccccatttcaagtaaactttttatgatatgagatatgggttgagagatttttttttcttttattttgacctcaacactatttgtagaaaaggttatccttaatttactgaattatcttggcaactttatcaaaaatcattttataagtatgggtctatttttggactctattccatttacctgtatctattcttttaccaataccacactgtcttgattcctttataggaagaaattattctgttttattcctttataggaagtcttgacctcaagtaatgtgagtctgccaactttgttcttctttttcaaaattgtattggctatttttaaatcctttaccttttctgtataaattttagaattttgtcaatttctgccacaaagagttttaattccacttatggcattctggaaaaggcaaaaattaccttaacaaaaatcagattgctggttgctggaggtgggaggaaactgactacaaaggggcacaaagaaatttctgggtcatgggaatatctttacagcagcagtggttacatgactttatatcactatatatctttgtcaaagctcagaattgtatagctagaaggttatattttactgtatgtaaacaatatctcaacaaacctgactttgaaaaataataaaaagaaaagaactaggctcaatagtgaattagactgaaattacctcatgaacaggcaagcacactgattatgtaaaaatctttctgatgtttacttttgaattgtttattctccatttttctacattaaagtattaagattaaatgtgttatatggaaaggatttgagggaaaacttttatttcaactatataaataaacgtgtgagttgtgatgtaaaacctagtttttactgagagtcatggcaaaaataatttgaaaaacagtatcctagaaaaacttttaccccgtgtgaatgggaaaacatacagcaatgtaaatgctgcattattttgaaatactaaaaacttaggataaattccatataatggaatgcttatgcaccaattaaaattagagctacaacacaaataactctcaaaaacataagattgacaaagaaaaaggaagctgaagcaggttatatacagtataccatttatgtgcttttaaacatgaaaaattatattgtttaagtgatacattaggaatgcaaaacattcaagttttagataatggctacctcttgaataaaggggatttcagccatatctagtatttattttttaaaagtaaatatgataaaatgtttccttttgtcaaaggtttccttttgtcaaagctaggtgttttccctatactctttatgttcaaatgtgctttagtgggtaacagagagtcatcagtaacctagtcttgaaagccatcagttgcagtgggttctgcctataaacccagaggtgaatgcaaagtaaaaagaaaaaaaaaaagttggggggcagggaataaatggtgaagaaaaggctggacgtaaaaaggaataaaagcctgttatttgcagcaacgtggatggacctacatgtcattacattgaaatatgccaggcccagaaagacagtatcacatattctcacatgtgtgagctaacaaacttgatctcgtggatacagaatatagaatgattgattgataccagagtgtgagcatgggaggaggaaatgtagagcaactggtgaatgggtacaaaaagagttagataaaagacaagctgtattgcttgatagcacattacagtgactataattagcaacaatatattgtatatttcaatgtagctaggagagaggacaggaaatgttaccaacccatagaaatgatgaatactcaagaggatggataccccaaatactctgacattattatacattttatacgtgtaacaaatacatgtacccataaatatgtaaaatatcatgtatcagtaaaagaaaaaggctggatagagagaggtaaaaataggagaaatgagagcagtcagtgcacataagagtaatatgcttgttatactgtgtggctacactggttaaggaaattcctgctgcatataacccaaatttgccattagaggttaagaaaactttccacttaacaatttaaaaattatacaactaaaacatccattatttaaaaatcaacataaagaagcaaaaaaaaaaaaaaaagaatagtaatcaaaattacaccgttgttgatatactgtattcccttctaggttttgggttaatacgtctgtacattttttcttttttaaaaagaaaatgagatcatactaaaagaatcacactgttttataaccttttttcccattcaccaatatgtactgaaaaacagtattttaatggctgtatagtttttccattatgttaatatgtcataatttactatgaatctcctgttgagttattttaattctaatgtttcactaaacatttttaaaaaacatctgcagtagaatcataacatacatctttatttccccaagataagttgatagatgctaagtgaaaaggtatgcatatttttgagggttttagatcctctctagtattctacttttcctattagtataggataaataagacaagatgactgaaatgaaaaggataggtgtgagacattaatattatcaattattcagcatagacatgtgtagattttatttggaatgctgcaagtaacatgtactacttgggtcaaaataagctcattacaaaataggttatcaagtagttcattattctagttaagaataaattgggtccctacgtttccctttttgacctaagacattttcctttgtaaagagtacttggaaactggaagtaccaatggattttcttttctctattttttaaaataaagacttcatgagtcctctccattagtactgtaagagaaaatgctcttggaataaactctaagatacatgacaaaataagctgccctcaacagataaaatcttcacctactttggtcaccagggaggttcaaattagccgggtattagaaaagtttccatcagtaggaaagggaaagcatcctctagaactagatccgtggtgtggatatcaattgaaaggccatacttgggatgaaggcataaataaggtagagtcattgtggagatggctcatagaggaagagacgtctgtgaatttatcctcaaataattttctcataaataaaacttaacaagttaatagatctcaaaacctggagctatccaaatggtgcagtgataagcgtagtgccccaagtacatttttcttttaattggtattcacataactagctatagtaataattattaaatagtgaagtccattgtgaaaagcaagggccatgtttcatttatttttgttttttgagcttttatcgcgtttaatagtaggcaatcaatcattgttgaactaaataactcattctttcattcttaacagactggattatggacagaacttggaaatattgagaataatttcttaaagccacttcatataggacttaatatgtcaaaagcacattatgaagcagaaattaaaaatagccaaggttggtaatgtgcaattttgttttcaattaggtctaaaaagtagtctaattttggaactgtcatattcaaatttaagaactttttaaaaatcttgtactttagagaccataacagctaagccattttatttatagttaaaattcttagcagatctataagctaatttacctaaaatcgggttaatgaagacttaaaccaaatattacattgtaaagcctcaaggtctgattaagaatctgtattacagctatttccgtttgggtaccattcctttggtattgctgggtccactctccatctcactctcaagtaaatccatacaaattatgaaaagaatcttagatccagaatttttttaagtcaataattctataataatcgtgtgatctcttccgtatatctgtggtggtgcttttataggcattaccggaaattttgtttttagtataatggctataattctgattatatactgaagaaaacagtttcatgaatcctatacatgccaaaataatgctatttatctaaagaagcattaatttacatgttgcagaattttgatatttcattctgtttgcttatagcttaagtataccctgagctgttaaacaatggacttaataatttatacaaataactgacatgttttaagttagtgaatgaaagtagcttatacctttgttattgaaatctgagagttaagtgtcacacatgatttttcttctcttacagaggcccagaaatctaaagatctttgttctataactgtaagtggagaagagatccctaatatgcctcctgaaatgcagcttaaggtgatctgaaattttcttttctttcctttttcttctttagaaacggggtcttgctatcttgcccaagctggagtgcagtggcatgattgtggctcactgcagcttcaactccctgggctcaagtgatccacccacctcagattcctgattagccaggactgcaggtgcacaccaccatgcctggctaatttttagtagagatagggtctcactatgttgctcaggctggtctccaactcctggcctctagtaatcctctcagctcagcctcccaaagcacaggaattacaggtgcaaaccactgtacctggtcttaaatattcctaagctacctccagctgaaatcttttctgtgttttgctttgttttgctttaaaggcagcattaataacattactttttcttggcattgcaggtcctgcattcagctcttttcacatttgatttgattgaaagtgttctagctcgagtggaagaactcattgaaataaaaacaaagtctacctctgaagaaaatattgggataaagtgaaagttccatttcctaaataaaaactaataaaatatagtactttccattatgattcatttaatacctttataaaaaatttttctgtaaaaatttactgcttgaaaaataaatgtagcttttctcattta

SEQ ID NO: 1193 - DNA, 109739 bp, Homo sapiens
ctctcccggaggggactcctcccaccgccgagttttcccgagaatgaggccgcgcccactgacgcgctgtggttccaaaacgagaaagtactgaagggtaagaagcataggtagattattatatgaaatcctctgatttcagttttctgggctttaatacagcagcaaaatgttctcggtcctgagttccagaattttgggaaaataaaattctgtactgcctggatttcagtatcgactgccatcattatgcatttctgagaccgctaaaggttattacagaacttttttttttggcttatatttcacagtggatggaaactgtcttaaacctcagaaactctgatgaaagaccaaacctggggatggttgcacaactctgaacatttactaattttaaaaaaacagccgggcacggtggctcatgcctgtaatcccaaacctttgggaggccaaggcgggcagatcacttgaggtcaggagttcgagaccagcctggccagcatggtgaaacccccatctctactaaaaatacaaagattagccgggcgtggtggcacacgctacttgggaggctgagacacgaggatcgcttgagcccaggaggtggaggttgcagtgaaccgagatcgcgccactgcactccagcctgggcaacagaacaagactccgtctgaaaaaaaaaaaaaaaaaaaaatttggttgtacacgtaaaacagatggatattgtggtatgcaaagctgtttaaaaaaaaaaaaaaaaacaactaatgaaaagtgccaaagttaatcagtgttgaatttttttcatgaacctcaagtgcttagggtttcgtatgagagaggccaaaccgaaagatctgtgtattctgtaggtcaaagaacaacacacatgaaactccgagcttctggagtcttccttggtatttgggagagttggtgtgattcaggttagtcagactactgccatgtttgcataaatttcaaccttcattttggctgtggataatttcatccgttggattctgtttacagataggattagttcaaatgtataaatttgtgttggtggtttacctgtaaaatgagggggttgaaagtatttttccaccttttgacattctgttttttattatttttttaatctccgtggattccagacattgtttttctagaaaagtggaaataacatcattttagaagtcattcattcattcgctcattcaaaaagcacgtattgaattattgaacatctgttacaccccaggcagcctcctggacactgggtcaatgcattattagctagagttaggagacttaatacctgattctccttgatagctgtctgtgtaccgttgtgaaatcacctactcagatgagccagaactttgtcctgtgcaaactggaatatgatataataatcttacagtctattgtggagaccaagtcacctaagaaaatgtgagagcattttgtaaaatgcagaatattgtacatatatgaataattactatagcctgagtccaagagtgccttagttttaatcaggagcctgcactatttgtaatttagagacttctttttctggcattttatgacttcttcagtcccttggtcctgtgttccaggtgactcgtagtgagaaaaattagttgttaatctttttttttttttgatacagagtctcactgtcgctcaggttggagtgcagtggcacgatgccggctcactgccacctccgtctcccgggttcaagcgattctcctgcctcagcctccggagtagctgggattacaggcgtgcgccaccacgcccagctaattttgtatatttagtagagacggggtttcaccatgttagccagggtgatctcgaactcccgacctcaggtaatccgcccgcctccgtctcccaaggtgccgggattacaggcgtgagccaccgcgcctggcccccaaattagctgttaatctaaaccactgaatcttaacctcagttttgagtaggataactccatgggcagagaaagctaagtagtgcctttaaatttttttgccaataactgacgcactaacgttgtggcttcactctgccctaaaatgggatggcgcatagtgttaggcgcatgctccttgatgcactgcggcgcggcgctccgaggctcggggacgcgcacgcaattcgctgttgttggctgacttccggtggtgccaaagccgtttccgtggaatcaggccggctggtgagggtacaggtttgtgtgtggtggggtgggaagaggcaggtgggagctgggacacctggacgaacgatgtccaggttgagaaggtcgggtctgagggtgggcgctgggtgcgtggcggaagttaagggcgtgaagtccagtgtctagttgggaatggggactggagccagccctgggcaccgaggtggaagcgcggttaggaccccttttgaaaatgttttcctaggagagggccgtgccggggctgcctccacattggcattcattcaccctgctggtccgacttgggttcccaaaaaagtggattctgtcgagctactgctgtgtttgaggtgcctggagctgaagtagctgtctttctttccttctttttctttctttctttttctttttttcccctttttttgatctcagtaattatctgtgaaataaaagagctgccctggctactcccattctatttcttataaggtcaccaccatctctcacaggaatcaacgaaatcttcatgttttattgagctttagttactgagttttaattacatcagttgattgaggggatggagaatctcccctaatgtcttggagaaacagaagggaggtttaaaactaactgtaggtcgggcgcggtggctcacgcctctaatcctagcactttgggaggctggggcgggaggatcgcttgaggccaggagtttgagaccagcctgggtaacaaatcgagaccccgtctctacaaaaaaaaaaaaagaaaaaaagtcgttgagggtggtggcaagtgccttgtagtcctagctactcgggaggccgaggccagagggtcactggagcccaggagtctgaggctgcagtgaactaggatcttgccactgcactccggtctgggcaacagagcgagaccttgtctctggaaagaaagagagagagagagaaagaaagaaaagaagaaagagaaatctaaccttagacgcttagagttacaaataacttttatttttcagttctctagttcaggctttcatctagtactctgataagtggacattcaggcttcgcttgaacattgccagtgatctaacacaaggcggcttattctattattggatctatttatgacagtaaagttttcctgggtaataagatgccttttttttttttttttttttttttttttgacagagtctccctctgttgcccagggtggagtgcagtggcatgatcttggcccactgcaacctccacctcccgggttcaagcgattctcctgcctcagcctcccaagaagctgggactacaggtgcccaccaccatgcccggctaatttttgtattttttagtagagacagcgtttcaccatattgaccaggctggtctcgaactcctgaccttgttatccgcccgccttggcctcccagagtgttgggattacaggcgtgagccactgcaccaagccactatcagtttttatataatgcttaacatttggcccaaatgctgcacagaataagttgtttaacctctgtttcatttattattcagggagcattcattgagtatctacaatattcagtgacacattgagtatcaatactcagtgatacattgagtatctacaatacccaaatactgaactggtgcagtggcttggatgggaccgtaatcccaatgacttgggaggctgaggtgggagcattgcttgagcccaggaggtcgaggctgcagcgaactatgttcgtgccactgcagtgcagcctgggtgacagagcaagaccttgtttcaaaaaaaaaaacccagatactgctggatattagggatatgagttgaaataatcccatttctcgaaaagctgatagttttggaggaaggagatgagaaagagaaagatgagagaccattacaaaactgataagtaccgtaaaagaggtttacaaacagatactaaaagaacatagaggataccctctggtttaggtcagtaatgcccttaaaatgtgataactagaattgaagcaaaaagccaagaagtaacatagcgcagaggatagtaggactcttatcttccttgtttcgacacaaagtttgttgttaatgtagcctaacctttttttttttttttgagatggagtttcgctcttgttgcccaggctggagtgcaatggggagtgatctcggctcactgcaacctctgtctccgggttcaagtgattgtcctgcctcagcctctggagtagctgggatcacaggcgtgtgccaccacgcccggctaattttgtatttttagtagagacagggtttctccatgttgatcaggctggtctcgaactcctgacctcaggtaatctgcccaccttggcctcccaaagtgttgggattacggacgtgagccatctcgtgcccagccaacatagcctaaccttttaaacaatcacactttgcttttgatttgtttctattaatggaaatacctgtttatgaaaacagcaatagcaaacatgtattgatcatttaccatctaatgaagtagatgctattatattccattttatagctgaagacactgagattcaggttgagtaacttccacaaggtcataaagctggagagaaggtgacttgggaaacatccagacagtctgattccacagtttactctcagcatcatgctagtctaccaccctgatggtaataataacaatgtttgctggacgcggtggctcacgcctgtaatcccagcactttgggaggccgaggcgggtggatctcaaggtcaggagttcgagaccatcctggctaacacggtgaaaccccatctctactaaaaatacaaaaaaaattagccaggcgtaggtggtgcacgcctgtagtcccagctattcaggaggctgaggcaggagaatggcgtaaaacgcgagaggcggaggttgcagtgaaccgagattgcgccactgtactccagcctgggagacagagtgagactctgtctcaaaaacaaaaacaaaaacaaaaaaacacaaaaataaacccacagtgtttattaatcacttactctttaattgtaacaattctatgaagtaagagcaattattttttactgttgagggtactgaagacttgcgaggttaaatcacttggcctaggtaacagtagtccatcagtagtaatcagtagagttgagatttgaactcagtcacttaaccactgtctctcaacttccacctaaagggaaattgtgcatttggtgtgaagtattgtgttcatgatcgaacatgaataaatgaaaagataattgagtaaatgttattacttttaattaatatgaaggcagtaagaactttttattctttcagaatggaacaaaagtgggacttttaaaatgttgccctgtaagaagagaagaactacagtgacagagtccctacagcataaaggcaatcaagaggaaaacaacgtagacctagaatcagccgttaaaccagaatctgaccaggttaaggacttgagttcggtgtcactatcctgggatccaagtcatggcagagtagctggcttcgaagtacagtctttgcaggatgcaggaaatcagcttggtatggaggatacatctctgagctctggaatgctcacccagaacacaaatgtaccaattctagaaggtgttgatgtggccatctctcagggaatcaccctaccttccttggagtcttttcacccccttaatatacacattggtaaaggaaaactccacgctactggctcaaagagagggaaaaaaatgacactcaggcctgggccagttacccaagaagacagatgtgatcatcttaccctaaaggagcctttttcaggagagcctagtgaagaagtcaaggaagaaggaggtaaggtatacaaggtctctaggttacattcttgtcaataccactttgccattgctatttctggatacctttacagagtagtatttctgaaaggggatattgatttggtacggaattggaactgctgtgttgctaagggtcaacagtgaactttttttttttcttgagacggagtcttgccatgtcaccagactagagtgcaatggtgggatcttgactcactgcagcctccacctcctgggttcaagcgattctcctgcctcagtctctcaagtatctaggattacaggcatgcgccaccacgccaggctaattttgtatttttaccagagacggggtttcaccatgttggtcaagctggtctcgaactcctgacctcaggtgatacgtttgccttggcctcccaaagtgctgggattacaggtgtgagccaccgtgcctggccagcagtgaactttatgaatggatatagactttcttttcccctcccattcgctatatccacttctgtacccctttcttctttcttttttgagacggagtctcgctctgtcacccaggccagggtgcagtggcgtggtctcggctcactgcaagctccgcctcccaggttcacgccattctcctgcctcagcctcccgagtagctgggactacaggcacccaccaccatgcccggccaattttttttgtatttttagtagaggcggggtttcactgtgttagccaggatggtctcagtctcctgacctcgtgatccgcccgccttggcctcccaaagtgctggattacaagcgtgagccactgcacccagccattgtatccctttcattccattctctcatcctttatttggtgtgtctggagatgtgtatggtcttttgtgattgggcagcagcttaaagggggagactactgcctgggacactgggaaaggctctactgagatgaatgacccttccaatttgaaagatgaattgcggtttaacagaaagtggtatgggcacataggccaagaacagtgcacagagatagactggcagaaaaggatggtgacatggttgcttggaacaggtggtgggagatgacttcttttttttttttttttttttttgtgacagtctcgctctgttgcccaggctggagtgcagtggtgtgatcttggctcactgcaacctccacctcccatgttcaagtgattcccctgcttcagcctcgcgagtagctgggattacaggtgcctgccaccacgtccagctaatttttttatttttattagagaggaggtttccccatgttggccaggctggtctcaaactcctgacctcaggtgatccacgtaccttggcctcccaaagtgctgggattacaggcgtgagccaccacgccctgccaagatgactttagagtagtagattgtactaaggttgtgaaaggttttgtttttcataccaaggcatttgagcttttcctgtaggtaggtgatagtcatttaaacgtctaagtagaacacatttatgctttagaaaagataccaacttctcttattcattttttttttgatacggagtctcgctttgtcgcccaggctggagtacagtggcgtgatctcagctcactgcaacctccacctcccctgttcaagtgattctcctgcctcagcctcctgagtagctggtattacaggcgcccgccaccgtgctcagctaatttttgtatttttagtggagatggggtttcaccaggttagccagcttggtcctgaactcctgacctcaggtaacccacctgcctcagcctcccaaagtgctgggattacaggcgtgagccactgcgcccggcctagattgtgaaggtttttgtttttcatactaaggcatttgagcttttcctgtaggtaggtgatagtcattttttttttttgagacgtagtctggctctgtcgcccaggctggagtgcagtggcgcagtcttggctcactgcaagctctgcctcctgggttcatgccattctcctgcctcagcctcccgagtagctgggactacaggtgtctgccaccatgcccagctaattttttgtatttttagtagagacggggttttaccgtgttagccaggatagtgtcaatttcatgacctcgtgatccacctgcctcgtcctcccaaagtgctgggattacaggcgtgtgccaccgcgcccggccctttttttttttttttttttgaggtggagtctcgctctgttgccaggctggagtgcagtggcacgatctcatctcactgcaacctccgcctcccaggttcaagcaattctgcctcagcctcccaagtagctaggactacaggcacacgctgccacgctcagctaattttttttttttttgtattttagttgagacagggtttcaccatgctggccacgctggtctcgaactcctgacctcgtgatccaccgacctcggcctcccaaagtgctaggattacaggcgtgaaccactgcacccggcctattcattcattttgactgttaagatgttttcttttttgccgcattttaagtccacttgttcttattttgtcctactggtacattctcagtatgtggttttttattgtgtcttgtgtgtgtttatattgaagaatttcatgtttctgactctgctgtatttgaaaactgatggagtgcccaagatgagggagtttagcaataatcttgatggtatactgtgttggtcacgccctctctggcatgagctgcctgaagcacattgtcaaagatgaaagctcttttggggaaaagtgctctcctgtggaatcatcccttgtcatagcatgtggctctaaattttcagcctcattcacagtagcttgcattgttgtattgcttttgggacacctgtgttttatctggaaatgtagacaggaatagcggttttttttgtatgtgtattatatattgtttcactgctaatcttctacacaattttttagaataaaaaagggtaaatagcttgtgccattttgctaattacatagatttgacttttgatcacataaataaaaaataaaacaaggcaggacattgtcctgcacatagttgatgtggacaaatactttttattactttgaaattcttattttgatagttttccacttaatgaggcaagtgcttaagcctcagtctttttgagttctcattatttagacataaggaaaggagaaatgaaggtttttctttattctccccatgcctttcctttttttctcttttattctttttttttttttttaagagcagaatatactagatcaggacaaattaaggtgatactggaatttaggtgtttttactggaaaaaaggcatttcctttgagatagtttaaagaaaatagtaaggagataagaatcagttcaactactaattcaggaagccgggagagatgtacattcaaagcataggacagaatcaagttttctttcttttttttttttttttttttttgagacggagtctcgttctgttgcccaggctggagggcagtggtgcgatcttgactcactgcaacctccgcctcatgggttcaagcaattctcctgccgtagcctcccgagtagctgggattacaggcacccaccaccacacccggctaatttttgtatttttagtagagacggggtttcaccatgttggtcaggctggttttgaactaccttttttttttttttttttttgagacagagtctttctctgtcagccaggttggagtgcagtggcacaatctcggctcattgcaagcttcacctcctgggttcacgccattctcctgcctcagcctcccgagtagctgggactacaggcgcccgccaccacgcttggctaattttttgtatttttagtagaggcagggtttcaccatgttagtcaggatggtctcgatctcctaacgtcgtgatctgcctgcctcggcctcccaagtgctgggattacaggtgtgagccaccgtgcccagccctgctggttttgaatttctgacctcaaatgaccacccgcctcagcctcccaaagtgctgggattacaggcgtgagccacagtgcccagccccttttttttttttttttttttttttttttgagatggagtctctgttgtttaggctggagggcagtggcatgattttggctcactgcaacctctgcttcccgggttcaagcgattctcctgcctcagcctcccaagtagctgggattacaggtgtgcatcaccaggcctagctaattttttgtatcttagtagagatgggatctcatcaggttggccagcctggtctcgaactcctgacttcaggtgatccgcctgcctcggcctcccaaagtgctgggattacaggcgtgagccaccgcgcccgacctacaattccgtagttttagtaaaccattgcagtaacctacaaaacacattttgatgtttaacttttatctctcagatttttttttgtctgaaaatgacaaagaaatcctttgttctgagttttggtttaaaacataatctctatctgtgtgacatttaaaagaagcagaagacatagttctaacctcaggaagtttagaatcttaattgggaaaacaaccataaatatatactttttggaattggagcttgaaggattcacaggatttgatagattgtgagggaagaagtggaagtagaataacatattctgcaaacatgtagaaatgctgtgtttgtgtgggaaagtactaaggcttcaggtagaaagagtagatccagattatggagagccttgaagctttccccttaagaccttaagatttagaataggatgctggcagtaagggtagagaagaatgggtacaccatagacacattacaaagaaatgattaacactgctcagagactgacatgtaagatatctggggtaggggatggtgatgcatgccttcatagggaaggtatttgagagtttgaatatgagttcagatttgggtatgagttatgcaggtgaaccccaaaattggggctcagcccaggggggttcttggctttgtgcaagattcatttgcaagccaatagagaaaaaggaaagcaagtttattagagcagcagagtacaggaaatggctgccccatagacacagcaatagcagcagcccttgtgaatagatagctattccttgattatatactaaataagggcaggttattcatcaattttctagaaaaggggcagggagttcccagaaccaagagatcctcccattttaaaccatataaggtaacttctaggggttgccatggcatttgtaaactgtcatggcagtggtgggacttttcttctttgtatgtatgtatgtatatatttatttattgtttatttattttgagacagagtctcactctgttccccaggctggagtgtagtggcacgatcttggctcaccgcaacccccgcctcctgggttcaagggattctcctaccccagcctttcgagtacctgggactacaggcatgcaccaccacactcagctaattttttttgttttttgttgttttgagatggagtctcgctctgttgcccaggctggagtgcagtggcgccatctcagttcactgcaaccaccacctcctgggttcaagcgattctcctgccccagcttcctgagtagctggggttataggtacccgctaccatgcctggctaatttttgtatttttagtagagacggggtttcaccatgttggtcaggctggtctcaaactcctgacctcatgatctgccctcctcagcctcttaaagtgctggaattacaggcttgagtcactgcacctggctttttttgtatttttaattgagatgcgtttttgccatgttggccaggctggtcttgaactcctgacctcaggtgatcatctgcccgcctcagcctcccaaagtgctgggattacaggcatgagccaccatgcccagcctgtttttattttttaaaaccaatccatttaattgtgtctttcaaggtaaacaatttatggagcctggatcccaagcctgagagtgctagagctatgggtccaaaacttgtggtattctgagttcagaagggttcgaactcacggtgttcaactcacggagtcagagaacatgcggaatttgtgtattccatttagcaattttgtaaattaccagaaacagactgaaagagtctttcaagatggggaaaattcaactcctgtgttttttttgtttttttgtttttgagacagagtttcactcttgtttcccaggccgtagtgcaatggcacaacctcaatggcccctgctcggttgaagcgattcttctgcctcagcctcctgagtagctgggactacagccgtgtgccaccatgccaagctaatttttgtatttttagtagagatggggtttcaccatgttggccaggctgtctcgaactcctgacctcaagtcatccacccacctcggcctcccaaagtactgggattacaggcgtgagctaccgtgcctggcccaggacagctttttaacaagcagttaaagtggaaaagaaccccccagtagcacgctggtttagtttataagattttagtttacaaattaaaaaatctatatgttttacattttctctttatatcacttttttcctttatctttctctttgtcgtcttttgtatccttttttgctctcttctttttcctatctttttttttttttttggtgacagagtcttgctctgtcacccaggctggagtgcagtggcgcgatctcggctccctgcaagctccgcctcccgggttcacgccattctcctgcctcagcctcccgagtagctaggaatacaggtgcccgccaccacacccggctaatttttttgtatttttagtagagacggggtttcactgtgttagacaggctggtctcgatctcctgaccttgtgatccgcccgcctcggcctcccaaagtgctgagattacaggcgtgagccaccgcgcctggccggtttctttttcctgtctttcttctctgcatcccagttggcaatcttgttgatgaggttgtgtagggtgatcacagaatggatcagcgaggccaagtacactgctaccatttggttattggtcttcaggtaaaaggccttgacaaactcctataggctaatgactggcagcagcttgaagacctgcagctgatagatgaattggtggttggtggacagtttgcctgtggcaactttttccaggtagcttctggtacccagaagcttggagttcagtcccttcaaatccaggacctggtttgtgatacactgggaaagagtgcccactgtagtgtctttgatgtcttgtaacaagtgtttaactccaatttccttagcttcctctgctgcagtttcactggtcacatgctcaaatgttttcaaggctgaagttccatcttcatagacttctactgaaatatatgcttctgtaggcagccctaagtcctttggcttcatgtcactagtgaccaatactgagttacggcagtatcttttcatgatttcattgaaggcagtgtcattcttgtgtagtttagggcctatgtggtaccactcaactattctttccctggcattcaccctcttaaacattctgtatgtgtttttcaaataatcgtgggctaaaaaacaattatctttgtcatcttcattaaaagggactgtaaaactgctggatacatcaagtactttcatttgccatgaccgcaaaagcacatgaagaatgcatttctggtttccaaccttgctgattctgttgaaatgatccaccacattgagcagtacctgggggtggactaccaccttctgcaccaccaggtccagcctcatgatacactctggccaccaggcctggctccctgtgacccactggagtttcttttagcatgcaaattcattataattagtgtataataagcagtgagagcaaccgaatgtcacttttgttgccatcttggttgtaactggttttggctgctttctttgctgcatcctgttttgatcagggttttgttcttgttttgttcagcaggctctctggccagtgcttggaaaacaaatcctgcttctctcctacctcactccccccacagagattatatactccccttcaatcttacagggttttagaagggtggaagtccatcttctgtgactgcttcctgttgattttatgggcattggccctgcctagcactggaggagtaaaaatctcttgatgcctcatctaaggggtcagaacaaggatgtgttggaagccacttgctagcattatcttcacatggaaattgttgcaatctagaagacacacactacaaggaggctaaaagaggcagggccaaagattcatagttacaagatagctgctagaggtcctaaaaagagtagaaaccaggtgagacttgggagggttttttttgttgttgttattttttgggttttttgagacaggatctcgctctgtcacccaggctggagtgcagtggtgtgatcatggcccactgcagctttaacctcccaggctcaagtgatcctcctgccttagcctcctgagtagctgggaccacatgtgtttgccagcaacacccagctgatttttaaatgtttttatagagacacagtctcactatgttgcccgggctggtcttgactcctgagctcaagtgatcctcccactttagcctcccaaagtactggtattacaggcgtgagccactctgcctggccaggagggtgttttttatggtcaaccagatatagttggggtcagttccctggttatatatatgtaaccaggtggcttgctcttagaacttttgaatgttaacctcagcctgtccagagttgttaatatatgtgcagtcggtcttattgataacagtgcagactctacctttttcagtcagtaaacaatccaagactagtctgttgtcagggctacaattgccaaagagtccagagattcctgaatttttcttaatgtctgactagtgttggtggccagagattctagggcctgagttatgtttcttagcattgacttgtggtatgcaaagcccctgccaaggggccaccacccctattgctgccccaattcctgtaaaaattaatcctattgctcttttacttcttgtttttctagattttatggggttatgaatggataccccctgaagggataatggtggccaaaatacattcactggtgtttcaagtttttgataagcaaaatggaaagctattcctagaagaataaatggttccctacagggttgggagtgggtatggggtaggatttcttcccctaaaggtgagcccagatgggtcacaaattgaatccttgcaagttatgccgtccattttttattgccaaactgggtctatagagataccttttccaggttccaatgggggtgattgagtagccctcgttttccaccagagggtggtacctccatcttcccaaattaagcagtcgtttctcccttgcatgtattggtcctggaggaggcaccatgtatagtctccttgtttaccagtgggatcccgtttgccctcccatggccttgggaatttggctactagggttgggtcagagcatcgtggggaatttctgtctctgtgtcattgtcacaacaatttgtgcaaaagatagtatcattagtacactggagctgtagatacccaacatcctaggtccaggtaatagtagggggtaggagggtggttggagaggagtcaggtcaatctgttaagtgtgggagagagctgttttataagtaggggcctaggtaccaaaggaacactatggccaattaggaggtttggggagatggctgtgaggtttgcagggtgcaccagaaggtgatgctctctatcctgagggtgctgatgacagattctgcaatcatgcaggctatttcctgatgctataattctagaaatgtttactatggagttttgttcccattccacagcgagttagattgattaggagcagggagcaagaagaacagggacaactgagtatcacactgggctttagggtggtccctatactcaataaggacaagtaaggtgtttctcaggaggaggtggttgctacttatctgtcttgtgaaatagcaactttaagtcttccagaggtttgcaggtgtaggtcatggtgtcctcctcttgtgcctgtagggattcaccaaaaacaggtttgtttaatccgggacaggtgtacctagctagtgattccccgaagtttaacagcagtgggagtgcttaacaatacctaatggggagtgggtgcccttccatattggttatattataattgatcttcaaggaatccttctttccaagttttttttttttgagatgaagtcttgctctgttgcctaggctggagtgcagtggtgctatcttggctcactgcaacctccgcctcccgggttcaagtgattcccctgcctcagccttctgagtagctgggactacaggcatgtgccactatgcccagctaaattttttgtattttactagacacagggtttcaccatgttggccaggatggtcttgattccctgacctcgtgatccacccacctcggcctcccaaagtgctgggattatgggtatgagccactggcccggccctttccaagttttttttttttttttttttttttgagatggagtctcgctctgtcgcccaggctggagtgcagtggcacgatctcggctcactgcaacctccacctcccgggttcacaccattctcctgcctcagcctcctgagtagctgggactacaggtgcctgccaccatgcccggctaattttttgtatttttagtagagacgaggtttcaccatgttagccagtaaggtctccatctcctgatctcgtaatccactcgccttggcctcccaaagtgctgggattacaggcgtgagccaccacccctgccccaagtttttaataggactaggtgtcctggttaaacagggaacaatcttttcctttgtgggaaagggcaatactttattttcatattcttagagtgccttttgaacctggtctcttaagttccaaaggggagcggggggaaggtatagtgaggcttgtccaaccccttgtttcttgtcatggcctgaattagtttttcaagtttctttttttttttgagacggagtcttgctctgtcactcaggctgtagtgcagtggcacgatctcagctcactgcaacagccgccttccaggttcaagtgattctcctgcctcaggctcccaggtagttgagattacaggcgttcgccaccacgcccagctactttttgtatttttagtagagatggggtttcaccatgttggacaggttagtctccaactcctaacctcaggtgatctgtctgccttggcttcccaaagtgctgggattacaggtgtgagccactgcatccagctgccagaggcaatattgctggccaagcttttattttgttccataccaatgctgaggtggtgtgctacctgccccaggtccctcatgtcccttggtgggacgctgatggccaagggacttagattcaagtgacttatagccaattaaacattgtaggccagatggaagtggaggtaggcaggcactcattattatctcttaaaaccccttttaagcaatataagagccaaaaccagaagccaaaaaataaggttataaaactgacttatctataaattctgtgcattgagctattgtaatcttggcttgcagcaattaggtttacaaaacacaaacattttgttcagctatttaggtatctgtgtgcctgtccttgatttggaaggtctgaattaattatatccctcaaaacccagcccctataatctctcatgcccacctcttcagtagtccttgggcctggaggaattgaatagttttaaattctgtagataaaacaacacataaagaattagcaatgtttcaaacaaaaaagtcataagccctgccctagttttgagaatgacaggaaaggaatcttacaggtacctaaacatttaaattatttagtatcaaggcatagaataagttatattaattcatatagaggcaaaattattaaatgaatacaagcttgtccctgtgtctcattaaagcagtttactttttttttgagactgagtttcactcttgttgcccaggccggagtgccatggcatgatcttggctcaccgcaacctccgcctcccgggttcaagcgattcccctgcctcagcctcccgagtagctgggattacaggcatgtactaccacgcccagctaatttttgtgtatttttgatagggacggggtttctccatgttggtcaggctgatcttgaactcccgacctcaggtgatccacccacctcagcctcccagagtgctgggattacaggcgtgatcaactgcgcccgtcctaaagcagtttactttgccccttttgcccaggtctaaagacaaggctttggttaacttgagtttggtgttagatcctggcaagagttggtgccttctctagatgagctgtctgtacccaggagtcaaagccctgtaactcaaaagcacattgattagttaatagcacccgataaggaactttttaaagggctggcagtggtaatgctggagtccacaacctgtcaggaggctgtaaaaatatatcacaaccttgcagtgattagtttttatagctttgataaagcccagcaacaagccagacaatcaagctaggattcgattctgggggcatttgtaaaagatgttaaaaagcccaaaatactgtattgacacagaaccacaggttactgtaagtaatagttacttatttacccaaagtggtaatctctctgcagtgtaattgtctctccttatgggaagcccacttaactaatcttgaagttaaatttgatgaagagaaaaataatacttgaatttaatcggacaaagtatgttcaaggttttgaatatagcaggtgaacatgaaaagttttctggttactctgaaaatttagacatgtcaagaaaaaccaagagtatagaatcaagttatactggaggaaaacattgcttttatagacctctaagctaaaatatttcagcatctgactgtaaaaacagaactggaagagaaaaagttacagcaactgatgaaaaggttgaaggagagactaatgtctcaggctttctcaaggggagaaaaagctgaaagcagtgagatagaacaattgaacttatgagatatgaatctgagaaattttcaaaagaaacaagttatagaattgaaaagcaaattttcttgtaatttcattaagagcaaatcaataccttgaaacccttactttaacataggagaccattctttagaaagattccacttttaattatagctaacttaatcacataaacaattctttttataaattctcctttataaatcttatgacctgcacagaccatgtatgatatggttgaatgaactttctgacttgtccaatactacctttttttttttttttttgagacagagtctcattctgttgcccagactggtgtgcagtggtgtaatcttggctcactgcaacctccgcctcccgggttcaagcaattctcctgcctcagcctcaaaagtagctggaattaacaggcgtgtgccaccacacccagctaatttttgtattttttagtagagacaaggtttcaccatcttggccaggctggtctcaaactcctaacctcaagtgatccacccaccttggcctcccaaagtgctgggattacaggcataagccactgtgcctggcctatactacttttcctaaataactagtcattctactactctagaacaataccatataagatccttttttttttcccactgagatctgcaggattctttcttatgtagaattattctcttttatttataacctttcttaccaaaaatacctctgaacatccataactttctttacctatctctcccctacttactggttcctttctacctggttatataaataaccttttcaagtccataatttgaatcaacctttagataacttttgaattagacacaattattctttttctcaataaaaacacatcttctttggtaagttttatataaacctaagaaggaagaaatcctgaactatcagatattagcattttatagatgagaaccattccacagtttttaaaattttttattttattgtaaaatgtttccctatataatattcctttcttaattggaaatgacccaggcatccaataagcatccaaaacgattttaagattttaaattatacaaaaagttcacttataagcatttatctcattatatttacctaatttattattattatttataattttttttctttttttttttttgagacagagtctcactctgtcacccaggttggagtgcaatggcataatcttagcttactgtaacctctgcctcccggattcaagagcttcttgggcctcagcctcccaagtagctgggatgcatgcaccaccacgcctggctaatttttgtatttttagtagccatggggttttgccatgttggccaggctggtctcaaactcctgacctcaagtgatccacctgccttggccacccaaagtgctgggattacaggtgagagcccctgtgcctagctggaactatattagacaaaattggtcattattcaaagttatttcctggttaaccatttttaaactctgaacattaggtgaacccctaagtaagaatcttaaacacatgggcattttgccagtaactgagaagattcagctattttcattgagccaacaatcttaaattcgtcttatttatacaattctgaagacatttctatttccatcaattatttaatttaattaattaattttttgagacaaggtttctgttgcccaggctggagtgcagtggcatgatcacagctcactgcagcttccgcctcttggggtcaagtgatcttccacctcagcctcctgagtagctgggactataagtgtgtgctgtcacacctggctaattttttttgttttgttttagagatggagtctcactatgttgcccaggctggtcctgaactcctgggctcaagcagtcctcccaccttagcctcccaaaaggttgggaggtgtgagcgacagcacccagtctttattaataatttgaaaacaagttttatttaccaaaggattcatgtgaacttgaaaagcctttggactttattaaagatagctggatttaaatatttctgacaattttgaaacctgttcacatggctaaactttttttttctaataggtaatccaaggaaactgtagactagaatttgggtaaggtagttttcataacagttttaattttaaaaccctcttttatccttttttcccccttcagcttcagaggaggaggagatgatttaaaagggcaggaaagaaaaagagggaaaggagggagagtagggggatgaggggtacctttccctttgtttctctggtgggggagagagagagagagagatacagcaagccagaacactcattgatggatgaagggtcaccttaccatgacaacttcaatatcagatatcttggacccaagaccttgggactgtcccagggacccacaatcctagagagacatgaaccagtagaagtataataaaagaagactgaaaaggcagaaagggaaaggaagctaggaaaaacaggctcccgtagcagcaaatgtgaattggggaagagaggggttgttgttcagggcgtgtccttggagtccctgagacagtggagaactcacccatcagtggagacaccaaaaaaagtgttcaggcggctgcttttctgccattgcagggagtcgtcattaggtcaggggttcagggcctccagaaaaatgggcttgaacaaggcagctcatttgggaccctcattttgagcagaaagaaagacaggaagagacctgttgcagaaaagaaaatttatgattttaggagggactagaagaagttgctgaagtggatggaatgacagagtaaggaaaaaaatgaaacggcaccaaatgctgaaaaacctggagtatctagacattggccagtgagggtccccataccaaatgctgaaaacctgggggtggccaacagtgaggcccaaaggcatgagacctaacacagttggggccatagaataatgtgactctgacatcccagagtcagcacaaaggaatacctctcaaaataacaaaagcctgccttacatggaatagaaacaactgcccaaattgccaaaacagggactacaaacatgacaactggataaacataagtgtgcatttaggcactaagagcagaaaagtaaaatgactggtcattagaagctaaagagaaaaggtctgagagagaaggtgacaaagtaaattacaaaggacgtggatgtccaggtgtgcttctgtctggggcacccagatgatgggggacaacgaactgactaacaacccagagacactattccccatttcctgattgatttgaaaaggtaaagggagaggagagtgaaagagaaagtaaatcagttaaagaacaccacatcggccaggcgtggtggctcacgcctataatcccagcagtctgggaggccgaggcggggggatcacgaggtcaggagttcaagaccaacctggccaatgtggtgaaaccctgtctctactaaaaatacaaaaattagctgggtgtggtggcaggcacctgtcatcccagctactcgggaggctgaaagcaggagaatcgcttgaacccgggaggcgaggttgcagtgagccgagattgtgccactgcactccaccctgggtgacagagcaagatgtcgtctcaaaaaaaaaaaaaaaaaacgaaaacaaaacacacattgagggggaacaaaggggacactcatcttttcgtggaggccaaatggtgccagtcagtctttgggttcaagcaattctcatgcctcagcctcccaagtacctgggactacaggcgtgcaccaccatggctggctaattttttgtatttttagtagagccggggttttgctctgttgcccaggctagtatcgaactcctgagctcaggcaatccacctgccttggcctcccaaagtgctaggattacaggcgtgagccacggtgctcaacccaatcagtcttaatttagggtctggctaaaggtctccctcagttccttttggcttattattggtctcttcatggtcaccaaggaatgacgcaggtgaaccccaaattggggctcagcccaggagcattcttggcttcgcactggaaggaatcatgaatgggccaacagtgaattgaaagtaagtttattagagcaacagaggaagggaaatggctgctctgtaagagaagcagccgcagcagcagacctgcggattgctggctagctgtatgtatacaaagacaacatggaaaaaaaatgaaacggtgccaaatgccaaaatacccagagtatccaggcatcagcccatgagggtccccataccaaatgacgaaaatcccagagcacctagggggtggccaacagtgaccctcaaaagcatgagacctgtatagccatatatatatgggtatactttgattatatgctaaaataaggggcagatttttttttttttttaattgatcattcttgggtgtttctcgcagagggggatttggcagggtcataggacaatagtggagggaaggtcagcagataaacaagtgaacaaaggtctctggttttcctaggcagaggaccctgcggccttccgcagtgtttgtgtccctgggtccttgagattagggagtggtgatgacttaacgagcatgctgccttcaagcatctgtttaacaaagcacatcttgcaccgcccttaatccatttaaccctgagtggacacagcacatgtttcagagagcacagggttgggggtaaggtcacagatcaacaggataagaatttttcttagtacagaacaaaatgaaaagtctcccatgtctacctatttctacacagacacggcaaccatccaatttctcaatcttttccccacctttcccccctttgtattacacaaaaccgccattgtcatcatggcccgttctcaatgagctgttgggtacacctcccagacggggtggtggccgggcagaggggctcctcacttcccagtaggggcggctgggcagaggcgcccctcacctcccggacggggcggctggctgggcagaggggctcctcacttcccagtaggggcagctgggcagaggcgaaggggcggatttttaatggattttctggaaaaggggcgaggacttcccggaactgagagtccctccccttttaaaccatataaggtaacatctgggggttgccatggcatttgtaaactgtcatggtgctggtaggaggttcttttagcatgcagataaaaggagggcaacaggaggtggctttcatcaccatcttgcttttagctggttttggccagtttctttgatcagctcctgttttgttcagcggggtctttcgaacagtgcttggaaaacaagtcctgctgatctcctacctcaaatggaatgtgaggtgacaatagggccagcaagcaaaaatagaaatctgagattgaagtttagtaagaggcaaggactagaaatgttcagtgttagtcatggttcttctccatggaaacagacatggagggggaagagcagtggattgaagacaaccttgccttgaggaagaagataacagagaaggaacaactggagaagtaatagtaaaagtgaaaagaggaaggagagctttaagaacaaggtactttaaaatgtaaatttaaaatttagtagcaaaggagggataaggataatacctgagaaaaaggttacatttgaagattgatgatcttggagagtagattcaggagtttgttggggaaaggacattatatgaagcagttaaagaggaaggaatggggctgggaacagtggctcacacctgtaatcccaacactttggaaggccaaggtgtgaggatcttgtggccaggagttcaagaacagcctgggcaagatagctaggttccatctctacagaaaattttaaaaattagccaagtgtggtagtgcatccctgtagtcctagctactcaggagtagctagggggatagcttgagcccaggagttcaaggttgcagtgagctctgatcgcaccactgcattgcaacctgggtgacagagcaagaccttgtctgtaaaaaaaagaaaaaggaggaggaatgaaaccccagagatttttctttctttcctctcccccatccccctcctcccctcctcccttcctcccctcctcctctcctcccctctcctccccactctcctcttccctcttatccccttccctcacctcccctccccttccttccctttttttttttttttttttttttttttggagacagagtctcgctttgttgaccaggctggagtgcagtggtgtgatctcggctcactgcaagctccacctcccgggttcacgccattcttctgcctcagcctcccgagtagctgggactacaggcacctgccatcatgcctggctaattttttgtatttttagtagagatggggtttccccgtagccaggatggtcttgatctcctgaccttgtgatctgcccgcctcggcctcccaaaatgctgggatcacaggtgtgagccaccatgcctggccttccttcctttttttgcagtgggagaatgggtgagaaatagctagagaaggcagcgagattattgcatattttttcaagataagttgtcagaaggaactggaggaaattataagattaaaatgctagagaaggaatggataaataactatgggttcatagtcactcagttattgataagtgtaattaagagattttaaaaatcagttcacagatatccggatttaaataaacatttattgtttagtattatctgtgatatcactccccttcattaatctggagaactgaaaattgattatactactttgcactttaattagttgtatatacaagtaatagcaataaaagtacactatgagtgtctctccagaatttttcttcaagtaactttttttttttttttttttgccaatcagataatgtaacacaaaacagagaggaagaaagaaagattgacaattcacatatatctactttggaaaatattgaaaactttaaaggagaaaataaaaatcacccgtagccctgctgtttagtatgtgtttttgttgttttactttcttttaagtaacattttagttttctgattatgaaagcagcagcatcatatacactgtagaaaaaatgaaaatacatagaaagatagttggattattttcaagtattgacattttgttacaattgatacctttttgttgttgttattgtttgtttgtttgtttgtttttgagacagagtctcgctctgtcacccaggctggagtgcagtggcatgatcttggctcaccacaacctccacttcctaggttcaagcaattctcctgcctcagcctcccgagtagctgggattacaggcgcctgccaccacacctggctaatttttgtattttcagtagaggtggggtttccccatgttggtcaggctggtcttgaactcctgaccttgtgatccacctgcctcggcctcccaaagtgctgggattacggtgtgagccactgcgctaggcgcaccttgccgggcaatacattgttaaatcatgtttcttttttctttttttttctttctttttttttttttttttttttttgagacggagtcttgctttgttgcccaggttggagtggagtgtagtggcgtgatcttagctcactgcaacctccacctcccgggctcaggtgattctcttgcctcagcctcccgagtagctgggattacaggcatgtgccactgcgcctggctaagttttgtatttttagtagagatagggtttcgccatgttggccaggctggtcttgaactcctgatctcaagtgatccacccacctcggccttccaaagtgttgggattacaggctggagtgcagtggtgtgatttcggctcactgcaagctccgcctcctgggtttgcattgtccagcctaaatcatgtttcttgactgcaggtattagtgtttaaaccttttctttatttattttttttaaagagatgaggtctcaccctgtcatccaggctatagtccagtggtacgatcatagctcactgcagcttctaactcctgggctgaactgatcctaccaagtaactggcactataggcaggagccacatcatccagctaaaaaaagctgcgactacagacctgcaccaccacacccagctttttttttttttgactttttgcagacacaaggtctctataagttgcccagcatagaaatgttttttgtttgtttgtttgtttaacaggtgaggtctcataattcactgcaacctacaattcctggccttaaatgatcctgctgcttcagccttctaaagtgctgggcttacaggtatgagccactgggctcaactagaaataactttttatttatttatttatttatttatttatttatttatttatttatttttaacgagacagagtcttactctgtagcccacgctagagtgcagtagcacaataatggctcactacaacctctaactcttggcttcaagtaatctttctgccttggcctcccaaaacgctggaattacaggcatgaagccacacataacttttttttagacagggtcccaccgtgttacctaggctggagtacagcagtgcaattacggctcactgctgccttgacctcctaggctcaagtgattctcccaccttagcctcccaagtagctgggactacaggtgtgcaccaccatgcctggctaatttttgtattttttgtcgagatagcgtttcaccacattaaccaggctggtatcaaactcctgagctcaagtgacctgtccacctcagcctcccaaagtgctgggattacagccatgagccaccatgcccagcccacaaattactttttaaacaagcataccagaacttttaaatctaagcaagtattgcccttcaaaacacagagattcactttggtaggcagagcctcttccactgacatttttactacttaaaaaatatttggggtcaggcatggtggttcacacctatccctgtacattgggaggctgaggtgagaggattgcttaaggccaggagttcaagaccagacttggcaacatagtgagaccccatctctacaaaaataaaataaaattagctgggcatggtggcaggaacctgtagtctcagctacttgggatgctgaggtggaaggatcacttgagcccaggaggttgaggccgcagtgagctgagatcgtaccactgcacttcagcctaggggacagagcgagaccctgtctcagcaacaacaaaaaaattggaactacttggccaagtgcggtggctcgtgcctgtaatcccagcactttgggaggcagaggtgggcggatcacctgaggtcaggagttcgagaccagcctgaccaacatggagaaaccccatctctactaaaaatacaaaattagctgggcgtggtggtgcatgcctataatcccagccactcgggaggctgagccaggagaatctcttgaacccgggaggcggaggttgcggtgagctgagatcgtgccattgcactccagcttaggcaacaagaatggaactccgtctcaagaaaaaaaaaaaattggaactgctttttaaaactgtccctgcagggctgggtgcgtggctcatgcctgtaattccagcactttgggaggcctagagggacagattacctgaggtcaggagttagagaccagcctggccaacatggtaaaaccccatctctactaaaaataaaaaattagctgggcgtggtgacacacgcctgtaatcccagctactcggaaggctgaggcaggagaattgcttgagcctaggatacggaggttgcagtgagctgagatcatgccaccgtactccagcctggcccacagagcgagactctgtctggaaaaaaaaaaaacaaaaaaactgtccctgcaagcacattatcagctgcaccacaaaatcatttttcatactctagaggaaatgttccttttttctacaacctttttttcccctctgactccacaatgcttttcaatttatttccccttcctagagccctttaggaccccaccttcctttatagatatgctggatgctaaaagacctcagaaagagaagctgagcagaataagagaaatagagaaagcaaaccttattcagagcatatctgtaacttatgtactgccagcctgagaactgtatgttgataacatcaaaattattattttttaatttatattgtttattttttggagacagtgcctcgctctgtcgcccaggctggaatgcagtggtgcaaccttggctcactgcaaccttggctcactgcaacctctgcctccccggttcaggtgattctcgtgcctgttgaatagctgggattacaggcacctgccaccacggctggctaattttttgtattttagtagagacgaggttttaccatgttacccagcatggtctcaaactcctgagctcaggcagtccgcccaccttggcctcccaaagtgctaggactacaggtgtgaaccaccatgcctggctgatcataacatcaaaattagctgagaacagtacaaatcaactaattataagctaaaatcatgctactcacttttaggaggcaaagaaaggagaagcataagtggaaattagggtatgtaagtcaaattcagaagaacaagtaaaattctattagaataaacaccattaaagcagaagatttagctggatggtgtgatggaagtaagctataacaatgctactgcactccaggctaggcgacagagtgagacccaagtataaagactggccatgtgttttgaaagaaaatgttcaactaagtaatacacaaactagggaaaaaattcagaaatataaaaagtacacagtgaaaatttaggcatcctttcactttgtactcttgctccccaagtcctcttcccaggtaactgttaaacaattttttgtgtatagtccagggattttctgtatatatgcaagctatttccttgatagcctgatttctgatgtttaccatttttttttttttttttttttgagacagagtctctctctgtcgcccaggctggagttcagtggcgcgatctcggcacactgcaacctccgcctcctgggttcaagcagttctcctacctcagcatcctaagtagctgagattacaggtgcccgccaccatgcctggctaattttttgtatttttagtagagacggggttttgccgtgttggccaagctggtctcaaactcctgacctcaagtgatccacccatctcagcctcccaaagtgctgagattacaggcgtgagccactgtgcccagcattcttttttggtttgtttgtttgttttgtttgagatggagtttcgctctgttgccctggctggagtgaagtggcactactatcttggctcactgcaacctctgcctgccaggttcaagcgattctcctgcctcagcctcccaagtaactgggattacaggtgcctgccaccatgcctggcttatttttgtattctttttttacagccgaggtttcatcatgttggccaggctggtctccaactcctgacctcaagtgatctgcctgcctcagccttccatagtgctgagattacagatgtgagccactgcgcccagcctacttttaatactacatgaatatttctttgcgtgtgtgtgtgtgtgtgtgtgacagtgtcttgctctgacacccaggctggagtgcaatggcatgatcacagctcactgcagccttgaactccagggtccaagtgattctcccaccacaccctcctaagtagctgggaccacaggtgtgtaccaacacacccagctaattttagagctctatatttttgtagagacaaggtatctccaaatgttgctcaggctggtcccgaactcctggatcctggctaaagcgatcttcctgccctggcctcccaaagtaatgggattacaggtgtgagccacctggcctagcctaattttttatttttatttttagtagagacaaagcctcgatatgttgctcagactggtctcaaactcctgggttcaagtgatcctcctgcctcagcctcccaaagtgctgggatgatagtcatgagccacctcatgactataagcacctggcttttttttttgtgtgtgtgtgtgtgtgacggggtcttgctgcgttgtccagtctggagtgcagtggtggaatcgtatctccctgtaacctcaaaatcctggcctcaagccatcctcccagctcagcccccccaagtaactaggactacaagcatgcaccatcaccccttttttctctgtctttttaatgctagcctcacctactcccctcacaaagggagtgtttatgaagtgttgaggtgagaaagttgtctaatgaactgtagaaccatatatttacaattttatggtgacagttactcttctgctctgccaaattgatttacaaagtcagggcattttatgattatatttatagttgatgaaatatggtgttaatggtcatctatataaaatgtcatcaggaatttcctttacaagtctgatttttcataggaaaaaatgcaaaactgaaagcatattagaaataaaaagacctcagcaattacctagtttaactccctgagtttacagatgagtaaattggatctgagctttgatttaagagaggaaaattcctatatagtatatgcttaattcatgaagttgtctacctaaaaacactataataagatgctaaattctacaacagagtatgactgagaatggtcaaagtgtggagcaatatttgtgattcttccagggaaacctcaaatgaattctgaaggggagataccttccctgccatcaggcagccaatctgcaaaaccagtaagccagcccaggaaatcaacccagccagatgtttgtgcctctcctcaagaaaagccactcaggactctgtttcaccaacctgaggaagagatagaagatggtggactcttcattccaatgggtaggctttctttttctttttaattaaatgaaacctctttattgaagtataatatgtagaaaactgcacatgtcctaagatatcctgaattcactatatttttacaaatttaatacacccttgtaagcaggacccagatcaagatagagaatgttatcaatacccagaagtccatcttgtcttccctttcaattaccctctacccataggttaaccactatcctgatgtctagcatcatatattggttcaatttttttttttttttttttgagacggagttttgttcttgtcgcccaggctgaagtacaggggcgtgatctcggctcacggcaaccgctgcctcctgggttcaagtgattcttctgcctcagcctccggagtagctgggattacaggtgcctgccaccacacccggcttaatttttgtatttttagtagagacagggttttgctatgttggccaggctggtctcgaactcctgacttcagatgatccacccaccttggcttcacaaagtgctgggattacaggtgtgagccactgcgcctagccagttgttctgtctttttgtcttttatttgaatggaatcgtgtgtacattttataactgcctttttttttttaaagacagggtctcactctgtcactcagactggagtgtagtggtgccatcacggcttactgtggccttgacctcctgggttaaagtgatctttttgtctcagccctaagtagctgggactataagcgcgtgccgtcacagccagctaattttttttctttttttttgagacacagtcttgctttgttgcccaggctgctggaatgcaatggcttgatctcaggtcactgcaacctccgcctcccaggttcaagcgattctcccgcctcagcatccctagtagctgggattacaggcacctgccatcatgcccagctaatttttgtattttttgtagagacggggtttcaccgtgttggccaggctggtcttgaactcctgacctcaggtgatctgcctgccttggctttccaaagtgctgggattacaggcatgagccaccgcacccggcccagccagctaattaaaaaattttttttgtagagacggagccccactatattgcccaggctggtctcaaactgctgtgctcaattgatcctcttgcctcagcctcccaaagtgttgggatgacaggtgtgagccaccgtgcctggcattgtgactgcgtttattctctcaattttttttttttttgttttgagacagagtcttgctctgtcacccagactggagtgcagtagcgcaatctcggctcactgcagtgtctgccttccgggttccagcgattctcctgcctcagcctcctgggtagctgggattactggcacggccaccatgcagggctagtttttttatttttagtagagacgggctttcaccatgttggccaggctggtctcgatctcctgacctcaggtgatctgcccgcctcggcctcccaaggtgctaggattacaggcgtgagccaccgtgcccggcctcaacattgttttatgaaattcatccatattcttggatgtacttgtagattgttcatttttattgctgtatatcattctgttgtttgaatagtttatgtatgttttcttttctttaattttttttttagagataggtactgctctgtcacccaggctggaagttcagtgccatgatcatagctcactgcaatttgaactcctaggttcaagtgatcttcccacttcagcctccccagcaactcggactctaggtgcacgccacaatgcctggctaattttcatttttattttattattattatttttttagagacggttttcactatgttgcccaggctggttttgtatttctgggctcgagcagtccctccttgatctctcaaagtgctgggattacaggcatgagcctcctcacctggtttgctttacgttttctttatccattcaactctttgttttttctttttgcttccttgtgcccattgttacccattcaattcttcttcttcttttttttttttttttttgcgacagagtctttgttttgaaccagagtctcactctgtcgcccaggctggagtgcaatggtgtgatcttggctcactgcaacctccgcctcccaggttcaggtgattctcctgcctcagcctcctgagtagctgggattacaggtgcgctccaccactcctctgctaatttttgtatttttagtagagatggggtttcatcatgttggtctggctggtctcgaagtcctgacctcatgatccgcctgcctcagcctcccaaagtgctgggattacaggcatgagccaccgtgcctagccttttttttttttttttttttttttttttgatgtggagttttgctctcgtcacccaggctggagtgcaatggtgcaatctcggctcactgcaaccgcttcctcctgggttcaagcaattctcctgcctcagcttcccaagtagctgggactacaggcacgtgccaccatggccggctaatttttgtattatttttttttttttagtagagacagggtttcaccatgttggtcaggctggtcttgaactcctgacctcaaatgatctgcccgccttggcttcccaaagtgctgggtcacaggtgcaaaccactgcacctggccccattcaattcttgatgagcatttggatacttttcagttgtgggctactgtgagtggtgctgctgtgaacattctatagattttttgctgaacatgtgtacttctttttcgttgggtggaaatgctagcttataagtttgggcatccttaaaattcttttgaaatactaaattttttattgtgaaacataacacagacacatgactaaagacttctttatttgatttagcaaatggtttttttgtgtgtgtgtgtgaatcttgctccgtcgcccaggcttgagtgcagtggtgtgatctcggctcactgcaacctccgtctcctgggttcaagtgattctcctgtctcagcctcatgagtaattgggattacagggacacaccaccatgcccggctaatttgtattttcagtagagacgaggtttcaccatgttggccaggctggtcttgaactcgtgacctcaggtgatccacctgccttgggctcccaaggggctggaattataggtgtgagccactgcgtccagcctcactttggcaaatgcttttaaaatggacacgtaatttttcttattgcatattctagaccttcattgctatgtaggttgtaagtagtagtggtagtcgacatctgtgtcttatttctggacaaaacaggaaaatgttcagtattccttcattatatatgaggatagttataggcttttcatagaaatattttttaggttaaggaaataattttcctaagttttctgagttttttcatatattgaatttcatcaaatgctttttcctatctctattaagatcatgtttttttctctttcattttgttaatgtggtaagtttcattaggtttattgagatataaaataaaatgtatctgatgagttttgaaaaatatgtacagttgggccaggtacggtggctcacacctgtaatcccagagctttgggaggctgaggcgagtggatcacctgaggtcaggagttcaagaccatcgtgagcaacatggagaaaccccatctctactaaaaatacaaaattagccgggcgtggtggcacatgcctgtaatcccagcactttgggaggctgaggcaggtggatcacctgaggtcgggagttcaataccagcctgaccaacatggagaaaccctatctctactaaaaatacaaaattagccgggcatggtggcacatgcctgtaatcccagctactcgggaggctgaggcaggagaatcacttgaacccaggaggcggaggttgcgctgagccgagattgcaccattgcactccagcctgggcaacaaagagcgaaaactccgtctcaaaaaaacaaaagaaagaaaaatatatacagttgtgttaactgctaccacaaccaacgtggaacatttctgtcaccccaaaagttgcctaattcccctttgctatccccctttctcaaacattggcaagcactgatttctatttccatagttttgcatcttctatgcaaatgttctatacttgttataccgtcatataatatgtgtccttttacatctggtttctttcacagcataatgcttttgagatttatccactttactgttggctttctgggctaagttcctggagcagctattttggaattctgatgatgttcttggtttatttgcagaagaacaagacaatgaagaaagtgagaaaaggagaaaaaagaaaaagggtaccaagaggaaacgagatggaaggggtcaagaagggaccttggcatatgacctgaaactggatgacatgcttgaccgtaccttggaggatggtgccaagcagcacaatctaacagcagtcaatgtccgaaacatccttcatgtgagtaagactggggcagttatgtaaatggaagggaactttttcatggaaagcatataaaaatgttcagcaaattcttgactcttgatacgtgaattaccgattttgtgggttacccgtgacagaacattttacatttttacatatttaagatagctttctccttgcactcagtacaagtttgaaatatgaacacatgttaaagaagaatttaattggaaagataaactgttcctgtttccttccactgattttcatatttactgtattgtttagtagattcaatgttgataatgttcatagtgggtttactcttgtgggtcgatatgtctaaaaagatgcctggttaatagtttattgcactttgtacatatgtaaatacttttcttgatatgtagcaacacagctatttgcagagcctttgctcttgttactctttctcttaagcatatagttacttacctcaggatctccttttatgtgagccattcctgttcctagtagcagctaatgagattggttcatttgctgctacattgtttgaaactgtgtggttctggccaaaacttacttctgccttctttgctttcagttgccttgctttaccccagtctgatgctattcgagtatatggttctcatttgtcctgtacataggtctgacagttacatggagagatgagtattgtctaggtgacaaacccttgttgcataaagtgaaatttcatctttctccaggaagtaatcacaaatgaacacgtggtagctatgatgaaagcagccatcagtgagacggaagatatgccaatgtttgtgagtagttgattatcactcttttaatgtcttggaacagagttatctctaaactggctaagggtaggaggtcacttaggagtttgtaaacagtttggcagctggggttaaagttagcatttcaaaacataagaattacttggtaatttttacttattttatttgttattttattattattattattttattattattatttttttttgagacggagtcttactctgtcacccaggctggagcgcagtggcgcgatcttggctcattgcaagctccgcctcccgggttcaggccattgtcctgcctcagcctcctgagtagctgggactacaggggcctgcaaccacgcccggctaattttttgtatttttaatagagacggggtttcaccacgttagccaggacggtctcgatctcctgaccttgtgatccgcccgcctcggcctcccaaagtgctgggattacaggcgtgagccaccgcgcccggccttgttattttattattattatttttttagagacagggtcttgctctgtcaccaaggctggactcaaactcctaagctggactcagcgatcctcccagttcagcctcttgagtagctgggactacaggaacatgcgactatgcccagctaatttaaaacaatttttttgtagggagggtgtctcactctgttgctcaggctggtctcaaactccttgcctcaagccatcctcccaccttggcccctaaagtgctaggattataggcatgagccacctcactgagctgtgatttttattgaggatttcctttctgtttttttctccttaggagcctaaaatgacacgctctaaactgaaggaagtagtggaaaaaggagtggtaagtattctgtttttttgttgttggtttttttttagcttggtgaataggatctaattcacccatagggaaaaatataggaaagattgtggtctgaatttgcctctttaaagaaatatttataaaagacagtagaattgtttctacatgatcataagctatgataatcatagtttattttagtagatatgaagcattgctttttggaattgctagatagataaccatttggaatagttgaaatcaataggtgagaccagtttttctatttatgttacaacacatgttgcaaagtgtttagtatttttcatagtgtgttccaggggccagttgcataaaaatcactttggtgtgggatccctcaggcatgcttattaaaaatgcatacttttggctgggtgtagtggctcatgcctgtaatcccagcactttgggaggccgaggcagatggatcacttgaagtcaggagttcgagaccagcctggccaacatagtgaaactctgtctctactaaaaatacaaaaattagctgggtgtggtggtgtgcgcctataatcccagctgcttgggaggctgaggcacaagaatcacttgaacccgggggcggaggttgcagtgagtggagattgcaccactgcactacagcctgggcaacggagtgaaactgtctcaaaaaaacaaaaacaaacaaaaaaatctccatacttttgagcccaccccagacctgagaatcaggacccatgggcagggccttggaatatgcattggcaaaaacacaacagttaattcttttgaatactaaagtgttgagaaccacttgaagacatctgaagtattctgtgcagcaagctctttggtgcttggagctgtgctatatccttcttaataagcacttgactagtttgtgcttacaaggcaggtaatagtcatgagggagttcattatatttctgatagtaaggaagatttgccttacagaccgaaaatatgtatcataggttttatctgtcctggttttattccttggagactgatagaagaaacaggtctaggctgggcttggtggctcatgcctgtaatcccagcactttgggaggtggaggtaggaagattgcttgaagccaggagttcaagaccagcctgggcaacgtaatgagaccgagaccttgtctagaaaaaaaagcaagaaaaggaattggtgtattcttccacattacttttcctacagttgaagaaaactagtatgttatttcataacattcttttcttggctatacatcccccaatttctccccccctttttattttgggagtcttgcttcatcgtccaggctggagtgcagtggcacaattctggctcactgcaacctctgcctcccaagctcaagtgattctcctgcctcagcctcctgagtagctgggattacaggtgcgtgccaccatgcccggctaatttttttgtattttttaaaatttttattagagatggggttgcaccatgtttggccagcctggtttcaaactcctgacctcaaatcatctgcccgccttggcctcccaaagtactgggattacaggcatgagccactgtgcctggcctttttgttttgagatggagtctcactctgtcacctaggctggagtgcagtggtgcgatctcagctcactgcaacctctggctcccaggttcaagcgattctcatgcctcagcctgctgagtagctgggattataggcatgcaccaccacacgcatctaatttttgtagttttagtagagatggggtttcaccatgttggccaggctggtttccaattgacccatgtgatcgcccgccttgtcctcccaatgtgctaggattacaggcgtgagccactgtgcccgtcccatatccttttaaaagtatgccaaaagaagactctactgaaccagatatggtttgactagtagttagattatctccacagtgttccagattacatatttctcctaatgtagcctaaggtcaaattgacctttgtttttggcaatcacatcactttttttggtctggttgactaactcttgttgcataaattgaaatttcatctttctctaggatgtgttcacaaatgaataggtggtagctatgatgaaagcagccatcagtgaggaagttctatgaagtctacttgacatatagaatataattaacatggctgggcacggtggctcatgcctgtaatcccagcactttgggaggccgaggcagctggatcacctgaggtcaggagtttgagaccagcctggccaacatggcgaaaccccgtctctactaaaaatacaacagttagctgggcgtgtggtgggcgcctgtaatcccagctacagagacgagaggatcgcttgaactcaggagggagaggttgcagtgagcggagaccatgccactgcactccagcctgggtgatagagcaagactctgtcttaaaaaaaaaaaagaatataattaacattaattctttatttgatttggggaaaaaaaatccaaggagatcaaattaggctctgaattatgtttattggccatgaatatagatgtggagaagttgggccatccaagacggtatagtttacgtaggagagcaagtattaaaatgtaggtctcttgcttcttaattctttctttttttttttttttttttcagtgacttgctctgttgctcaggctagagtacagtggcctaatcatagctcactgcagccttgaactccttcctgtgctcaagggatcttcctgccttagcctcgcagacagctaggcctataggcatgtgccaccatgtccagctaattggtttttttgaaacattcttttgtagaaatagggtcttaatgtgttgcccaggctgaactcaaactcctgggctcaagtgatccttctgccttgatctcccaacatggggggattacaggcatgagccgctatacttggccttcttaattcttactagactgactccaacacacttctgaatgctggcttgcctttctaatggatttggcagtaggtaggaaagggaaatgggcctgaatcacatcattccctttaccctatattggtcccacctacacagcactagataaatggtcagaacatagcagggctgatttgatttgagaagctaagactccttttagagacagaacctaatggccagttggcttttgttcataaggtgcttttggttgggttacaattaaatggtcaagaaattatacatcctcaatggcattttatcagcagtatataagaactttaaaaaagttctttaggctagatgtggtggctcacacctataatcccagtgctttgagaggctaaggtgggaggattgtttgagcccaggattttgagaccagcctgggaaacctaatgagactccatctctacaaaaaatttaaaaaattagtgaggcctggtgaggaggcatgcctgtagtcctagctaattagtaggctgaggcaggaggatcgcttgagctcaggaatttgaggctgcagtgagctctgattgtgctgctgctctagcctaggcaacagggcaagatcctgtctcaaaacaaaaacaaaaacaagaaaaactttccccctagctcttataaaaattttcaaacattcaaaaagttgaaagattgttacaatgaatctaaattccaagagtaatattttgccatatttgctttatatctctctgtgttgttttttcctgtactattggaaaaataagtgtggacaacatgaaactttgccctaaatgccctggtaaaagcttttttttttttttttttttttaagaaaaaaaaaagcccataggcagagcagggctaccccataggcagaatagtccataaaagcttttcatggctggctttttggagttgtacttatggtggattcatgtaactgattacaaaaatatattgctgttaaaagactactgtaaccaaaatatcttaggtttgtgtagtttaatagtttataaatagttgtcacatctgttgttccatgtaaaccgcagctgtgatatgaacaaggtagacattgttttcttcatttatagaaagaagtgaggcttaccaggtgtaaggcagaaatgctaatgacagtaatagattctttcctggtttcttctttctaactctgacaaataattgagagtataccctcagggataatcaacacctctagatcactgcagttacttgttaagtatatggctgttagtgatggtacagaggaagtaaacatgaaaaacaattatttcagttaagataacttaattatttatattctttgttggtaggtaattccaacatggaatatttcaccaattaagaaggccaatgaaattaaggtaaacttggaagaaataattgttattcttttccagaaagacttcatcggttttgaaacttaagtacttcctctttaacttttcttgatcaatctttgttttaattccagctttgtttttttccattctattactcttaggtttgtatctcatggaattcactttaacctctgcctcgtgttatttgctttagctgtacattatgctcttaggattttttttttttctgccctgcttcttccccttattttccaaatacgtatgatttgtgtttcccattacttcatttctttctaattgtactaatgtagcctcctcagtttgtggatatccaccttgaagaagatgattcctcagatgaagaataccagccggatgatgaagaagaagatgaaactgctgaagaggtcagtgaatgttagttggtaatatttgtcttaatagagcagggtatactttgcttccttagtaatgtcacttgtagagaggattgagacatggttcttttttcagctcatttctgtgctttaagctgtttttctgccctttatactcccttaattttagaatttgttgtattatgaaatacagcatagaaacgtgcatagaataaaaatgtatagctttggttattataatgcaaatcctcatgaaactcatagcaaagtcaagaaatatatcattactaggacaacccctgtataccctccccagtcacaatcacctccctccccctaaaaataaccactaccctgccttttagtaattatttctttgcttttctttatagttgtatcacctcaatatgtatctctacacactgtagttcaattgttactgttttgaactttatataaatggacccatgtttatatgttttgttcctagctttttaaaattcaacattaagcttttgagattcatttatactattggttttagctatacttcgttccctttcattgctgtgttaatatgttctttgacttgtttcttaatgtgttctttgaattgttttgtaaaaggattttagaccaaggccttacactttgtaatgcagattaggatagtgatctgatccctgtccccacctttaggattttttttttgagtctcctctgttgcccatggagtgcagtgtgcgatgttggctcactgccatctccatctcccgggttcaggcaagtctcctgcctcagcctcctgagtagctggaattaacaggcgtgcgctaccatgcctggctaatttttgtatttttagtagagatggggtttcgccatgttggccaggctggtctcggacttctgacctcaagtgatccacccgcctcggccttccaaagtgctgggattacaggcataagacactgactgcacctggcctttaagtttctatttaaattttattttctgttactgtaactagttgagtgatggattttatttatttatttatttatttttgagacagagtctcgctctgccacccaggctggagtgcagtggcgtgatctcggctcactgcaacctccatctcctggattcaagtgatactcctgcctcagcctcccgagtagctgggattacaggtgcacgccaccgcgcctggcttatttttgtatttttagcagagacgggtgttcaccatgttggccaggctgagtgattgatattttatgattccttctcttgagatacttcagactttgtggaatgaggtaggggcataaatattaaggcgaactggatttattttgtagagcttattggaaagtgatgttgaaagcactgcttcatctccacgtggggcaaagaaatccagattgaggcagtcttctgagatgactgaaacagatgaggagagtggcatattatcagaggtaaatcggcatcatacaaaagagatgttagacataactgtctaagtagattttttaactgtataagtagattatttatccatggtgattctgggctgtcaccctttttcaaagtttcttaagttagtaaacagttcagagaaggctagaactcagtgatagccaaagaacttttctgagttctcattaaggggccaaaaatgtgcaactagcagagtttcttttctcctacccttctcttctttcatatctgtgctttttaatattgtcctaaagccattgttattaatttcccacattttggtaaactaagtagcattctgttgacttctctagaaataggatgaaaactaattagatcaatacacttggtgtctttgtttttatgtaactctaactagagaagagaaaggacaatggtgtatggaaagtctgcctctttttccctctctttttttcctttttttgctttctctttctttcttacctccttccttttttgatgcagtcacctcttttaatcaggctgagaaagtcaccacaccagccatcaggcacatcagtgctgaggtagtgcccatggggcccccgccccctccaaagccgaaacagaccagagatagtactttcatggagaagttacatgcggtagatgaggagctggcttccagtccagtctgcatggattctttccaggtaaatattaaaactgtacttaactgagaaagtcaagtggagtaatgtagttgttgctcaggctgggaagggagaggaaaagataactacaattttatataagtaagagttagtctttgatactttgtatttggctagtgctattttctgctcaaagtgacaatggcagtttggggttttttttgtttgtttgtttgtttttgagacagggtatcaccctgtcacccaggcttgagtgcagtggtgtgatcttggcccactgcaacctccgcctcccagactcaagtgatcttcccacctcagcctcccgaataggtgggacaggtatatgccaccacacctggctaatattttagttttttgtagagatgaggtctccctatatttttgctcaggctggtattgaactcctgggctcaagtgatcctcccaccttagcctctcaaagtggtaggactactggtgtgaaccaccgtgcctggctgagaatggcagtttctaaggaagaaatgaactatgtagcagagagcattttaaaatgtagaacataggaaaaagcttcacccaaattcccccaaattaaccttttaccacaattgcttgatggttctcttcctctttctctgtatatacacatagtgttttctaaatcattttagagtgtgatgcaggcatgatgccattttacctctgcatgcttttgtgtatattttctaaaaatgagtttattatcttgtattaacacagtataatagtgttaatcaaaatcaggatacaggctgtgcgctgtggctcatgcctgtaatcctagcactttgagaggccaaggttggtggatcacttgaggtcaggagttcgagaccagcctggccaacatggtgaaacccccatctcgactgaaaatacaaaaatttgccaggtgtcgtggcgcatgcctgtaatcccagctacttgggaagctgaggcaggagaatcgcttgaacccgggaggcagaggttgcagtgagctgagattgcgccactgcactccagcctgggcaatggagagagactctgtcccaaaaaaaaaaaaaaatcaggatacagtaatattacataatatattaaagtgcttattctggttttatctgttgtcccaacaatgccctttatgttggaggaaaaaaatttttttttccctattcagcattcaaccctggattaaatatctatttaattatcttgttctttagtctcctttaatctggaacagtttctcagtctttgtcttttataaccttgacagttttgaggagtatgcaccatttattttgtagaatgttcttcaatttttatttttctaatatttcctcttagattcaggttttgcacttttgttacaaatactggaagagtgatgtgtgtttctcattgcatcatatcagaaggcacgtgatccctgtaatgttaactttcatcacttggttaaggtggtgtgtgcttggttttcccattgtaaagttattattttccatttttaattagtatatatcatgtggggatatacttcaaagccgaattcctttctttctgtttttttttcctagatggagtctcactctcttgcccaggctggagtgcagtggcgcgacctcagctcactgcacctctgcttcctgggttcaagtgattctcctgcgttagcctcctgagtagctgggattacaggtgcccaccaccacgcctggctaatttttgtattttttagtagaaatggagtttcactgtgttagccaggatgatcttgatctcctgacccgcctcagcctcccaaagtgctgagatgacatgcgtcagccaccgcgcccagccttctttttttttttttttttttttttttgagacagagtcttgcctgtctcccaggctggagtgcagtggtgccatcttgggtcactgcaacctccacttcggggttcaagcgattctcctgcctcagcctcctgagtagctgggattacaggtgactgacaccacacccagctaattttttgtatttttagtagagatggggtttcaccacattggccaggctggtctcgaactcctgacctcaagtgatctgcccaccttagcctcccagagtgctgggattacagacgtgagccaatgcacccagcccaatcaatcaaattatttttctcacactaatattagcatccattgattattctttcttttttttttttttttttttttttttgagacggagtcttgctctgtcctctaggctggagtgcagtggtgcgatctcggctcactgcaagctccgcctcccaggttcacatcattctactgcctcagcctcccgagtagctgggactacaggcgcccgcaccatgcgcggctaattttttgtatttttagtagagatgggggtttcaccgtgttagccaggatggtcttgatctcctgacctcatgatccacttgcctcggcctcccaaaatgctgggattacgggcgtgaaccaccacgcttggcctgattttctttcttgaaacagtctttactatggtcgttgtcaaatgatgactttgtaattctaacatttagtgagtaattttttattttttggatatggagtcacagtctgtcacgcaggctggagttcggtggtgtgatctcagctgactgcaacatctgatctgcctcccgggttcaagcagttctcgtgcctcagcctcctgagtagctgggaccagaggcacacaccactacgccagctaattttttgtattttttagtagagacagggttttattgttggccaggctggttttgaactggccttaggtgatccacccttgtcaacctcctaagtgctgggattataggcatgagccactgcgcctggccttagccagtaaattttttttttttttttttgagacggagtctcactctgtcgcccaggctggagtgtgatggcgtgatctcggctcactgcaagctctgcctcccaggttcatgtcattctactgcctcagcctcccgagtagctgggactacaggcgtgcacaccatgcccggctaattttttgtattttttggtagagacggggtttcactgtgttagccaggatggtctcgatctcctgacctcatgatccgcctgccttggcctcccaaagtgctaggattacaggcgtgagccaccatgcctggccttagccagtaaattttaatgttccaagtttcccctatcattcttgcaggtcaatgaaaaatgtctgtcctaaaattttaaagtatgatataataatttaaaaagaaatcctaaaattaaaaaatataattaaggctgggtgtggtggctcacacctgtaatcccagcactttgagaggcccaggcgggtggatcacccgaggtcaggtttgagaccagcctggtcaacatggtgaaaccccgtctccactaaaaatacaaaaattagctgggcattgtggcaagtgcctgtaatcccagctactcgggaggctgcggcacgaaaatcgctttaacccaggaagcggaggttgcagtgagccgagatggcgccagtgcactccagcctgggtgacagagcaagactacatttcaaaaatatatatatatatataattatatatatatataatttataattatatatgtatataatttataattatatatgtatataatttataattatatatgtatataatttataattatatatatgtatataatttataattatatataagtatataatttataattatatataagtatataatttataattatatataagtatataatttataattatatataagtatataatttataattatatataagtatataatttataagtatatataagtatataatttataagtatatataagtatataatttataagtatatataagtatataatttataagtatatataagtatataatttataagtatatataagtatataatttataagtatatataagtatataatttataagtatatataagtatataatttataagtatatataagtatataatttataagtatataatttataattatatataagtatataattaaaaatagaatattgaatggaatagctctgagtcatttaatcaccatgctttggagtatgtagtagtaggagcagtaatagttttttatgtaatcatttatttaccaaacacatactgaatggttgaagttgagaaacaacagtgtagaagacagaaaaaattgttcttcatggaacttagtctgttgaggagagatagactataaacatataaacaagtaaattcggatgtggttaagtgctatgaactaaattaaaatgaggaaatatgaaacttcctgtcagagaactttagataggctgatcaaaaaagacctccttggctgtaattccatcactttgggagtcctaggctagaagattgcttgaggctaggagtttgagaccagcctaggcaatatagtgagactccatctctccaaaaactcagaaaaattatataggtgtggtggcgcatgcctgtattcttagctgcttggtggctgaagcaggaggattgattaagcctgggagcttgagactacagtgagccatgactgcacccctatactccagcatgggtaatagtatgagaacttttttaaaaaaaattttaaaaaacagggtccggtttggtggcttatgtccataatcccaacactttaggaggccaaggagagtggatcacttgagcccaggaggtcaagacaagcctgggtaacctagtgagaccttgtccctaccaaaaaaaacacaaaacttagctgggcatcctgttacacacctgtagcctcagctacttgggaggctgagcctaggagatcgaggctgcagtgagctgtgatcatgctacagcactctagcctgggccacagagcaagactgtcaaaaaaacaaaaaacaaaaagaaaaaaggcctctttgaggagatggcatttaaactgagatccgaatgagaggaagccaggcatgtaaaagatctggggagaaaaagtgctccatatggaagaaacagcacattctaagtcgctaagatagaaacaaccttggcatggttaaggaacagaaactacatgaagggtgggatcgtgaaaaagaggtagaaatgaggtcagagagcaaggcaagagctagatcatgaaggtcttaggaaaccatgataaggggtgtagattttattttaaacattagaacagatgcccagtgtggtggctcatgcctgtaatcccagcactttgggaggccgaggcgggtggatcacctgaggtcaggagttctagaccagcctggccaacatggtaaaaccccatctctaacaaaaaatacaaaaaatgtcctgggtgtggtggcgcacacctgtaatcccagttacttaggaggctgaggcaggagaatcgcttgaatgtggggagtggaggttgcagtgagctgagatcatgcccctgcactccagtctaggaaagagtgagactccatctcaaaaaaaaaaaaaaataaataaataagaaaagatttttgtgatatttttggattaatgttaaaaattccttttggttaacgtgtgggaaatggactagagtaaagcaagagggtaaacagaaacccattagcaggttgatgcagtgtagtctagggagagcttcccaaattgatctacagattcaatgcagtccctatccaaatcccagctaccatttttgtggaaattaacagtctaatcctaaaattcatgtggaattgcacaggcccagaatagccaaaacagtctttaaaaagtacaaagatggaggtctcacactttctgattttcttttttttttttttttttttttgagacggagtctggctctgtcacccagactggagtgcagtagtgcgatctcggctcactgcaagctctgcctcccgggttcatgccattgtcctgcctcagcctcctgagtagctgggactacaggcgcctgccaccatgcccagctaattttttgtattttttatagagacggggtttcactgttagccaggaagttcttgatcttctgacctcgtgatccgcccaccttgtcctcccaaagtctgggattacaggtgtgagccactgcacccagcctcatttttttaaaataaatattttaaataagagtcttgctctgttgcccaggctggagtgcagtggtatgatctcagcttgctgcagcctcaacctcctcctgtgttcaagtgatcctcccacgttggctcttgcatagctggaactacaggcatatgccaccactcccatctaactttttattttttgtagagatgggggtcttgctgtgttgcccagctggtcttgaactcctagactcaagcgatcttgtcaccacagcctatcaaggtgctgggtttacagatgtacaaatgtgagcctctgtgcctggccctgttttttttttttttttgagatgtctctcttgcttaggttggagtacaatggtgcaatcatggctcactacagccttgatctcctagtctcaagagatccttctctttcagcctcctaagtagctgggactacaattggtgccaccacacgcaactaatttgtttgtttgtggcagagatgaggtctcactgtgttacccaggctggtctcaaactcctagcttcaagcagttcttcctgggcctcccacagtgttgggattgcaggtgtgagccaatgcattcagccagcggtattatacttaattgccccacagtggaaacaatctgaattccatcaacagataattggataaacaaaagtggtatatctatacaatgggatattattgggtgaaaaaaggaattcggggccaggcatggtgactggagtgcagtggtacgtgtctcactgtcaccttgaactcctaaacccaagcaattctcctgactcagcctcttgagtagctggtaccacaggcacataccaccatgcctttaatcccagcagttaggaaggccaaggcaggaggattacttgagcccagtccaggagtttgaaacttgcctgggcaacatagggagtccccccacccccatctctacaaaaaatgaaaaaaattagctgagtatggatccagtggctcacacgtgtaatcccaacactttgggaggctgagcaggtaggtcacctgaggtcaggaattcaagacaagcctggccaaccccatttctactaaaaatacaaaaatttgccaggtgtggtggcacacgcctgtagtcccaactatttgggaggctgaggcaggagaatcacccgaacccgggagatggaggttgcagtgatccgagatcgtaccactgcactccagaatgggtgacagagcaagactccatctaaaaaaaaaaaaaaaaattagccgagcatggtagagcatgccgatagtcccagctacttgggaggctgaggcaggagaattgcttgagcccaggagttcgaagctgcagtcagctctgattgtgccagtgctgtagcctgggtgagagattgagactctatctcttaaaaaaaaaaaaaaaaacaccaggcatggtggctcacagctgtaatccgaacactttgggaggctgaggtgggcagatacctgaggtcaggacttcgagaccagcgtgcccaacatggtgaagctccgtttctagtaaaaatacaaaaattagtcagatgtcgtggctggtgcctgtaatcccagctccctgggaggctgaggcaggagaatcacttgaacccaagaggcagaggttgcagtgagccgagatggcaccactgcattctagcctgggcaacaaagcaagactatgtctcaaaaaaaaaaaaaaagtattgatagatattacaacagggtgggatttaaatgcattatgctaactgaaagcggccagagacaggccacacattttatgattccatctaagtgaaatgtccagcagaaacaaatccatagagacagaaaatagattaatgcttaacaggggctgggaggagggggaaagggaagcgactactaatgggtatgggatttctttttgggttaatggaatgttctgaaattagataatggtgatggttgtataactctgtgaatatatgaaaatcctttcaattatacactttaaaagggtaaattttatggtatgtgaattgtatatcaataaagctgttataaattttcctaaaatgttggtttcaaactgatgtcatttattttatttcttttttatgtcgtgtttcttaaagtttctcaaacaataataaatccaaattgtttagaggaaggatcctgttacttaagctaagatgagaagaaaaggagtgatgatgaggtttggaaacatcactcactcagtgacttttctttctccattgtccagcccatggatgacagtctcattgcatttcgaacgcgttctaagatgcccctgaaagatgttcccctgggccaattagaggcagagctccaagctccagacatcactccagatatgtatgaccccaatacggcagatgatgaggactggaagatgtggctggggggacttatgaatgatgatgtggggaatgaaggtaagttttggtttgtgatttattatgtatactgtccattatctgttgtaaaatttttagtatttggaagggtatagaatggaatggtttgggttaattgatttaatttgtatttaactgataatttatcttaaatcagtagttaatttttctttttttttttttcctgagacagggtctcactctgtcacccaggctgagtgcagtgttgcagtcacggttcattgcagccttgacctcctgggctcaagcaatcctaccccttatcccactgagtagctgggactacaggcacatgccactgtgcccgactaattttttattttttgtagaaacgagatgtcactatgttgcccaggctgttcccaaactcctggcctcaaacaatcctcctaccttggcctcctgaatgctagaattataggcatgagccaccgtgcctgggccaattcttaacatttctttttctgggtaaggaatcttttgaatcctaagattgttgaatgctaagatttgaatcccttgaaacatacatgcacatgtagttttgttgttgtcttttgtttttgagacactgtcccaaaacagggtgttgcccagggtggatcacagtggggtgatcatagctcactgtagccttaaactcctgggctcaagagatcgtcctcaggtctcagcctcccaagtagctgagattataggcacgcaccaccttgcctggctaattttttaaaaatttctgtagagaaatgttgctcaggctggtcttaaactcctgcctcaagtgatcctcccaccttggcctcccagagagctaggattacaggcatgagccactgtgcctggcccactcaaaattttatgtatgatttcattagggttcagtgatttaccaaaagaacactgtgttagttaagggtcttcatgatgcaagtgaaagaatcctaactctatcttgctggggtgaaatgaaaccagactttgggaagtgtagtaaatcagcagtggaactgaggcactgttaggatccccctttcctctctattttacttccttttgtcactcagctccattctcacatttatttttctacaaggttagagctctgttcataaacactccgtgattactttttgctttgtctacacttcaggactctcccctgcaagctccagttataaaatccaggggaacaagtcagatcgacttggtttgatctcatgcccagtctcttggtactacatgggattgatagggagactgttcagcatggagtctggtgattgatagcacctcatagaacagtgtggttgaagtatgtggtgaccctaaagaagtaatggtattatcagaaatggggaagaaatattgatcagataaaagtttggatggaaacagactaagtaggctgggcgtggtggctcacacctattatcccagctctttgggaggccgaggcgggcggatcacaaggtcaagagattgagaccatcctggccaacagggtgaaaccctgtctctactaaaaataaaaaaatttgctgggcgtggtggtgcacgcctgtagtcccagctactcaggaggctgaggcaggagaatcacttgaacctggcaggcgaaggttgtagcgagccgagattgcgccactgcgctccagcctggcaacagagcgagactccatctcaaaaaaaaaaaaaaaagaaaaagaaatagactgagtaaatggctgggtaggtaatgctaggagtaagtcaggataagtgaatgaaagaaaataacaggtccttgaatgtaccttatgatactattaatagttatatagtatatcatttggcaaatgtttgagtactttctttatacaaggcattgtgctagaatctgtgagggataaaggagcataatcatttggtcatggaataaaagctttatgaatgacagggtgcctggcccattgttaggttcacaatacattgtacttttttgtgtgtgtgtgagacagggtctcactctgtcacccaggctggagtgcagtggtgagatcttagctcactgcagccttgacctccttggcgcaagcaattctcccacctcagccttctaaatagctgggaatacaggtttgtgccatcatgcccggccaatttttgtattttttgtagagttggggttttgccatgttgcccaggctggtctcgaactcctgcgctcaagcgatcctcctgcctctgctttccaaagtgctgagattacaggagtgagccatcgcgctcagccagtatattgtaaatgaatgaagttgttgaataaactcagatatgccatcaaagtggcataaatgctgttgtaagattttagaagaggacagggtaacttttgtttaggatgatcagagacagctacatgaaagagctggtaattgaaatggaccttggaaagatttttgaaaacagtgacagggaagagagaaggcatctgagtagaagtgacatgatatactctatatgctggattctgtaggatatattctttccagagttttctcttttttcactgtaaaactgtaagagtaatatatgcttggtataaagaaatcaaatattacagaaataaaacaattaaagccttccccccccccaaggaaaatgtacatatctacatacatgaaatttttcatatgatttttttggggtttatgtatctcttagagtttatttattggcacttcattttcctaccagtcatttccaaagcctttgacaccaaggttcaagtttggttccccagagggactactgataatactttggtatgcatctgtgagagttttcaatgtgtagttactttttagttttccacattaatgtggggataaaaataattaaattttagtcctaaatttaaatttaagacttttctcaaacatttagaaaagatagtccaggcgtggtggctcatgcctgtaatcccagtactatgggaagccaaggcatgaggattgcttgaggccaggaagtcaagaccagcctgggaaacacagtgagacctcatttctattttttttttcttcgacagagtctcgctctgtcgcccagactggagtgcagtggtgtgatctcggctcactgcaacctctgcctactgggttcaagcgattctcctgtctcagcctccccagtagttgggattacatgcgcctgccaccttgcctggctaatctttgtatttttagtagagacagggtttcaccatattggtcagactggtctcaaactcctgacctcaggtgatccaccctccttggcctcccaaaatgctgggattacaggcatgagccaccgcacctggcatttctatttttaaaataaaataaaattttaaaaaagagagagaaaataacaagaagcaaattgttttaaatcttatcatatttcttttttttacccaccctctgtagtagaggggctaacaagccacaaaatgaaaaaaattgtgtaaggagaaaaagatggagtttgaagctgagtcattaacatgcaaagtatagaatcagttccttcataattagcaactgatatattatcccattagtcattctgataggagtctaagcttctgagttttccattactcacccctttgacaatctgatgaaaactatgcagccttcccccagaaaaaaatgtacatatccaaatacatgaaatttttatatgatttttgggagatacatatcttttaaagtttattgacacttcctgtttctaccaggttcagaaatctccacaaaaaggaatagacaggacagagagttctttttttttttttttttttttttgagcagcagcaagatttattgtgaagagttaaagaacaaagtttccacaacgtggtaggggacccgagtgggttgcccaaggacagatagttctaaccactttgtaggcagtgaaatctcagagaaattcattgtcttgctcaaagttacagaatcaatttgttatactcctaggagtagaacccagtttaatattctaggaacatgtctcaatcagacaggtttcacggtaagttaaacctttttttttttttttttttttctgagacagagtctggctctgttgcccaagctagagtgcagtggcacaatccctgctcactgcaacctccacccgggttcaagcgactcttctgcctcagcctccagagtagctgggactacaggtacgcgctaccatgcccagctaatttttgtgtttttagtagagatggggtttcaccatattggccaggcttgtctcgaactcctgaccttctgttccactcgcctcagcctcccaaagtgctgggattacaggcttgagccaccgcacctggcctaaaccatttttttttgagagagtttcactcttgtcccccaggctggagtgcagtggcgcgatctcggctcaccgcaacctccgcctctcaggttcaagcgattctcctgtctcagcctcccaagtagctgggtttacaggcatgtgccaccatgcctggctaattttgtatttttagtagagtcagggtttcaccatgttggtcaggctgttcttaaactcctgatctcaagtggtccacccaccttggcctcccaaagtgctgggattacaggtgtgagccaccacgcccggcctaaaccattttttaaaagtatatgacttttcataatgagctgtgttttttgttttgttttgttttgttttgtttttgagatggagttttgctcttgttgcccaggctggagtgcaatggcacgatctcagctcaccgcaacctctgcctcccaggttcaagcgattttcctgcctcagcctcccaagtaactggattacaggcatgtgccaccacgcctggctaattttgtatttttagtagagatggggtttctccatgttggtcacgctggtctcgaacttccaacctcaggtgatccgccctcctcggcctcccaaagttctgggactacaggcatgagccactgctcctagccttcataataagctgtgctttttatctttggcacaggctaatacaaaataattacagtaagaaagtcaggttctcctagcgttattggtagcagcagctttggtgctcattttcatcactttggttcaaaggcctaagatggtagctattgggaaggaaaggccaggcagaactgactttcaggattttgtttctcataatttggttccgagaacttgaatcagaattgaagagtgtatggatatgtagggtgatgtttattaaagatacagatttcagggcttcaccccttacctactgaatcagaatctaatgagtatggtctagggatctaattctgatatatctaaaggattggaaactactggtctgggaaaggtaagagtgcatgataaaggttgattggggaattggactaatggttagggggagggtgaaaatcctcttttcttaaaataaaacttcagtttgttttgttttgttttgagacagggtctcactcttgtcacccaggctggagtacaatggtgtgatcttggctcactgccacctccacctctcaggttcaagcacttcttctgcctccacctccctagtagctaggattacaggcacatgccaccatacccagctaattttgtatttttagtagagacggggtttcaccatattggtcaggctggtcttgaactcctaacctcaggtgatccgcccgccttggcctcctaaagtgctgggattacaggcgtgagccaccacgcccagcaacttcagtatttttgtatgtgcctattcggacagatttttaaaagagcacacaaagccaatgattaggatgggtgtggcctccagatctaccagttgagttaaaagacaatacaggaggggtatatcagctgggtaaatactgacattgttaataagtcaaaaaagtgattaagctcagaggacatattccacaatcagggtactaaaagctaagcagaactcagaagaatccccctaaatgatttttcagcatctttgttaaatgagtgctctgagaataatattcgctgacccatttgtgtggtgtgggcagaactatctattgcagttcttgcatccaaacagatggagtccaaacctgtgcacactactcattattatgggctcttccagaactttcgttattcagcaatgtttgttaagaactttttgatcaggcgcagtgtctctcacacttctaatccctgcgctttgggaggctgaggcaggcagatcatgaggtcgggagatcgagaccatcctggctaacacagtgaaaccccgtctctactaaaaaaaaaaaaaaaaaaaaaaaattagcctgacgtggtggcgggtgcctgtagtcccagctacttgggaggctgaggcaggagaatggcgtgaacccgggaggcagagcttgcagcgagccgagatcgcccctctgtgctccagcctgggcgacagagtgagactccatctcaaaaaaaaaaaaaaaaaaagaacttgctgtgaagagacttatatagaaagtactatagagattatgaattatgaagacagtattctattcctaaagaaataaagaatctgtactgataagttaaacccacaaatagatgaaaaagatttgataattagttatgtgtaaagaatgcaaattaatatattataagctgagtataaatgttgagtaaagaattatcaagttagattagggtttaatcagcacagatttttcagtgattgtgaattttaaatgtgtgtctgtataagtatatatatatttatatatatttatatttatataaaaaatatatatttgtttttgagacagggtctcactctgtcaccctcgctggagtgcagtggcgtgatcatgactcactgcagcctcaaactcctgggctcaagcagtccttccagctcagccttctgagtagctgggactataggcacacaccacgacacttggctaatttttaaaaagtcatttgtagagattggttcccactgtgttgcccaggatatatatatgtgtttttttttttttttcttgttagatggagtctcactctcgcccaggctggagtgcagtggcatgatcccagctcactgcaacctctgtctcctgggttcaagtgattctcctgcctcagcctcccaagtagctggaattacaggcacgcaccattactcttggctaatttttgtatttttggtagagacgggagggggggggtctcaccatgttggccaggctggtctcgaacccctgacctcaagtgatcttcccacctcggcctcccaaagttctgggattacaggcgtgagccaccatgcttggccccaggctgtatatgtctgtttataacaaaagatgtttatttatggccaggcacggtatccagtctgggcaacaagagcgaaactccctctcgaaaaaaaaaaaagatgctcatttattatgaaaagttaaaacattatggaagaggcgccagactctgtggctcacgcctgtaatcccagcactttttaggggccgaggcaggtggatcacctgaggtcaggagtttgagaccagcctgaccaacatggtgaaacgccgtctctactaaaaatataaaaattagctgggcatggtggtgcacatctgtagtcccagctactcgggatgctgaggcaggagaatcgcttgaacccagcaggtggaggttgcagtgagctgagatcgagccactgcactccagcctgggcgacagagcgagactccaccttaaaaaaagaaagaaaaaaaaaatattgtgggagggtacacagagaaatctttgttaatagttttatgtgtttctttctagatactctgtgggtgttcagtcaagcatgtatttatctcaaacaagaatttttttccacaaaaagaatcatactatacatattggtcttcatctgcaacttgcttctttcacttagcagtataacatatatttttccattataatacatagagatcacctcttctatttaatggatacatgatagtaagaaatttaggtattctctttttggtctttttttttttaaatcagttcctcagtcacactagctgcatttctcaagtcacatgtggctaatggctactgtatgatacaatacaatacatgtatagatcatttccatcatcacagaaagttctgttagacaacactgatctaaaattatctggagaaaaatattaccttaatatataataattccataatttaatgactccttcataatttttacttagtaattgaaaagacagtttagcattaacattaaagaaaattaggctgggccctgtggttcactcctgtaatcctagcactttcggaggccaatgcaggcggatcacctgaggtcaggagttcgagaccagcttggccaacatggtgaaaccttgtctctactaaaaatagaaaaattagccgggcgtggtggtgggcatctgtaatctcagttacttggtaggctgaggcaggagaattgcttgaagctgggaggcagagtttgcagtgagccaagatcatgccactgcactccaacctgggtgacaaagtgagactccatgtcaaaaaaaaaaaagaaaaaagaaaattaaaagggagaagaacatccatatttctattattctaacctaacaaatgtttattatttttgtatatttttagttatttatgattcttattgtaaggatataatttttcatgcttatgattattatgtatatattgtacttttgtcatacatgtattgaacttttatagaatggttacatattcacattttatatgtgtacgtgttgagtatccccttcatccaaaatgctcaggaccggaagtattttggatttcagattttttcagatattagaatatatgtattattatacttaacagataagcatactaaatttgaaaatttgaaatctgggcagggtgcaatggctcacactgtaatctcagcactttgggaggccgaggcattcagatcgcttgagcccaggagttcaagaccagtctgggcaacataccaaaaccctgtctctactaaaaatacaaaaattagttgggcatggtggcatgtgcctaatcccagctacttgggaggctgaggtgtgacaatcgcctgatcctgggcagtcaaggctgcagtgagccatgatcgtgccactgcacttcagcctgggtgacagagtgagaccctgtctcaaaaaaaaggaaaaagaaaatttgaaatctgaaatgctccaatggctattccctttgagagtcatgtttgcactcacagagtttcagattttggagttttggatttggaatgctcaacctgtactattttatactaagaaattataattatatagtcattctctaattgttgggaatttgggccactccttttttcactgtcagcttcactgtacaagtagcttttacagaaagtattattttcatggaatatactacacaaaattagctgggtgtggtggcgtatgcctgtggtcccagctactcaggaggctaaggtgggaggatcacttgagcccgggaggtggaggttgcagtgagctgaggctgtaccactgcactccagcctgggcgacagagtgagaccctgtctcaaaaaaataaagaataaatgtgctttattggaacagattcttagaagtttgagaacagagttaatgagcatctgaaacacttttttttcctagatgaagcagatgatgatgatgatccagaatataatttcctggaagacctcgatgaaccagacacagaggatttccggactgaccgggcagtgagaatcaccagtgagtctgtgtttattctaagtcctgctcttgactgctttgcagctgtctttgtttactttgtagatttttaggggtgaagtttgcagctcatccatgttaagacatttaggtttcctttacccatttattgatctgattctttaaatttaggtacatattcagaaagcccatcagttattcatttgtatatcccacagtcgtgtattcagtccttactgtttggcagggattgtgcaagatgaataagacatggcatctgtgctgtaggagttcagcctagtagggtgatagaaacagaaaaagttacaatacaaagtgataaatgctgtaacaggttttacataaggtataataatgacctaaaagagagtgtcatctcctagtgtatgatatggactaggataggagaacttaggaaagaatttgcagaatgaaatggctttttatcttagttttgaaggaggaataagaaatttggtgaatagggacagagaggaatattgcaaatagaagagcatctgcaaaccacagaattgtaaaacatcaaaaaagtatgtttggaaaatactaagtactttggtggtggtgtatgagtgaaaagacagagaagtggtagataagattaggtagtgtttacatcatggaggatttttaagctctcaaaatgaggtttaagggcgggcatggtggctcacgcctgtaatcccagcactttgggaggtggaggcaggcagatcacctgaggttaggagttcaagaccagcctggccaacatggcgaaaccctgtctctactaaaaatacaaaaattagccaggcgtggtagtaggcacctgtaatcccagctactccggaggctgaggcagaaaaattgcttgaactcaggcgggagaggttgcagtgagccgagatcacgccaatgcactccagcctgggcgacagagcaaggctccgcctgaaaaaaaaaagaggtttaagcagtaaatcagtaggaactgatttggattttagaaagatcactttgatttaataccagtttaatgtattaatttgttaggtaaagtgaacaagactggaggtatggaaaacaattatgataacttagcttgagttatttctataaaaaattatatcattgagctaggagtggtggcttacacctgtaatcccagcactttgggaggctggggcaggaagattgcttgagcttaggagttcgagaccggcataggcaacatagagaaactttgtctgtactaaaaatttaagaaattagcctaatgtattggcacgtacctgtagtcctagctactcaggaggctgaggcaggaggattgcttcagcccaggaggtcaaggattcagcaaactatgatagtgccactgcactccagccttggtggcagagggagatcctgactcaaaaaaaaattatatcattggctagtgtgtcaagcatagaaaacatacatttcatcctgaagaaattctacctatggggagaaagaaaaataaaaaatatatttcataagccattgatttttattgcatgtatgcatgaccctgtactggaataatatacacgacatggagaaggtaagatgctggctcttgaccaggttatgcagagagctttataaacatccaagatatacctaattaatgcagttctttgtgtaaagagaattatgtaaatacaatcctttagaacttacattttattttattgctttattgtgcctttcaccttgcttttaagattagaataccatttcctttgtgaagatctttcatttattttgatatactatgacagggatagtggaagcattgaaaggaaagcaccaggaattagagaaaatgtagaatgaaaaggtttgaggatttaggctttgagaaaactgaaaggagaatctaggaaggtacaagaaaaacctagaaaatctagtgtcgtagaaaccaaaggaagagtcttttggctggggcacagtggctcatggctataatcccggcacttgggaggctgaggcagaggcagaaggatcgcatgagcccaggagttcaagaccagcctgggcaagatagtgagacattgtctctacaaaaacattttaaaaataaaatgaaaattagttgtcgtggtgcatgcccgtagtcccagctacttgggaagctgaggtgggaggatcacttgagcccaggaggtggaggctgtagcgagcagagatcccaacactgtactccagcctgggtcagagcaagaccctgtttcaaaaaaagagtctttcaagaaggacagaatggtcaacagtaaagaaacaagtaaagaaacatctgcttaaagcacaaaagcagatcttaagttcagctatcatcctggaatatatttgccttccctttttgattgttactttcttcagtttacgtataatttctcagggagatcctccttcgttaggattgatcttcttgctttgcattcccgtaccactctttttgtccttttatatactgatcacctcataattgcttatttaatatctgtcttctcccctagactgtgaacttctcaagagctttgttttgtttattgctgtaaagctggtggcaatatttgccagtcgaatagagatgggtaaatgaagggcagtctttctagtcatacagttctgtaatgatagtgaaagctggagtagaatttttaatttttttttctgcctcttgtcctcttgtgtctcattgtcatatttgattataatctctttaaaaggacttatccttatatggataactaaaataaaaaaattaaaaagcatagaatcacagagtttgaaaagctccatgtggtcacatgttttttgcccgcttgagaatttgtttacacctcctctgaggtggcctttttagtcctgtttgtataccttcagtgacagggagctcaacaattctgcagatagtgtattgtaaacttgaacacctcctcaattaatactttccttattgaacccaaatctgaatgcaaattcagatactttccttattgaacccaaatttgaatgcaaagcaggaagatcaatccttttatattcctcctatttgtctttatgttatgttatgttatgtgatgttatgttatgttatgttatgttatgttatgttatgttatgttatgttatttttgagatggagtttcgctgttgtcgcccaggctggagtgcaatggtgcaatctcagctcactgcaaactctgcctcctgggttcaagcgattctcctgcctcagcctccagaatagctgggattacaggtgcccgccaccacgcccagctaatttttgtatttttagtagagacggggtttcaccaggttggccaggctggtcttgaactcttgacctcaggtgatccacctgcctcggcttcccaaagtgttgggattacagtcatgagccgcactgtgcccggcctcctatttgtcttttgttgttaagaaaaaaaaaagcaatttattcccaagtgtacatattaaaagatgtttcttaagtttttttttttttttccctatgcaaaacataggaaagtttcaagtttcttctgccaggtttcttcttctccaaagccttggtgtccagacctctcaccatgcacattactcttctctggattctagcatttattttctttaaacttttcccctgttacatcttattatgaaatttaaaaatatatatagaaaaattgaaaaattatacagctaacattcatatactcaccacctacttttttttgagacgaagtctcactcttgttccccaggctagagtgcaatggtgtgatctcggctcactgcagcctccgcctcccaggttcaagcggttctcctgcctcagcctcctgagtagctgggattacaggcgcctgccaccatgcccggctactttttgtatttttagtagagaagaggtttcaccatgttggccaggctcatctcgaactcctgacctcaggtgatctgcccgcctcagcctcccaaagtgctgggattacaagcgcgagccactgcgcccagcctcaccacctactttctatagtttgttggtttttttttgagaaggagtctcgctctgtctccaggctggagtgccgtggcgccatctcagctcactgcaacctccgactccctggttcaagtgaatctcctgcctcagcctcccgagtagctgggattatagtcacgcgccaccatgcccagctaatttttgtatttttagtagagacagggtttcaccatgttggccaggatggtctcgatctcctgaccttgtgatccgcccacctcggcctcccaaagtgctgggattacaggcgtgagccactgtgcccggccaaactttcagtagtgttaatataaactgtgcgcctttcatatgtgcgggtttcacagctgcagattcaaccaaccttgaaaatattctgagaaaaaaaaatgcaacagcaaaaaataatactaactgggcgtagtggctaacatctgtaatcccagcactttgggaggctgaggcaggaggatcgcttgagcacaggagtttgagatcggctgggcgacatactgagattccatctctacaaaaaactttaaaattatctgggtgcagccgggcatggtggctcacgcctgtaatcccagcactttgggaggccagggtgggcagatcacgaggtcaggagttcgagaccagcctggccaatatggtgaaaccccatctctactataaatacaaaaattagccgggtgtggtggctcacgcctgtagtcccagctactaaggaggctgaggcaggagaatcgcttgaacctgggaggcggaggctgcagtgagccgagatcgcgccactgcactctagccagggcaacagagtgagacgctgtctcaaaaaaaaaaaattatctgggtgcattggtgtgtgcttgtagtcccagctactctggagacagagtcaggaggatcccttgagcccagaagttcaaggttgcagtgagctgtgatcataccactaccactgcactccagcctgggtgacagagtgagagcttgtctcaaataaataaataaaaaataataaggtataacaagcatttacattgtattaggtgataagtaatctagagataaggtatacaggaggatgtgtgtagattatatgcaaatactacatcatttttatataagggacttgagcatcctcagattttggtatccatggatacgaaatggttccaggagattggctcctggaaccaacctccacagatactgagggatgactttatttgccttatcatgcagctgtccatctccctgtccgtctgtggatgcatcttagttttcaaatgcatttcagagtaaattatacttcacttttttttctttttttttttaaattcagacaaggtctatgttgcatgggttggtcttgaactcttgcggtcaagcgatcttcccacctcagcctcctgaccagctgagattacaagtgtgcacaatggcacctggctatatgtcactttttttttgtatttttagtagagacggggtttcaccatcttggccaggctggtctcgaattcctgacctcgtgatcctcccacctctgcctcccaaagtggtgggtttacaggcatgagcctatacttcacttttaaccacttcagcacgcatataatgaactagagctccatatttgtttatgatttctttttataggtaattttacacacagtgtatcacacacatctcaagtgtaccatttaatgaattttgacatgtgtgtacctatgtgacacaaatccctgtcaggatatagaatcctcaccccaggaagtttcctcatgccccttccaagtcaatccccacaccatcccttcagaggcaaccactgttctgatttttttttttttttttttccgagacggagtctcgctctgtcacccaggctggagtgcagtggtgcggctcactgcaagctccgcctaccaggttcacgccattctcctgcctcagactcccgagtagctgggactacaggtgcctgctaccatgcccggctaattttttgtatttttagtagagacggggtttcaccgtgttagccagggcgatctcgatctcctgaccttgtgatccacctgccctggactcccaaagtgctgggattacaggcgtgagccactgcgcccggctttttttttcttaatcacaggttatgtttgccagttttagaacctcacataaatggaatcatataggatgtgctttgtgtgtaaggcttctttcactcagcataatatttttgagattcatttgtgttgcatgggtcgttagtttgttcccttatattgttgagtagaatttcgttgtgtatatatactacagattatctatttttgtgttgatcacctgggctatttttaattttgggtaacgaataaagctgcgctgaacttttttgtgcaagtctttgtggaaatgcttcatttctctctctctttcatttgttcccacctatgagttagaaaagccgtatttcatttatcttgggtcagctgtataggagacaaatcactgggtcacagggtatgtttagttttataagaaattgccagaccattttccaaagtggctttccattttacattcttatcagagttctggttgctctacatcctcagtaacatttggattttaattttttttgttggctgggcatggtggcgcacacctgtaatcccagcactttgggatactgaggcaggcagatcacttgaggtcaggagttcaagaccagcctgggcaacatggtgaaacaccgtcgctactaaaactacaaaaaattagccaggcgtggtggcgcatgcctgtagtcccagctacttatgaggctgaggcatgagaattgcttgaagccggaaggtggaggttgcagtgagctgagaccgcgccaccgcgctccagcctgggcaacagagtgagactcagtctcaaaaaaataaaataaaaaataattaaattacttaaatgattttgtttttgtttttgttttgtgtttgagacagagtctcactctgtctctcaggctggagtgcagtggtactatctctggtcagcgtagcctctgcctcccgggtttaagagattcttgtgcctcagcctcccaagtagctgggattacaggcatgtgctaccatgactggctaatttatttatttatttatttttgagatggagtcctcgccctgttgcccaggctggagtgcattggtgctgtattggctcagtgcaacctccacctcctgggttcaagtgattctcctgcttcagcctcccgagtagctgggattccaggtgcatgccaccatgcctggctaatttttgtatttttagtagagacggggtttcaccatgttggtcagactggtctcgaactcctgaccgcagatgatctgcctgcctcggcctcctaaagtgctggaattacaggcgtaagccactgcccgtggcctggatcttaatttttttaatgtcctcttaagaagggcctttatagaattgttcacagtcctccagacatagtgttagactctgctctagttcagtgatatgtttgccttgttggttatgagccccgttttggagcaactgtgtcttattgaacttgatatcaaccaaaacttttttttttcctcagattcttgtaacaaccaaaactttcaggtcttgttcacattatttttaagccacgtcaccttttcatgcagttaataaactgatctttaaaactcttgctgggcgcggtagctcacgcctgtaatcccagcattttgggaggctgaggcgggtggatcacgaggtcaggagatcgagaccatggtgaaaccccgtctctactaaaaaatacaaaaaattagccaggcacggtggcaggcgcctgtagtcccagctactcaggaggctgaggcaggagaatggcgtgaacctgggagatggagcttgcagtgagctgagatcgcgccactgcactccagcctgggcgacagagcaagactccgtctcaaaaaaaaaaacgaaaaaactcttaactgtaggactgggcaccgtggctcacacctgtaatcccaacacttagggaggccaaggtgggaggatcgctggagcccaggagtttgagaccagcctgggcaacatagcaacatgctgcctctattaaaaaaaaaaattcttaaacatagaactttaaatttatccgtatatgttgcatccagttgatttgagaaaatataattttgaattttccgtctgttggattggcagtccctttcagctttacatcatctacagatgtgttaggtatgttctctgggtcttctaagtcaccgatggagttcttgaatagttcagatccaaagacagcgtcctgtgaaaccctgctggaaacttgtctttctctctctcttttttttttaagacaatatcttgctctgtcgcccaggctggaatgcagtggcatgatcttggcacactgcagcctctgcctcctggactcaagagatttctctcacctcagcctcttgagtagctgggactgcaggtgtgcgtcaccaagcccagctaaatttttttgtagagatatggtttcaacattttgcccaggctaggagactcatctcttgattccattcagtactgtgtggatttggataggtcatctaattataaaatcatctagctcacattttctcctgtcttcttccttttagaatttaagcttcatgagaatagaactctctctctctatctctctttcattctctcatatatcccaagcatctaaaacatggattgaagcatagtgctcaataaatgtgttttgttgttgttgttgttgttgttgttttttgagacagagtctcgctctgttgcccaggctggagtgcagtggcgcagtcttggctcactgcaagccctgcctcccgggttcacgccattctcctgcctcagcctcccgagtagctgggactacaggcgcccaccaccacggctggctaattttttatatttttaatagagacggggtttcaccatgttagctaggatggtctcaatctcctgactttgtgatccatctgtcttggcctcccaaagtgctgagattacaggcatgagccaccgctcccggcctcaataaatgtttttgaataaatgaatgaaggatagccagtcatggtggctcacacctgtaatcccaccattttgggaggccgagttgggctgatcacttgagctcaggagttcgagaccagcctggtgaaccctcatctctacaaaatatacaaaaattagccaggcatggtggcatgcgtctgtggtcccagctacttggggagctgaggtgggaggagcgattggaccagggaggggatgcggaggttgcagtgagctgagatcgtgccactgcgctccagcctgagtgacatagtgagacccatctcaaaaaaagaaggatagatatgaagaatttgtcatgccttgttgaaaacattatacattgtcttcatggaattcctccttattgtaaaatctaatttataccaacaatatactgtctggctttcttgcagaaaaggaagtaaatgagctgatggaagagctgtttgaaactgtgagtaatgatcctcgagtgagaacacgggattttaagtcagttctccagcaagatgtgtcatttggtctctgtgatgctccctctaggagagggggtctgactgaaccaattctccttttagtctacctgggaaagaatataatgacaagggaattttgctaactactagactcttgattatatacatgtatgttgttcttattaacattttccttgaaacttctttttgtttgagggggttcttgctccatcacccaagccagagtgcagtggtgaaattacagctcacagcagccttgaccttctaggctcaagcagtccttcgtctaagcctcctgagtagctgggacataccaacacacccagctaattattttatttgtagagacagggtcttaccacattgctcaggttgttctggaacttctgggctcaagcaattttcctgccttgggcctcccagtgctggaattataggtgtgagccagcatgcctggcccctggaaaacttttgatgacttcccctactgtcatttggtgtgtccttaaagattgtcaactagttttaaactactttgtgtacaaataattacctttttcataaatttgtttcaaaagatttttcattttaagagattgatcattttgaggctgggtgcagtggctcacgcttgtaatcccagcactttgggaggccacggcaggtggatcatctgaggtcaggagtttgagaccagcctggccaacatgatgaaaccctgtctctattaaaaatacaaaaattaggcatggtggcgggcacctgtagtcacggttactgcagaggctgaggcaggaaaattgcttgaacctgggaggcggaggttgcagtaagcccagattgtgccactgcactccagcctgggcaatagagcaagactgcaagactctgtctcaaaaaaaaaaaaaaaaaaaaaaaaaaaaaaaaaaaaaggagagagagattgataattttgagttatccacgctctgtccttactgttacaagttgactggttgaatgacttctttcttggcataatagccatcccaagtgtgggtttgtgggaatcctgaagtgagaaagttctgacattggctctttctgggtgccagcattattatagtcttgtaatctatagttttcactcttccttcccaatactggagcaacattcagaggcccattccccaggaaaaccctccctttcctttgcccacagttccaagatgagatgggattctccaacatggaagatgatggcccagaagaggaggagtgtgtagctgagcctcgtcctaactttaacacccctcaagctctacggtaggctagttgaagaccttgagatttggaatagaggaaaagtttatttctgaaaaggttttcagaagttgcaattgataatttttcatcccaaaccagcttctgttactgatgtaaggatgcagagccctgtcaggagttaggtgtcaagtgaagtctccttgttatggggcagtgcagctgtaggccaagctatatccgtttgggaagggagaaaaaacagtagctggcatccatatccacttctccgggtgagtggtgctggagaggtatgtaggactcaatgtggccagccacacaaactaccccatattgtaatatcctgtctgtcccttttgttctttttatgtgccattaatatctgctaaatgtgactgaaaatttgttagtcacctaggcattagtggagcaaaccctgaagcacctgcagtaaggagtctgaaacatacgtgctgacctttttgcctaaagttggcacttgtgttacagcatccagaaagtagaggctttaattttttcctcattttgtggtggatttgcatctgcactttattgtattgttatccattgcgagtagcagcatgtagtcattagatggatggctagatgtcaggatgcagtttgtgccataagtggaacaaagcaaagagaatagtccctgtaattcgtcctgggtttgaacctaacagcattactaagcagagagcttgggatccatctgaaagctagacctttagagatttttcaatttagtgaaaaaagataagatatgccaaccaatgtctaaaaactagaaataccagtaattctccattacaacaaatatcacaatacaactacatcaaaaacctcaagattgctaagtcagtatttgacccattattttaagttacagctcatacaacaaaattctgttatagcagaatggaaccattcatcctgggaacatataatgggatttgatctataaacgtgttttggttctgctgattgactctttgtaacttcttaaaatttgggaagtgtaggctgggcgcagtggctcatgcctgtaatccctgcactttgggaggcggaggcagggggatcacctcaggttaggagtcgagaccagcctggccaacatggtgaaaccccatctctactaaaaatacaaaaattagccaggcatggtggcgggtgtgtgtaatcccagctactcaggaggctgaggcaggatactcacttgaacccggaaagcggaggttgcagtgagctgagatgacagcctgcttgacagagagagactctgtctcaaaaaaataaaataaaataaaataaataaaatttgtaaagtatagaaataatttaaaactcttgttagaattcagttaccttctggtattcagtagaatacagtcatatatcatctcatggtgatacattctgtgaaatgttatcattaaacgatttcatcattgtgtagaaagcacttggataaacctagatggtttagcctactgcatacctaggctatacggtataacatattgctcccaggccacaaacctgtatagcatgttattctgctgaatattgtaggcagttgtaacacaatggtaagtacatatgtatgtaaacatagaaaaggtacagtaatcttatggagccatctctgaatatgtggttcattattgactgaaacattatgtggcacatgactgtacttgggcagctgctgcttctctttcagttgcaaatgcaaacctgttataatctttgactaaataaagcatcctggattctgtaagtccatagatagtaaaaacttcttaaaacacaataaagaagagagaggaaaaaaaagaacaaaacaaaaaccctgggaaagtgagttatctgtgcttcccttgtcagttatccaagtaatacttattaaaactaggtgcaaggccacgtgtggtgactcacacctgtaatctcagcactttgggaggctaaggcaggcagatcactttaggtcaggagttcagaccagcctggtcaacatggtgaaaccccatctctactaaaaatacaaaaattagctgggtgtggtggcacacgcctgtaatcccagctacttgggaggctgaggcaggagaaacacttgaaccctggaggcggaggttgcactgagctgagattgtgccactgtactccagcctgggcaacagagtgaaactgtctctcaaaaaataataataggccgggtgcggtggctcacgccagtaatcccagcattttgggaggccaaggcaggcggatcacaaggtcaggagtttgagaccagcctgaccaacatggtgaaaccccgtctctactaaaaataaaaaaattagccaggcatggtagcactcgcctgtaatcccagctactcaggaggctgaggcaggagaatcgcttgaacccaggacgcagaagttgcaatgagccaagatcatgccactgcactccatcctgagagagagaaaaagactccatctcaaaaaataataataataataataataataattatagatcaggcgtggtggctggcacctgtaatcccagcactttgggatgccgaagcaggcatatcacctgaggtcaggagttcgagaccagcttggccaacatggcgaaaccttgtctctactaaaaatgcaaaaaaaattagtcggacgtgttggcaggtgcctgtaatccccgctacttgggaggctgaggaaggagaattgcttgaacctgggaggcagaggttgcagtgagccgagaccactccattgcactccagcctgggcaataggaacgaaactccatctcaaaaaaaaataatagtaataataataataataataaaaaatacaactacgtgcaggctatgttttcattacctacttttttatgcttctggtcttctgttccttcagtggtagtagtgcaggtgatcaggttttcagttctcagaagattgcataagacagtcccacaggctttaggtttttaccctgtgctgcccaaacccacagtaaatactataaaagaaagaatgatttttatccccaatagataaatgataacttttaaaaattaactattgaaaacacttatttatctattgctgtaatattggagattacttgaaatatgataacctgcttgttgtaactacatcagcaggtcttatcctgattgcatagggtatcagcacgtgcttaatcacttaagtatctttttctccttttacttcagaactgtcatgctgggtttttcagtttttgcttcagccctggaaacagtctctcaggagggtaggggtgggaagttagggttaggaaccttagaagaggaatttattttatttatttatttattttattttatttttttgaaatggagtcttgctctatcgcccaggctggagtgcagtggcgcgatctcggctcactgcaacctctgcctcccgggttcaagtgattctcctgcctcagcctcccaagtagctgggattacaggcacgcatcaccacggccagctaattttcgtattttttcatagagacagggtttcgccatgttagccaggctagtctcgaaccactgacctaaagtgatccacctgccttggcctcccaaattgctggcattactggcttgagccaccacgcccgactgtttcttgaccttttaataattgtcattctgactggcaaggcttgctttcttaacaagtcaaaaatcttctagcatgaagcaggaaaaggatatactaaaataactaaagtaatgatagtttacctgaacagaactgagtggttggttcaaatattaccctactgctctccatgaaggtattttattttagccctttaaattcctcttcctggctgggtgcagtggctcacgcctgtaatcccagcaatttgggaggccaaggcaggtggatcactttaggtcagtggttcgagactagcctggctaacgtggcgaaaccctgtctctacaaaaaaatacaaaaattagctggccgtggtgatgcgtgcctgtaataccagctactctggaggctgaggcaggagaatcacttgaacccaggagacagaggttgcagtgagccgagatcatgccactgcagtccagcctgggcgacagagcaagactccatttcaataaataaataaataaataaataaattcctcttctaaggttcccaaccctaacttcccacccctaccctcctgggagactttttccagggctgaagcaaaaattcaaaaacccagcatgtcagttctgaagtaaaaggagaataagatagctaagtgattaagcatgtgctgataccctatgcagtcagggtaagatctgttggccaggcctggtggcttacgcctgattccagcactttgggaggccgaggcaggtggatcatgaggtcaagagatcgagaccatcctggccaacatgatgaaaccccgtctctactaaaaatacaaaaattagctgggtgtgatggcgtgtgtctgtagtcccagctactcaggaggctgaggcaggagaatcacttgaacctgggaggcggaggttgcagtgagccgagatcatgccactgcattccagcttggcgtcagagcgagactccgtctcaaaagaaaaaaaaatctgtttatgtagctacaacaagcaggttatctttctttcttttttctttttttttttttttttttttgagacagagtcttgctctgtcgcccaggctggagtgcagtggcgggatctcggctcactgcaagctccaccttctgggttcacgccattctcctgcctcagcctcctgagtagctgggactacaggcccccacgactgcgcccagctaattttttgtattttcagtagagacggggtttcaccatggtcttgatctcctgacctcgtgatccgcccacctctgcctcccaaagtgctgggattacaggcgtgagccaccgcgtccggccaacaagcaggttatcatatttcaaggaatccccgatattacagcagtagataaataagaaaatgtagtatcccaccagggaatactatacagccataaaaaggtatgatatcatgtccgtttcagggacatggatggaggtgaagccatcagcaagctaacgtaagaacagaaaaacaacactgcatgttctcacttataagtaggagctgaacaatgagaacacatgggcacagggtggggaacaacacacactggggcctgttgggggagcgggggaagggagaggatcaggataaactgctaatgcagctgcacttaataccaaggtgatgggttgataggtgcagcaaaccaccaaggtgcacgtttacctgtgtaacaaacctccatgtcctgcacatgtattctgaaacttaaaattaaaattttgagggctaggcatggtggcttacgcctgtaatcccagcactttgggaagccgagatgggtggatcatgaggtcaggagatggagaccgtcctggctaacacagtgaaatcccatctctactaaaaatacaaaaaattagctgggcgtggtggcacgtgcctatagtcccagctacttgggagggtgaggcaggagaattgcttgaaccctggaggcggaggttgcagtgagctgagatcgtgccactgcactccagcctgggcgacagagcgagactgtgtctcaaaaaatatttaaattttgaaaaaaaaatgcaaggcagtgcagcctgagtggatagggaaatgggacaagctgaacctgggatgggagtaacaagtaaatgagagaagaaatgagaatgatgagttcccaccagctccttggctgctttcttatccagatatttctctgttcctagcattttaattttttctttatttgtatattatttagaagaggaattttagaggaatgggatagagtgtaatatagaatcatcatatttgatgcatgctaactactttggcaaaagatttgtaaaaggctgagagtttgactgttggctaaagtgagatgggggattagtagggaatgaaaattgttcaggctctttgctcatcattggaacgaattggatgtgttgtggacctacggaaacactcaaattcagtcatctccctgttgggaataggtttgaggaaccactggccaacctgttaaatgaacaacatcggacagtgaaggagctatttgaacagctgaagatgaagaaatcttcagccaaacagctgcaggaagtagagaaggttaaaccccagagtgagaaagttcatcagactctgattctggacccagcacagaggaagagactccagcagcagatgcagcaggtaggacttttcttggtcatgttaacattggatttttttttttgagacagagtctggctctgtctcccagcctggagtgcagtggcccgatatcggctcacttcaacctctgctttctgggctcaagcatttctcctgcctcagcctcccaagtagctgggattacaggcatccaccaccacacccagctaatttttgtatttttagtagagacagggtttcaccatattggccaggctggtctcgaactcctgaccttgtgatccgcccgcctcggcctcctaaagtgctgggattacaggcgtgagccactgcgccctgctgttaatactggattataccaaggcctaactctgaggccagaaattaacagctttgtaaaagtcagagatagttaccttaccacctcctaaaaccatagtatcttcacatcattaggagctcgagaagtcatcatgttcatgccttatggctcaaggaagagagcacacaaggacactaatggtattcagaaatatagatttcaaagagtccttagtaatctattctgaaatttaacaaccttcactgtgagaagtaggtttgtttttcctttttctaacctcagtccctctggattgaggttaagcttcctctggttctgtcattttgttcaagggaacatgtctgagagatttatgccaagatcctatgttattttcatactcctttcagaaagcaaaatatatgtgataaagttgcaaacatcttggttattgtctctctgggggctgggttacggtggctcacacctgtaatcccagcactttgggaggctgaggtgggaggattgcttgagccagggagttcgagagcaacctgagcaacatagtgagaccctgtctctgcaaaaaataaaaataaattagccaggcatggtgccatgcatctgtggtcccagctactcaggaggctgaggtgggaggattgcttgagcacaggaagttgagagggcgtggagccatgattgcatcactgcacatcagcctgagtgacagagagagatcctttctccaagaagaaaaaaaaaaaagatctctctggattcctgaaatgacaatgtggtaacatgtcacttcatcattttctttccatccccagcacgttcagctcttgacccaaatccaccttcttgccacctgcaaccccaacctcaatccggaggccactaccaccaggatatttcttgtaagtttccaaatatccataactctaaagactagagtatgaaattagcttggcaggttatttctcagttattcactgatcataatctatatttattcttctctcgggtatttttgattgttttgcctgctttctgttaaggcttcctgtgtttgctgagagaacgtaagccactgattcccatgaaaggacaaggagtgtattcaattttcttaatactgtctttctgatatttttattgaatcctcctcatctttagatccaacctaacttcttaggtttttggtaccactgttcgttttatagatgttgagactgggcacggtggctatgcctgtaatcccagcactttgagaagccaaagcaggcagattatatgaccccagtagttccagactagctggggcaacatgccgaaagcccgtctctacaaaatacaaaaattaaccagatgtggtggtgcgtacctgtagtctcagctacttgggaggcagaggtggaaggatagcttgagcctaggaggtgagggttacagtgagctgagatcgcgccactgcactcaagcctgggcagcagagtgagacccagtctcaaaataaataaataaataaaataaaagtaatagtcctaattcttggctgggtgcggtgacttgtgcctgtaatctcagcactttggtaggctgaggtggctggatcacttgaggtcaggagttcgagaacagcttgaccaacatggtgaaatccagtctctacttaaaatacaaaaaatagccgggcgtggtagcgggcgcctgtaattaatcccagctactcgggaggtagatggagaagaatcgcttgagcccaggaagtggagacttcagtgagtcaagatcgcaccactacgctccagcctgggcgacagagcgaaactccgtctcgaaaaaaaaaaaaaaaatgagtcctcattcttcataatcttacttctagttcaggagctagaccatatattccttagtgtttctcactaagtctaaaagtaaaacaagaatacaatccctgaatatctgggaactcaggcataatcttaacagagtagtttattgtgaaagactttatgatgatttttacctgtttttatcctgtagtaggaaggtcagcttctcatttagattctgaaggctactggtattaattgtctggaattgtcttaaatctttcttgtgtcctgttttcccagaaagagctgggaacctttgctcaaagctccatcgcccttcaccatcagtacaaccccaagtttcagaccctgttccaaccctgtaacttgatgggagctatgcagctgattgaagacttcagcacacatgtcagcattgactgcagccctcataaaactgtcaagaagactggtaggagacagatgtgtcagctttaagtttttacttgcggtgagaggtggtgggaatcttatcccatagataactaaggatacttgcctaggaatggaggacacaggacatttgtaatttcttccttctctcttttatcctccctttgtactcattatccaagttctagaattacatgataatctctgggcctgggtaaagtgtggaggcagtggacagtataggaatatgggaggtagagatctgaggctcagtgctaagaattggactacagcaatatgaggggtaagtattaggagtcagatcgagataaactggggcctggtaaagatgaaagtcaggtggtaaagtttggtcatgtttagctttttactgtcttcattaagatcaactaaggccaggcgcggtggctcacgcctgtaatcccagtactttgggaggccgaggcacggggaacacaatgtcaggagatggagaccatcctggcgaacacagtgaaaccccgtctctactaaaaatacagaaattagccaggcatgggggcacgcgcctgtagtcccagctactcgggaggctgaggcaggagaatcgcttgaacccaggaggcagagtttgcagtgagccaagatagcatcattgcactccagcctgggcgacagagcgagactcagtctcaaaaaaaaaaaaaaaaaaatcaactaactttatttaccatactgactgcagcataagtgatatctccattctgaatgaaatattgacttgcaagttaggcataagttagagattatacatttgccatgttcagtattttaaagaaatttgcaagtttagattctaccttgcattagtttagtattttttagaaaatacttgctatttacttaagccaaatatttgcttctgatttgtttcttgatttagcaaattagttgtggtttgttctggatttgggtttgtctttggattctattttaaatccctgagtcttatcgttaagttgaaaatagttgtatttaagtgtattatatcatagacacggatcccaaactgctttaacagctatattaaatgatatgaaatggtaatgaaaacttgatttaacaccaaattataataatatcttacacatctgttgacctgttgctttcttctggggatataaaaataacacttatggaaggagaaatatggatatagtagttttgtctctagaaatgcagaggtgcctgaaagtgagaggctgagagagggagagagaaatgaatgagactgaattgtctccttccttttatggttcttttgttcccagcctcaggaggaatctgggagaacttaagtaagaatcaaataaaagtaaaatttggaataccagatttgtgagggagattaaagaagttggaatcttattctggaagaaagaaagcattgttgaaggtctcttatccttcaagtatttaaggggggaaggaggtaaaacatttttgagcatacgctattgttagcaccttattttactaggtgctttttaagtgtttgttttacttagtgaataaagtgttccacataagaaagaatgagtcaacttttattgccattgaatgggactccctttagatataatgttagcttaagaaagactggaaacttttggggggatggtgggcagatgggagggaatcaagttaggtaaggatagctcctacctaaatgcaaaaatgcattcacaggcttttatgaagccctcttttgtcctagaagttgatttatccgagatttattttcttatagcgaatgaatttccctgtttgccaaagcaagtggcttggattctggccacaagcaaggttttcatgtatccagagttacttccagtgtgttccctgaaggcaaagaatccccaggataagatcgtcttcaccaaggctgaggacaagtaagtgtttactctgggggatcaaaacagcagaacatcccaaggagaagatgtagttcctttgaggagtttaggggaagtaagacttgtataataagacacggacacaaaagacaaaaggaaaagcaatatagatgagcagagccctctaggacgtgcttgttctagcagtgccaaatactgctttttgggagatgtcacacacatttttaaagcattttagaccggacatggtggctcacacctgtaatcccagcactttgaaaggccaaggcaggaggttcgcttttattttattttatgttatttatttatttatttagaggcagaatcttactgtgtcacccaggcagtcacagctcactgcagccttgaactcctgacatcaagcgatccttgcacctcagcctccacggagcagctgagaccacaggcgtgtgccaccatacatggctaaatttttttttttttttttgtagagatgagggtctctctgtgttatccaggcatctctcaaactcctggactcaaggcatcctcccaccttggcctcccaaagtgctgggattacaggcatgagccaccacacccaccagattatgaacatttttatggccctttgtgtgtattgccacactgttatcagcacatatgtgtatatgtaaccacgatcatatatgttgttagagggtagtattggtgccggtttaagttgtctgacagggtacctattcattttgtattagttttattagaattattctccttcctttctattctctttgaacttcctttgtattgttagtatacagctcgtcatgatacagctcatcatgatctcacgtttattaatgatttatgcctagtttcttatgttcccacataattgtgaagtatttgattttttttttttaaacagagtttcacttttgtcacccaggctggagtgcaatggtgcgatctcggctcactgcaaccttcgcccccggtttcaagtgattctcctgaccaagtagctggcattacaggcacctaccactacacctggctattttttgtatttttagtagagacgaggtttcaccatgttggccaggctggtctcgaactcctgactcaggtgatctgcctgcttcggcatcccaaaatgctgggattacaggcgtgagccattgcgcctggccttattcttattcataatacttaatcagtactcactaagtatctgaaattttctgttgagtagtcaccaacttgtacaagaattagatttacaaaaagtagattgaccaggcatggtgggcttacaactgtaataccagcactttgagaggctgaggcaggaggatcgcttgaggccaggagtttaagattagcccaggcaacatagtgagaactggtctctacaaataatggaagaaaaaaattagcccggcatggtggtgaacgtctgtggtcacagatacttgggaggatgaagtacgggaatcgcttgagcccaggcattcaaggctgcagtgcgctgtaatcatgccacccgctctccaacccgggcaacagagcaagaccctgtctgaaaaaaaatgaaaaggtagattgggccacacaccatggctcatgcctgtaatcccagcactttgggaggctgagactggagaattgcttcagcctaggaagtagaggttgcagtgagctgcgatggtgccactgcactccagcctgggtgacagcgtgagaccttgtctcaagaaaaaaatgaaagagtagattgtaaaatgtgttagtctggggagaccctttagaaggaaggactgtgaagtgagatttagtgttattctcctttctcagtttgttagctttaggactgaagcattttgaaggaactgagtttcctaatcctctaatcagcaagtaccttctaacctgcaaaactgcccaccaactgacagtgagaatcaagaacctcaacatgaacagagctcctgacaacatcattaaagtgagtgtttcctgcatgcgccatccgggcacctcaccaatatgtacccattcttttatcttgttattctcaaagaaaagaggaaccttcttttatctaaagctaatttctcccactttacactagattaattcccctattgccttttgggcaatattccgctggcagtattccacttatttgctttttgttgttgttgttgttagacagactcttgctctgtcactcaggcttgagtagagtggcgcaatcttggctcactgcagtctttacctcccaggttcaagcgattctcctgcctcggtgtctcctgcctcagcgtcccaagtagcttggattacaggcatgcaccaccacacctggctaatttttgtattttcagtagagatgaggtttcaccatgttggccaggctggtcttgaacctctgacctcaagtgatccacccgccttggcctcccaaggtgctgggattacaggcatgagccaccgcacctggtttcttcttttttatttagatatttatgttgtgtttttagagacgggttcttgctctatcatcctgtttggagtgcattggctcagtcataggtcactgtagcctcaaactcctgggttcaagtgatccttccactttagccttccaagtatcctggactacaggcgtgttccaccaaggctagctcattattttattttgtgtggagatgctgtgtcactttgttgcccagactggtcttgaagttttgacatgtgtcagtccgcctgcctcagcttggcctcccaaagtgttgggattacaggcgtgagccactatgcccagccttttgttttgttttgtttttgtttttttcttgagaaagggtcttactctgctacccaggctggagtacagtggtacagtcatagctcactgtaagctccagctactgggctcaagcattcctcccacctcagcctcccaaggagctggggattatatgcatgagccaccatgcttgcctattaatttttttttttttttttttttttttttttttttttaagaaatggagtgtccctatattgcccaggctggtctcgaatttttggccttaggcattctcctgtctcagcctctaattgctacttcctggtatattggatttaggccttatttattaaccattaaccataagccaaggaagctgaggatttacctgtctcctcactcccttactcccaccacaaacatgcacattttctgctctccaatctcctcgctagtaattatgtcacaattttggttaggttgtattcagggtttacactataagattttaaggactgtataaatactcttcacagctatgttattgtgataccttgcctttcctgctgaacattttgtttttcttggagtaaataatcgcatttttagggggatggggctggacttgattttattatgtaattattcccaggtcaacagtaaaggttacttaaattttcttaatctcctttcagcgtgtctggccttctagatattccgtcactttcatcttgaaggaattgctccttgagccctctgacactattccactctaagcgtgttgctctctgggcttgctgcactgatgttttgggctttttcctccccatcatcctgggaattctttttgcctcttactgtgttggatcttcttatttcctgaattctacatctgtgtttttgttttacttccttcctttagtgaaacacattctagtagcattttttattttaatttttttctaaatttttaaaaattgaggccgtacacggtggctcaggcctgtaatcccaggtctttgggaggctgaggcaggcagatgacctgaggccaggagttcaagaccagcctgggcaatatggtgaaaccccgtctctactaaaaatacaaaaattgaccaggtatggtgccactcacctgtaatcccagccactcgggaggctgaggcacaaaactcacttgaactagggagacagaggttcagtaagcgtggatcactcccctgcactccagcctgggcgacagaggagtctctgtctcaaagatcaagaagcagagaaacaaacaaaaagtacaaagatgtgcacagaaaatgacacacaactcaaacgtgaaggaaaaagatttttctgcagcagaatacggtttatcaagtgccttagcaccacggatgaaactagacaaattctaagccatattatcatgaattttcaaaacattggagccaaaggaaaaatcttacatgctatcagaggttgggagaaacaggtgttacatgaatattcaagagttaaatggggccgtggctcacgcctataatcccagcactttgggaggccaaggtgggagaattacttgagcccaggagttcaagaccagcctgggcaaaaaagtgagacctgtctcaatttttttttttttttttgagatggagtcttgctgtgtcatccaggctggagtgcagtggtgtgatctcggctcactgcaagctccgcctcccaggttcatgccattctcctgcctgagcctcctgagtagctgggactacaggcaccagccaccacgcctggctaattttttgtattttttagtagagacggggtttcaccatgttagccaggatggtctcaatctcctgacctcgtgatctgcccacctcaacctcccaaagtgctgggattacaaggtgagccactgcgcctggcctattctttttttttttttttgagacggagtctcactgtgtcacccaggctggagtgcagtggcactgtctctgatctcagctcacctcaacctccacctcccaggttcaagcaattctcctgcctcagcccgctgagtagctgggattacaggtgcgtgccaccatgcctggctaatttttgtatttttgtaggaataggggttttgccatgttggccagtctggtcttgaactcctgaccttaggtaatctgcccacctccgaaagtgctgggattataggcatgaaccaccacgcccaaccttcatttactcttaaaattgaactttctcaggctctttttttccccccttctcttctaatgcctttcacaccaccatttgcttaaaaggaagctttcatgtgtccaaggtatagattacgatgttgtctttgcagctgttgatcaagaacaaatcttacataagattgctctgagcatctgcttccttttctctctgtgacctaaactctccccttcctggcaaccagaatggagatcatcagttagaaaatattgaataattgtgaaatatttaaatagagattagtttaatttgaaatgtacaagtattcagcatatgctatttatatatgtgcgttcatggatgtttgtgtatgtggtcttgtgtgtgtgtgtgtgtgtgtgtgtgtgtttctcttgatccaccaccaccccattcaccagcctgacaggggacagtgtttccagaaggaatgtaattcatgcgcatttttttcatgttaagttttataagaagaccaaacagctgccagtcctaggaaaatgctgtgaagagatccagccacatcagtggaagccacctatagagagagaagaacaccggctcccattctggttaaaggtacagccctcttcctcgaagtctgtaggaggcagaaggtcactgaaagttctgagagaatatcaagggcttccttaatcgtctaatgctttagttgtagaactaggactttagaaatcttcctgattcacctttcttcccttacttttctgcccttctctgggtgattctacagcattttcaaaataataggtaaaataataatttgctaaaggaaattcacagaagtttctaaagtgtataattagaatgtggtctttgtagatttgatatgcagagagacccttcttggaaagatgccttgagactgtctaaggtctctaaaacctagaaagccctattgtttttcccaaattctttttttgttgttgttttgttttgtttttgagacagagtcttgctctgtccacccaggctaaggtgcgatctcggcttctcgcaacctctgcctcccaggttcaagtgattctcctgcctccgcctcctgagtagctgggattacaggcacatgccaccacacccaactaatttttgtatttttagtagagacggggtttcaccgtgttggtcaggctcatcctgaactcctgacctcaagtgatctgcccacttcagcctcccaaagtgctgggattacaggcgtgagccactgtgccaagcctctttttcccaaattctgacatatgctggatcagagtgttcttgtttccaataggccagtctgccatccatccaggaagaactgcggcacatggctgatggtgctagagaggtaggaaatatgactggaaccactgagatcaactcagatcgaagcctagaaaaagacaatttggagttggggagtgaatctcggtacccactgctattgcctaagggtgtagtcctgaaactgaagccagttgccacccgtttccccaggaaggcttggagacagaagcgttcatcagtcctgaagcccctccttatccaacccagcccctctctccagcccagcttcaaccctgggaaaacaccagcccgatcaactcattcagaagcccctccgagcaaaatggtgctccggattcctcacccaatacagccagccactgttttacagacagttccaggtgtccctccactgggggtcagtggaggtgagagttttgagtctcctgcagcactgcctgctgtgccccctgaggccaggacaagcttccctctgtctgagtcccagactttgctctcttctgcccctgtgcccaaggtaatgctgccctcccttgccccttctaagtttcgaaagccatatgtgagacggagaccctcaaagagaagaggagtcaaggcctctccctgtatgaaacctgcccctgttatccaccaccctgcatctgttatcttcactgttcctgctaccactgtgaagattgtgagccttggcggtggctgtaacatgatccagcctgtcaatgcggctgtggcccagagtccccagactattcccatcactaccctcttggttaaccctacttccttcccctgtccattgaaccagtcccttgtggcctcctctgtctcacccttaattgtttctggcaattctgtgaatcttcctataccatccacccctgaagataaggcccacgtgaatgtggacattgcttgtgctgtggctgatggggaaaatgcctttcagggcctagaacccaaattagagccccaggaactatctcctctctctgctactgttttcccgaaagtggaacatagcccagggcctccactagcagatgcagagtgccaagaaggattgtcagagaatagtgcctgtcgctggaccgttgtgaaaacagaggaggggaggcaagctctggagccgctccctcagggcatccaggagtctctaaacaaccctacccctggggatttagaggaaattgtcaagatggaacctgaagaagctagagaggaaatcagtggatcccctgagcgtgatatttgtgatgacatcaaagtggaacatgctgtggaattggacactggtgccccaagcgaggagttgagcagtgctggagaagtaacgaaacagacagtcttacagaaggaagaggagaggagtcagccaactaaaaccccttcatcttctcaagagccccctgatgaaggaacctcagggacagatgtgaacaaaggatcatcaaagaatgctttgtcctcaatggatcctgaagtgaggcttagtagccccccagggaagccagaagattcatccagtgttgatggtcagtcagtggggactccagttgggccagaaactggaggagagaagaatgggccagaagaagaggaagaagaggactttgatgacctcacccaagatgaggaagatgaaatgtcatcagcttctgaggaatctgtgctttctgtcccagaactccaggtgagagctggagaatattctcaagtatttcgtggactcagtaatatgtatcacttattgatatgccacctgcttgcttgctgcactatggatagtcctaaaatcatttgtatttgatttgtgaatgcattatgggacatgattgtggagttgaggtgaaatgagatggaaaggatgaaattttacttattatattaaactcgtttacacattaaattgaatcacctgaccatactttaaatgccttaaaaaatagtaataggctgggcttggtggctcactcctgtagtcccagcactttgggaggctgaggtgggtggatcacaaggccaggagtttcagactggcctggccgacgtggtaaaaccccatctatattaaaaataacaaaaattagccaggcatggtggcggacacctgtaatccctgctgcttgggaggcagaggcaggagaattgcttgagcccgagagacagaggttgcagtgagccgagatcacgtcattgctctccagcctgggcaacagagcaaggctctgtctcaaaaaaaaaaaaaaaaaaaaaaaaaaaaaaatagtaaataactgggcacggtggctcacgcctataaatcccagcactttgggaggccaaggcgggcagatcacctgaggtcgggagttcaaaaccagcctgaccaacatgaagaaactccatccctactaaaaatacaaaattagctgggcgtagtggcacatgcctgtaatcccagctactcaggaagttgaggcaggagaattgcttgaaccggggaggcagaggttgcggtgagccacgattgcaccatctcactccagcctgaaaactatcttcaggttacagaagtttgtaaaagggaacttcttcccctctcctgctgtcaggccgaatgtcagctatcactgggatttcttttttttgtcttgttttgtgtgtggttttttctgtgttttttttttgtttgtttttgtttttgttttgagatggagtcttactctgtctcccggattggagtgcagtggcataatttcagctcactgcaacctccacctcccgggttcaagcaattctcatgcctcaacctcccaagtagctgggattacaggcatgtaccaccatgcctgactaatttctgtatttttagtagagacgtggtttcatcatgttggcgaggctggtcctgaactcctggcctcaagtgatccacccacctcggcctcccaaagtgtcaggattacaggcgtgagccactgtacctggcccattgctgggatttcataactcaaggaattcccctcaggacagctgtagtgggctccccattgtttaacttcagattatcctgatatagctttgtgttgtttgcaattcatgagccactaagagccattataagtactctttggagggttttacaggaaacaatggagaaactgacttggctggcatctgaaaggcgcatgagtcaggagggtgagtctgaagaagagaattctcaggaggagaactctgagccagaagaagaggaggaagaagaagcagaaggaatggaaagcctgcagaaagaggatgaaatgacggatgaagcagttggagactctgctgagaagcctcctacttttgcttcacctgagactgctccagaagtggagaccagcagaactccaccaggtgagctaggcaaacctatactgaaggaccattctcacttaacctcattgtctagaggacagtgtgcagggtgggtagcttataaaccaggtggaggatttccagaggaaaccctctggatctcttctgcaacacccctcccccaaaacatgtttaatgtggtatctttgtggagaacagatactcagaaatttttaattcaattctcatccgttgctagatttatattagcttcgttcactttctttcttttttttatttttttattttttttttgagacggagtcttgctctgtcgcccaggctggagtgcagtggtgcgatcttggctcactgcaacctctgcctcccaggttcaagcgattctcctgcctcaccctcctgagtagctgggattacaggcatctgcccccacacccagctaatttttgtatttttagtagagatggggttttaccatgttggtcaggctggtatcgaactcctaaccttatgatccacccgcctcggcctcccagagtgctgggattacaggcgtgagccactgtgcctggcagttcactttgttaaactgattgttaccttatctgtcatgtgtggggctaagacccatgtttatttcagaaaacactgcttgttcctcatcaagacatagtctctcaaaagcactacagaagccacacttgctctttagacttcctttctcaatatgaagtagctgattatcttgttgtcatcccaattaaggcagttacactgcagactctgcgtagaactgacttgacggacttagttctcataccattttcccaaaaaccttttccttgaattgctccataatattgaataggatttggctggggtggtgcatgtggtggaatgggaagaacacaggttgcagggacagggaaacaatccttttcatgtgtgctacaaggagagagcatcaaagctgctggaaaaggccggaacaatcatcgagctcgcaacaagcggggaagtcgggctcgggccagcaaggacacctccaagctgctgttgctgtatgatgaggacattctcgagcgagatccactcagggagcagaaggacttggcctttgcccaagcttatctgaccagggtaggcaaatgctgcttcctgttattgccagtctctatgaatgtggctgcttcttcaagggagatgtttttcaacataaagtctgtttttcaggctatgcaacaggcttcatattcctctatcttggcttttctggcaaaagatctctgtgacagaaccacaaggagacatagaattcaatcataagtatgtttattgttagtaccctgccatcatccttctgttgaccagagattggcagaaagatgataccaccatcatcagtgggaggttgtgactttactgggtgcgctgataaggacctttatagaacctttggcttgagaagaaagatagtgggtacactggccagcaagtggatttcaggaaaatacattgctcttaagacatgaaccagctgggcgtggtggctgacacctataatcccagcactttgggaggccgaggtgggtggatcacctgaggtcaggagttagagaccagcctgaccaacatggtgaaaccctgtctctactaaaatacaaaaattagccgggtgtggtggtgggcgcctgtaatcctagctacgggggaggctgaggcacaagaatcacttgaacctgggagacggagtttgcagtgagccgagatcgcaccactgcactccagccttggtgacagggcgacactctgtctcaaaaaaaaaaaaaaaatgaaccaggctgggcgctgtggcccttgcatataatgccagcactttgggaggctggggtaggaggatccttgagtccaggagttcaagacaagacaagcctgggcaacacaggagacctccatctctacaaaaataaaaaaaaaatagtgagctaagcatggtggtgcatgcctgtggtcctaggtactttgggagtctgaggtgggaggatcacttgggcccaggtggttgagactgcagtgagccatgattgcatcagtgcactccatcctgggcaacagaatgagaccctgtctcaaaaaaaaaaaaaaaaaaaaaaaccacacataagctaaccacttcttggtagtgtcctggagaactgtgtccttctcttggtaaccacctgattcctttatccccctggaaagcagaatactggcaatgatagtcatagctttttcttatctcctaatgttttactgacattcctaacttatgtattatttactctcaaattacgcccatgctgaaatacatgtacaaacacatgttacctatttcattatggggctgtaatcagtaaggaaaggttagggctgtgacctagagaaaagcattgcttggttttgtgggtagaactgtggaacgtggaagatgatttttcacttgctcactcccagaaaaagatctttaccttgcctattgctctgtgtcttccattaacagtcagatgttaagatctgttggaggcacagcctctgatggataattcttggagctctctaaccataaccctgccttctcccttgtacccttattgcttgttgtggcccaaataaagggtgttgatgattgaaagtcttcccgtgtaggtgcgagaagccctacaacatatccctggcaagtatgaagacttccttcaagtcatctatgaatttgagtcaagtacccagagacggacggctgtagatctctacaaaagcctgcaaattctgctccaagactggcctcagctgttgaaagactttgctgctttcctgttacctgagcaagctctggcctgtggattagtaagtgaatggggaaaaaaagtacactgggactcctgggtcagagtgagactgggattgaatggggttgaataagactctttcagtctcccagctccttccagacacacagccatcccctagcccagagtgataaaagcctctgtcttttcagggtattatctttccaatcccattctcccattttctttacatgataaatgagagggttttacctatagttgccaaaggacaccttaggtgagtcatatgctctctgcttctcactggtatcaagccagacattcatttaacaaatatttgttaggtgcctcctaactgtcaggaattcctagcaattcctgacctcaattgctaggaatatagtaattacaaaagactaaaattcctgccctcgtggagcttacgttatcatgaggaaattcagatgatactccagaaaacatatatatatatatatcatatatatatatatataatatataaaatataaattataaaaataaatataaacagcaaaatatatagtatacaatgttttatagtgatcatgttttacagaaaaataaagcaggaaaggaaactagaggggtggttttatacacagcggtctgggaaggccactgtggtatggtaacgtgaaatgttgcagaataggaggctaaacatgagggatatcccagtagtcctggacttatcgtcataaaaataggaacaaagggaggaacgggattattctaagagttttattggggttaaatgacagtggggtagttctgcatataatgtgtgatgcccattttctcttctggtattatgaggttccaatcagtgtatacgtgaacaaaaaaaaaaatttttttttttttgagatggagtttcactcttgttgcccaggctggagtgcagtggcgtgatctcggctcactgcaacctccgcctcctgggttcaagcgattttcctgcctcagcctcccgagtagccgggattacaggcatgcgccaccaccacgcctggctaattttgtatttttagtaaagacggggtttctccatgttggtcaggctggtctcgaactccagacctcaggtgatctgcccacctcgacctcccaaattgctgggattacaggtgtgagccaccacacttggccaaaaaatttttttaaagagataatgtcagccaggtatggtggctcacacctgttatcccagcactttgggaggccagcctggacaacatagcaagaccccatctttacataaaataaaaaaattaactaactgggtgtggtggtgcacacctttggtcccagctatttgggtggctgaggtgggaggaccacttgagcctgagaggttgaggcttcactcagccatgattgctccactacactccagtttgggtgacaagagcaagaccttgtctcaaaaacaaaaaagagagagacaatggccagacacagtggctggcatctgtaatcccagcactttgggaggctaaggtgggaggatcccttgtagccaggagttttgttgttgttgttttattgttgttgttttttgaggcaaagtctgactctgtcacccaggctggagtgcagtggtgtgatctctgcttactgcaacctctgcctcccaggttcaagtgattctcctgcctcagccttccgggtagcagggattacaggcatgcatgaccgcacctatctaatttatgtatttttagtagagatggggtttcaccatgttggtcaggctggtctcgaactcttgacctcaggtgatttgcctacctcggcttcccgaagtgctgggattacaggcatcagccaccacagctggcctgtagacaggagtttgagatgagcctggacaacacaggcccctgggatcctcctgcctcagcctcccaagtagctcaagctacaggtgtacaccacggcccctgcctaatttttaaatttttttgtagagacatagtctcagtatgttgctgttcttgaactcctggccttaagcgatcctcctgccttggcctcccaacatgggattacagctatgagccaccttgtgcagcctgaaagttctttgtaatataaactctaaagtatcatatgaattttggtggctgatttcacaatccttaaaacagcaaacaacttgaaatatatacatctcttgaagctgttgctcacatcttaattgctttgggtggctacccaccagtggcccaaggtggatggaggttagggttttaaattagatctcaatagttgtaaactagaattttaaaccagggttctgtcatctcttgtgtcctagtccactagttcttatccttagaaccctcaagtcctgctctagctgtatcatgactcctcttttgcccactttccactctggtagtttgaggagcagcaggcttttgagaagagccgcaagttccttcggcagctggagatttgctttgcagagaacccctcacaccaccagaagattatcaaggtcctccaaggctgtgcagactgccttccccaggagatcaccgaggtattctttcctgtcctgctttcttcctgttgtcttccgggccttaggcctttcccttgtctctttccccaacctactccatacctttttgcctctggaggctcatgggcttcctggaggagatgaaaaaggcaaggacttttcaggctcacccaaagcataaagcactgggatagggagggattgctacctgaaaccggagcctgtctgatcttcacaggctcaggaatgccatggatgtgctggaagggatgttcagcgaaggaggttctgggacctgggaggggccttacctccttgctctgcttggaatagtgccctagctggagatcagtagggtggagtggagagtggaatcattaggaatcaaatccagtattagtacccttcccctataggcagctaaggaggaagagaaagttttagtattctttgttaccaggcagagtctctgtgtgtttcccagttgactgggaaagcagaacatggaagtatgtgggattgattgggaagggcagcctagagaggctctggagacttcctctttccctctgtgactctcctcagctcaagacacagatgtggcagctcctcaagggccacgaccacctgcaggatgagttttctatcttctttgaccacttgcgcccagcagctagccggatgggtgactttgaagagatcaattggactgaggaaaaggagtatgaggtataggacctaaggctgctgtagccttatgaagggggaaggccacacgtgggagggatattggcctggtgtctgtgctcagcagcaccaactccttctcagtttgatggctttgaagaagtggccctgcctgatgtggaagaagaggaggagcctcccaagatacccacagcctcaaagaacaagaggaaaaaagagatcggggtccaaaatcatgataaggtattttctttgtttatttgtttgtttttgagacagaatctcgctctgtcacccaaactagagtgcagtggcgtaatcttggctcactgcaacctccacctcccagattcaagcgattctcccacctcagcctctcaagtagctggaattacagacaggcgccagccaccacgcccagcaaatttttgtatttttagtagagatggattttcactatgttggccaggctggtctcgaactccttacctcaagtgatccacccgcctcggcctcccaaagtgctgggattacaagtgtgagccactacgcctggcctaaaatcatgataaggtatgccaagttattgaaaattatctatgtttcatgaatcaagccttgcgttttctcactgaacatttctgtggcttactatggcccaaggtttctagttcaaaggctctaggatctgagacgatcacggagaacaaaccaaaggtcaggctgatacagacatgcagagcctttgggaaaactgcagttgttgcaggggccccaggattccctagttagaaggatttgtttcttccccttttctgtctagctcagagttattacccttaattcaacttttttcatttttgctcatgtgagaaaatagagccaattgaggatgagcttgttattaaaaaaataaaatagaaccaagattccccatattaataataatgatagcagctaatacttagttgtattacaaagtgtcaggcattctgggaagtattttaatggattattgacacatttaattctcacagtaatcctatggagagattgctcttgtttgcattttacagaagacataactgaagtgcagagaggctgttgtcagggtctcatatttagtaagtggtggtgctaggatatgaactcctcaggtaagccatctgtggagtctactggttgtcactgctcttcaagcagtattttttttttttttttttaattcgtgtttcctgaccaagcgttttttctcttttctggggagaaactgcttcttagtagctgtatgaccttgggaaacgtatttaacctctctttgtttcagtttcttcatcataaattgggatgataatggtacttacttacgtcttgggtttattaaacagtgtcactgagtaggctttccatgggtacaaagttctctctgaaggggattggaagagatgggagagctgaagtcacagagagacagaaacaaagacattatatctcatgatggagctctccagtgattttgcctcagattatgtctgacttaaatatttcttgaaacatctggggcaattgggatatgtcagtctttaggtcatttagggattgtttcagggattcataataggccttaatctagtttgggctattgatttccccaggcgatgtgaggagttgatacataaaagaggatggggtccgggcgtggtggctcatgcctgtaatcccagcattttgggaggtcgaggtgggtggatcacttgaggacaggagttcaagaccagccagagtaacattgcgaattcctatctctactaaaaatacaaaaattagccataggctaggtgctgtggcttacacctctaatgccagcactttgcaaggccaaggcgggcggattacttcaggtcaggagttcgaaaccagcctggtcaacatggcgaaatcccatctcactgaaaatacaaaaaaaattaggcttagtggcatgcgcctgtaatcccagctacttgggaggctgagacatgggaatcgcttgatcccggggagtggaagttgcgctaagctgagatcacgccactgcactccagcctgggagaaagagcgagactccatctcaaaaaaaaaaaaaaaaaaaaattagctaggcgtggtggtgcgcagtcccagctacttgggaggctgaggtgggaaaatcacttgagcccaggaggcagaggttgcagtgagccatgaatgtgacactgcactctagcctgggtgacagagccagaccttatctcaaaaaaaaaaaaaaaaaaaaagcatggggagagggtgggctgtgttgtgttcatatggctcacaactttagcttcctctcttggtaccaaaaatacggccaggcacagtggctcatgcctgtaatcctagcactttgggacgctgagggagggcagatcaagaggtcaggagttcgagaccagcctgaccaacatggtgaaaccctgtctctactaaaaatacaaaaattagctgggtgtggtggcgcatacctgtaatcccagttactcaggagcctgaggcaggagaatcccttgaacctgggaggcagaggttgcggtgagctgacatcgtgccactgcaacccagcctgggccacagagcgagactctgtctcaaaaaaaaaaaaaaaaaaaaaaacaacttggcagctaatcaagcccaagtatctcctaggagactgaatggccagatggggccaaggactgtgcctgctcctgccatgaaggaggtccagattccaagctgaagaagagcaaaaggcggagctgtagccactgtagcagcaaggtgaggaaagtatcaagggtcccgagggtatcagagctgctgggggattgtttgctaccaagaattgtaccttactgaattcctaaaaaggcacatatataaataacattcagtatacacatatgtgtacatatgcaaaataaatggaatctgctagaaatacgtgatagattttgttttttaaagagaattctgtgagtaaagcttttggaattggaaaaacaaaataccagttaaaatatttccctcagatattagaaaatgaaataaacctctgtcgtgaaaatagtctctacaagtaatcctggttctctagaatggagttggttggcaggaaaaacacagttcttggtgagagaaggagttgtggaatccaatactctattcggggccatttaaaatccttggagcagggaggcagaggttgcagtgagccatgatgataccactgagctccagcctgggtgacagagtgagaccgtgtttaaaaaaaaaaaaaatcaaatccttggaggaatagctgggcaacagggcactcaggaggctcaggtgggaggatcacttgagcccaggagtctgaggctatagtgtaccaccatggtcatgcctgtgtaaacagccactgcactccagcctgggcaagataatctgtgtcatctgagaccctgtctctgtctatcttttctttttgtttgtcatttgagacagagtctcactatgttacccaggctgatcttgaacccttaggctcaagtgatgctcacaccttagcctcccaagtaactaggtttataggcatgtaccactgcacccagttgaaactctgtcaacaaaattgttggagcagacatgcatgtgggttgacttgatgagcatcaggcagggcttcttcctttggtgggccccaaccaaagacataggcagtcagaacacctttgacccggaagaccatccctgcaggtctgtgacagcaaatcctacaagagcaaggagccccatgagttggtgggcagcagcccccaccgagaggctagtcctatgcctggtgctaaggaagctgggcagggcaaggatatgatggaagaggaagccccagaggagcgggagagcactgaggccacccagagcaggactgtcaggaccaccagaaagggagagatgcctgtttcaggtgagtgatttgccaacgcagcccttctgttcctcagtctcgttatcctgtactccagacaggaacctccatgagcctggataaatagccttttcagggatggatataccacctctttcactgatggacccataggaagcccttctgctgttcaggctttttctatcatatggcctcactcctcttgcagaattaagaatgccacaaatttcatgcaattcaacattgtcttgtgttttattccaaaaacccttccccctgtctccaaatctagtgtaatctacatcctaaagactgggccgttctcagctttggcagtaggactttatatctttgcataagtgacattatgccccccacctccacccaactcttttattatttatattttcttgtagagatggagtctcaccatattgcccaggctagtctcaaacccctggcagtcccaccactttggcttcccaaagtgcggacattataggtgtgagccaccatgcccagccctcttttttattagaatttttgcacagtacctggccacaggtaatttctcgtgcttaggtgcatcttgaacctgacagtaccctgagatccttattttcctcctaagcaggattggcagtggggagcactttgccatcccctcgagaagtgactgttacagaacggctcctcctggatggcccaccacctcattcaccagagactcctcaatttccccccacaactggagctgtactgtacactgttaagagaaaccaggttgggcctgaggttcgctcctgccccaaggcatcccccagacttcagaaagagagggagggccaaaaggcagtgagtgagtcagaggctttgatgctggtctgggatgcatcagaaactgagaaattgcctggtaccgtggaaccccctgcttccttcctgagtcctgtttcctcaaagaccagagatgcagggagaagacatgtgtccgggaaaccagacactcaagagagatggctgccctcaagcagagctcgggtgaagacaagagacaggacgtgccctgtccatgaatctccatcaggaattgacacctcagagacttctcccaaagcccctagagggggtttggctaaagacagtggaacacaggccaagggtccagagggggagcagcagccaaaggccgcagaagctacggtgtgtgccaacaacagcaaggtcagctccactggggaaaaggttgtcctgtggacaaggtaggtaagggtggatgacgtgtgtttggaaaagagcatagaccacatccatgtggctccctagggttaatcatgatacctgggttacagggaagctgaccgtgtgatcctcaccatgtgccaggagcaaggggcacagccacagaccttcaacatcatctcccagcagctgggaaataagacccctgctgaggtaggtgcgggttggggtgaagacctggcaaaaagaggtcaaggtggccaactaacagacagaaaggccaaagaaggagttttgatatccaagataataagtggtttttgtaaaggtttgatctaaggaaaggcttgactcatcagggtggtagtggttctagaagagaaaggacactagattttgaggatttttaaatttttatttatttatgtattttagacgcagtttcacttgtcgcctaggctggagtgcagtggcacaatctcagctcactacaacctccacctcccaggttcaagtgattgtcctgcctcagcctctcccaaagtagctgggattacaggcacccaccaccatgccaggctaatttatttatttttagtagacacggggtttcaccatgttggcaaggctagtcttgaactcctgacctcaggttatccacctgcctcagcctcccaaagtgctgggaataggtgagatactgcgcccggccaggattttaaagtggaagccccagtttccattccagttttgtttttaggagttgtgtgactttgggcaaaacatttagcctcttgagtttccttatctataatgacatagctctcccaaccttgctgtgaggaataaacaagagatttttcaaatcagtatattgtgcttcataaatgttaacattgttacaaagcatcagtgaggctgggcgcagtggttcattcctgtaatcccaacactttgggaggccgaggtgggtggatcacctgaggtcaggaatttgagaccagcctggccaacatggtgaaaccccatctctactaaaaatataaaaactagtcaggtgtggtggtgggcacctgtaatcccagctactctgaaggctgaggcaggagaattgcttgaacccaggagacggaggttgcagtaagctgacacagtgccactgcactccagtctcagcaacagagagagactccgtctcaaaaacaaaaaaaaaagaccagtgaatacagccctcctcctttcttaggtttcccaccgttttcgagaactcatgcagctcttccacactgcctgtgaagccagctctgaggatgaggatgatgcaaccagtaccagcaatgcagaccagctgtctgaccatggggaccttctgtctgaagaggagctggatgaatgagactctgggaatcatctacacaggaccaaacccaacaggcgccctggcaccggggagggggtagttgtactctgcttgtacagtccttgagcccagtttacagatctggagagcaggaggccaggacaaggacaaaggctggaggatggagtaggacccaggggctctgccatcctaggcatcattcaaggtcttttatgaagactttacagatgtcctctgtaaatagcatcgagagtggagttcagctcctttctctacttttttttggtctgatggcacatatttattgttctgtggtctaatcacagtgtttctaaatgtaaaaagtgcatatgttggtgtagctagtcccgcgacattgagctcctctgcatgaagacactgggctcctgcatccagctgtttttattgcaaactagctcctttctcccacactgggaactttagtccacgaggctgtcaccaccctggtagcactgggccaggctttgtagctcctgcagcagctctgctacgtcatcgtgctccactccagcatccatgaagctggcccagcgccgcaagtcgagtttggtgaggtctctggccaaggcttccagggtctggtgcagggacgaagaggaacacagtgccccaaacactgggatgctctccactgctgtggagggagaggaaacagagacctgtagatggatgattattctgccctgggactcgccaaactgataaggaagtccaaccttagtagacttgattgtaaactcaacaaatttggtgtattgtccccttagtacaccagtactccagaggaagaatgcttttcttgggagccatagggtgaataaaggaatgtttaactgtggactttttcagcacttttaatccaggaatggagatagtaaaacctctcccatacttg

SEQ ID NO: 1194 - DNA, 129066 bp, Homo sapiens
gcagatagctcggccgcgcgtctcagccgccggggccccgagcgcaggcggcgaggccaccacacctgcagagcgctcgggctgcctagccggcacctcgcctcccgccgcgcaaaccccttctccccacgcgccgagtctcccatgacgcccgagccccccggccggcgacaatgaccacttccctgcaagatgggcagagcgccgcgagcagggcggctgcccgggattcgccgctggccgcccaggtgtgtggcgctgcccaggggaggggcgacgcccacgacctggcgccggccccctggctgcacgcgcgagcgctcctgccccttccggacgggacccgcggctgtgctgcagacaggtaggcaaccctggagggcgcgggggagtgtcctggctgggcagccggcgagggggtgaggaggcggtcctagggggtgagccatgtgcccagagctgggccaagtttgtaaaagtctctgaagacaatcccctttgagctggctcctaccggatcagcaggacattgcgatctcacagcgccttataaatagcatcaccgtttcattgagagctctcatctctctcgcctctgcccatcggtggtgaaactaggagctcaggctgcaggctgatcaccttctgttccttcgtggccatgcattttcacaaagtaaactctattttattttatatattttaaaaaaatcgtagcataaatgtattcacctcccacatagagtcttacagcgaccctgtagaagcaaagcatggattgacattcgagcagtcttgctgttcggcaggaaagaatagaggctttaaagggtttcccaatctccatagcattcagcactaagtgcctttagagttgcacatactttcggaaagaaaaagggttacagcaatacaaaaatctatagtcctttatattcatacatttaaatgttactttttttttcctgattttcaaagcgctccaacttcagtgaagttaaaattactctccagtggactatagtacatttatactagcaagttctattaacttaccgcctcaaaacactgccttgctgtttaatatctataagcgcttgaaaaatcaacagactgtgtgtgggcaacattgtgaatgaaatttgaagtgagatgaaccacagctataattaataaatcataacttccaaaagtgattagtaaaatatcataaggatgaatgcactaaatgcaacttagagactgtcaatatcatggatgcataacaatgtatgacttctcaggtgatgtttggattagtaattgtatagtctatttttctgtttcaggaaaattatcaaaagtgatggagtttctatgcctggtgatttaaaggcaagagagagagaaggcggtgggggggggaggggtggtgggaggggagagagagagagagagagagagacagaaagagaggaactataggagatttgtttgtatctaattaacatactgtattttgacccatagaaagtacatcacagaccttttctatatactttatataatatgagccttgtcacagagtggtacatgttcgccttagcacactttttattcctgacagcaattatattttacattctgttttatgtaaattacatcctatgttctcttactgtaggagaaaaaagaaagatcttgatgttccggaaatgccatctattccaaacccttttcctgagctatgctgttctccatttacatctgtgttgtcagcagacctatttcccaaagcaaattcaaggaaaaaacaggtatgcatttttaaattttaaatttcaaaaatcttaggagttctgaatccatacagtctttaaggtgttccgtaatttacagtattaacaaaggattagcatgggctctgttaaataactctgttgactgacatggtcctttggcattattttccatttagggccttattcttctaagccgtataatgggaatgttaaaacctacctccgagggtcttgggatggattaaaacagagaatatatataaagtgcagtggttgagaacaataatcattcaccagataggtagaagagatgatcatttttaagccaggaattgggcagaggctgggacggggtgggcagtagtagtggggtgagaaggggattgactgattcctttaatactttctttaatttttcacattttcaacccaagccaacctcatttacctaaggaaagtgatatagtgatgctgtggcaaaaggtatttagaatttagggtcaacatgtcttcatttcagtggattcctcagtttggaggctctggctgcagaagatagatgactcgtagtgataattagaagactaaggaccatatctttatgattttctccttttctagtttgggattgacttaagcaaattagattttaaggaccaagcaactaacagaaaatacatcatggctgtacatttggaggggaaaaaaatagtgtatcatagaataattcatctcttgtcatatactttctcccagttttgacccagcaaaacaaagagaagcctcactagacaaaatgcaccttattcttacaagggtggaaacaatacattgaaatagccaggtacttgaaatgggagaaggataatgaacagcgaggacaagacagttggccatttttccgcgtctattgctctctttcttatttctgcacctttattgcttctaatgggttcaactatgtgtgtttatatttttaggaatggaggaaataccttaggaagcagatgaattattgatcatatacagaaatgatagagacagtaggaaatatgtttgatggaagccctgtgtatatatttttggggggaggggcttgaagtcacttggtacacaggtttttgggtaaggattggagaaaatgggaataaatttttctagaagcagaactatgttctgaattggcatctttgaaagggggaataaacccttaagtgggtgggactgtaactttgtttggggagacaaagaggagactctcttgagacctttattatcaggatgaggtttaaagtcagatcccaaggaaaaaacagccctagtgaaacttccaagctctttgagagttgactttttggtttggatagaaaatggaagtaaggataatagatttgactgtgtgccatggtagtggaaaaaaaaaaaagaggccgggtgcggtggctcacgcctgtaatcccagtaatcccagcactttgggaggctgaggcgggcagatcacgaagtctgaagattgagaccatcctgtccaacatggtaaaaccccgtctccactaaaaatacaaaaattagctgggtgtggtggcctgcacctgtagtcccagctactcgggaggcggaggcaggagaatcgcttgaacccaggaggcggaggctgcagtgagctgagattgtgcccctgcactccactctgaacgacagagcgagaatctgtcccccgctgacactacccccccccccccaaaaaaaagattctggcttgtccttgagccagagtaagaaaaggaaatgtctgatgatgacataatggtcatctggaagaatttaataggtagttcccaaattactaagggcctgctatgtttctcacaaatcctaggcagtaaggaccctagctaagcaacaataccatgcaagatatatttaaaagatggggctttgatttggggttgtggtagcgggtggagcctgaaccagaaggaaagtaaagggaaggatatctgggctgactcactttaatgctatgaatggacacttgcagaatgcctgtgtctgagagatttgttgatgatgcagggtttgttttgaatagaaagtgagaagaggtgttggtatgcttatgttagtataggggacaaaagagaaagaatgggtaaagtgccagggttaaggcaggatgtgccctaagtgtggatagtcatcagactagagtaagacgtcttagagattgatgacatttcctcagatcaggtttaaactggaaaatgggcaaaaaaaaaatagcaaactggaaatggggaaaaggtgatattgttattgaccccaataggtttcctgctctggccttgtatcctgtgtccacaatgaccttctcaaagaacactgtacccacacacacacctgtactgttccctgagcagagagtccccgcctgatttttaaagatccatcccagagggctgtccctacctttgaagggcccttcttgctgatctcttccttggcccaatggttgagatctctatgaagacaagggtaccccaaagttgaggaggagggaggctgctttttactttattttatgcttcctttttcccccacctagactttgcatttagaactgatccttttgctttagtttctttatacacactcagttctttgaaatgaggaaggttttgagaatagatgactctatgtaagtgagtcccccaactcagtagctttgcaacacatattacccttttacaagatgctgtttttggcccagtttatctgtaaccttcagttgagatgatgtaagtgactatgcgatatgttctactgagtattatttatggttgaaatattataggagaagatgtctctttactttatattctctctcatttgtcctgtttaaccattccagtcattttagtgattcttttctctccacagaaaaagtgaagaaaataattgtacttgttatttacaaatcaatgaccagaaaatttgagagaatccagactaaaaatgttaaatttcatctggcctttcaaaatcacagtcaaaaaccatcttacaagtcataaattttgtttactatttgagatgcctacataatgcatgagtggtaaagtgcattgaagccacaaatgggatatgttttatcactttttgcaaataaaatgtcccaaagtgtacaatactgtaggctttcagtaccattatttttaaatgaaagctagagtgagagagaatccatattctttttttttttttttttttttttttgagacggagtctcgctctgtcgcccaggctggagtgcagtggcacaatctcggcttactgcaagctctgcctcctgggttcatgccattctcctgcctcagcctcccgagtagctgggactagaggtgcctgccaccacgcccagctaattttttttgtatttttagtagagacagggttttaccgtgttagccaggatgatctccatctcctgacctcatgatccacccgccttggcctcccaaagtgctgggattacaggcatgagcccctgtgccccgcgagaattcatattctttattccctttccctctttttataatgatggccagatttcctaggcatctttctttgtgtttactaataaagcaaatttaaagtataccttcccttacatacatggtccagaaaagttacttatattaaaagtgacttccattatgaacttaatctcttttttctaatttatgatttaaatttataaggaaatcatctgttagtaatgaaccctaaacacctattgtttgaaggaaagcaaagagttagaaatctttatttagctcttgcagcagaatcagttcttgtcttttttgttgacccctaggtaatttttgtgcttggacatagcctgtgtagtagctctggttaattgcttcccaggactatgttgtacaactaagtaagaataaagcctctgaaggctttagagatttaaaaaatgctatgaaaaccagtgtcatgaaatgtttgagttggatgggatttttcagatcttctattccaatattcttctttagtgatacgtaaattgagtttaaggaatgctatgtggcacagccagcacctgaaatctggatttcttgaggctttgacagtccctttttaggaaggtacaatttctaaagaaagcaaggactgtaaataagagtagtataataatacatgtgtaccagtgttgttagttacaactctcctcataacacaagaagaacaggggagacaaacgccatttgttaatattcatctaaggacctggaattcctctttttatttcttcccgaaatgtaactacgttttttcttctagctttcttctccatcttctccctaaaattggtctgagaaatctatcaaatatttgattttattatcaaataagatttattagtattattaataaccagcttttgtgtgtggtttacggtccacaggatattatttcatgggaacacaagaaaatgagtatgtcacctgcattttaagattacaaaaagagtatgcaaaaactggaagggatttgcccatgcttccacagtttaaataaagggagatcaaaaagagtatcatgtctcaatgtgtcctgtcccttaccacactgtttctagtgtattctttattaaattaagcctttttttgtatgtctcagaaaaataaaaatttatctcaaataattaaaaaattagttttccatatgctcggccttttatttcttttttctctaccatgtcacggactttcaaaggataagcagatctctgtccccaaattaaagggcctcttatatcattcctttgtgatgccagtaattaccccactttggacatgctgaacttgtatgtgtggtcctataggaatcttgtgtggctgctacattaactgaaatttcatatacttatttttctagtatacatagaagtaaaagaagagaaacccatgtacatattgtagtttttccagactcagcaattatcaagattttgcctcatttactccatctatttcttttttaaaaattttattttctttgctaaagtattttgaagtatatcctggacaccccatcattgcatctctacgtagttttgtattcatctctgaaaaatgaattttcttttatatcccaaatgccattattccctaacataaataacagcaattccttgatatcgtctaaaaccattcataattgaattttctcagttggaatggctcatgaaattctcaaattacaaactgcttagctttcaaatgtctgaaaattagctctttggaagtttaaattcatttttagatggaaacaacatcataaattgtatttaggccctctgagctattttacaaaatcccatttaattggaaacaaaacatatatgcagaaagaatgatagaaacaatactctctcctattagggtttcaaacaaatctatctttccaacggcaatttgctacttttgagtgctgtcacttgatgaatataattttttgggagaatttgaaagcgtgcagatctttgtagcagtgttgaagcaggctttacagctgcgcttctcaaagtgtggtcattaaatcaccttcttcagaatcagcagggatgcttattaaaaatatggatacttggacctcttgcaaaacccactgaataggaatgttctgggggaggttataggaatttgattttttatatttttttctctttgatatgtatacaaatcagtgctactcttaatctctaccattttcaaactggggcaattggacctttcaaaactgaggacagttgtgttttgttgacaaaggtgagtatgttacaaatggcctttagttggtattttagccaggtattgattgttcagacaaaacagagcctcaaatgaaccagcctgaaaggctgtgttgtagtacctgaaggccaaaaggtcactggtctcatgagaggctgaaattgggagcaagaaagtcagcaaaaatcaagtcaaccactttctctattctctctcttttgttctcccacaaacataccacatagtctctgcctctccttgcaaattcacatcatttttgagatttctttgcagtgttgcttgccctgatttcatgtcagtgccagcggcctcaagtggctgctcccaagttttccacctattagtggttcagtacttggtaactgactgggaactgtatctggagaggtatgttagtccagtgtgtccagatcctattcaatcagatgtggccaaggggacagtgggccctggaccactgttcagtctgcaagggtgtggtaacatgtgagaaagaggtacaggtttagtaggtatggcatatggaggcactatgtcctaggggcagctagtgtcctaggggaaaaaaaagatctcaaacaggacacaaaaactaattctaatcatatttgtatgatatatgatgatccaccaattggtttatttgacttaacgtacccagttcagagtgttcagctcctttgtctcaattcacttaatgtacgtgaagcatacttattgggcagttgtttcagttgatgtcacccttcagggatgctcagcttccttgtccattttcctgagcttacgtcttactgaggtcccttaacccctgatgacaggaattaccaactcaggttccttcccaccttatgctagttaccttcattgtaggagaagttagctttcttttcctattttaaaacttaaatcccctagcagatcttctatttgtcaaggttttatttctagtttgaaggttgcctttaatttttggttaatttgcagggtacatttgcagtccaagctttatctacaatatgggttttctttttaacgttattgaaatctcagcttctggtttgtttttccctggggcatataatatgttctgtcaagagaaagaaaattggagtcatcatggttcaatataagtgtggattttaattaatataaaaaagatttctgcagtcttatggatattgctttgaaaaaacgtcagcttatgtcaaatagtaataaactctattgtataagtatatgcttatgtgtatttcaatggtggtaagcagacctgagaattgtccttttgacattacagataaaggtcagctcaagggagaccccagagaatggccacaagtctttgccaaggcaagggagtagaaagaaagggttcaggattaatttagaagagaaatggcaggactgacatagggagaccatcctttaattcttgtccttttctttggcccactcatttaacattttttcaaagccacagaaaaaataaacacaaataggaggtttaatattcttaaccagcttacaaatgcttgtattccagaagatctttaataaattggccatttattcacatacatttttccatagacgtattgttacatgcagtggttaggtggtcaggccaaagccttaaaatccataatggctccaaagtatagtgctcttacaacattgcgtgtaccgtttttaaaattgcttctgtggaaagatgtgtcaatatgatgtgactgaaagatattggaacaggaatcagcaaacctagtttttaatacagtcctactacagatgaggggtgttatatcagcccattgctcaccctttctgtacctgagagctctacaattttattgtattcctagagcaagtgattctgatggctccagaagcagtaatggctcctgtgcagcagatacaggagtcgtggaaagcagggtttcttttgttccactagccctagaagctccctcttagcctctgttcaggtattcccatatagtgaccacacttttttgtgataaagagtatgtttggggtgtcataggacaaagagcacaggagtcacattcatggaaataattggggcagaagggtctggttaaactagaaactgcagcaaagtcatagttcaaatattagaagaagaatcagaaaaggaatcacatctagtaggagccagctcaagtggtgaagttaaagtacaggaccaagcatctaaacttagaaataaggatacgagataagatgtgaccacttgaggccggcataggtccaatacacatttggctctacttggtttaataggtacggggtggtcgtaacctctgaattctctaaatttatctttctccaccctcaaatcatttatttgattacttaagccaaaatttaaggagtccactttctgttcttgttaagtactgcttcatctttcatcaaagtaggcttgaatctatatacatctccccatctctgctgccaccatcctaatttagccattgtcttctcacctacaggagccccataaatggcctcctttcttctgtgttagcttatcttggttcattctacatacacttgttatagggaactttcagaaaggtaaatcgcggcatgtaatttcctggtttaaaaaattttaataccttagaatgaaatccacatttcttcctttgacaggactctccatggctttgtccctggctacctcttaaacctcatgtacattctaccctttgttcattagactccagccacagtcctatctatttgtgaacttagcaaacttttttttctatctccaaggctttatcgtagctgttttctgagtctggaacctatttccctggctcctgacatacctgattcctctttattctctagatttcagtataaggtcatctcatccaggagatttttttttttttttgaccagcctaaatgtagcctgttttttttttttttttaatttttttttcccatcacatttctcagtttgtttccttggctgcacttaccataatccgaattgtctcatttatctatttggtctagttgttttattctttttccctctatgtgaattatcttggctttattgttcttgggttatttcatggaaagaatgaatgagtaaatggattattgaagatacatagttaaaactaatttaacaaattatattttgacatgtttattctaatcattttcagtcatcttcattaaattagaataaaattaaatttgattaacagactctatttaccaaaataaattatatttttattttttaaaattttttcttgacaattatttctttgtaatgcaaaaataaaattgaatctagatcctggactaagtggattttaaaagtacgtatcttttgctttcatttaacacgtatgaaaatttgatccgtgtaatcaagatatttctgattttatacattattttttatatagtataattataagtgagtgcccagtgaactgctatactttctttaagtttactgtgtgttcataagatccacagctttagaaaagattaagtggaaatattagttaggtttatagtatgagtctctcagagcaagaggtatatgctagcaaatgttttaattattaagaattaatatcagtggtgaattatttaggtcagtgttcatcagatggaagtggggagacatataccctttgaaaatacatgaagactttccaagggttgtcaaacatagatttaagagaatcagttttcacttcctgagaacccacctgtgctcccagtaagctcctcttggtgcattaccctggggcgtgtaaacatccagggcatcacacacagggaaagcttcctttagtgattaatcaaagcatcacaaataagaaggagttcctttttaatgtcttaagcctctttctgttaagggtgaatcatggtggaaatgaggattttgaccagtgttgaaatattttgaattcagatagatgatggtgtgatgaagtaatcacaattttcatttttcagtttttgacttcagttcttccatgtcctgactgttgtcaaagaatatataataacccttgagggataacttcttaagagcaaagcaaggagtgcatcagtgagaaatattgattgctgaaatggccttttgtcatatatttaaatgtactatctgctattctggatacatatgtataggatgctgaaagaaatactataaaagcactgaatttatgtaatttatataataaatatgtatttataaatgcaaagaaatcctataaaagctgaaagaaaatgcacgtacaaacacctgatatgatataggttagtgctgctggtgaagttacctgggaagtagacttggagcacaggtttgccttcaggaagtttgctggggagagcccgtggaaacaatacttgtaggaatggacacagggagaagttgggctgcagcacagccacagcaaaggtccagttgatcccgtaggagagctctggagctggattggccctacagaattgttcagaattagggcacaggtgctgggctgtctaggaaatgtcagaacttgggcatggcagctttctttagcatagtgcaatggcagtcaaggaggccttagccacaagtcttagtggctgatactctaacagctgggagaatgagtgcttcagtcttgaaggaggtgggtttggatgttgtgccacagtatctgccatagttagtaactgatcttttaaaatgttaatagaaatcattttggggactaccaaagttttcaagataaattggttaaaactcaagaataaaacatatacatgatttctttcaaattttgtgtgtgttattcaatattgtacttactattttggcaaatcatacgataaactctttattccaattccagtcaattcccatcctattttatcataaaatattttaatattttctaatacctaaaaaatgatatgccagctactggactatttattttttaatgtgcatgtaccgtttgcattcctgaaaaacataagaaatatttgtcatggtgactactacatttaatagaactatttctaattttatacttgatttttatttagttatatccaaaagctgaaacccaatggtgaaaatgtacagtaacacaattgccaaaggaattctatgtacttcctagcacttcatcatactccccagaactcttagtcctgtattaatttaactttttttcttttttctttttttccatttgtccaaggcatgaacgaggcattggctactgggatatataaggggttactttgctttgttcctagttgatatgagataggcaccatcaatgtattactttaattttgactgctttcagctatttctcttctaagatacaattcataatttatttttcagtgttttaaatttttttttctcaaaatttaactttgtttgctttttttttagagggagtctcgctcttttgcccaggctggggtgcagtgggtgatctcagctcactacgacctccacctcctgggttcaagcgattctcctgcctcagcctcctgagtagctgggattatgggcactcgccgccacacctggctaatttttgcatttttagtagagatggtgtttcatcatgttggccaggctggtcttgaactcctgacctcagttgatctgcccgcctcggcctcccaaagtactgggattacaggtgtgagccactgtgcctggccaaaatgtaactaatttgaattgaaaagtaaagttgggctttatttgataaaatataagtctgatttggccaattgcttttgagagtgaggattaactttccaattatatggctgacatttttctttagaaactaaatctgaagccttaaacttttgatgaacatatatataagacacattataagacaaaagcatcttaggaaaaaaattggaaagcaatcatgcagaagcctcgtacttttggtttggccaaggtatgataaaattaacacattttccgagtgtattaatttgaacaaagtacatttaagttgaagggtaaaaaatcattaatggctaatggtaaagctttgttgatggtaaagctttgttgaaactatccagaaattgataaaatgaatgaatctgggtgacaaatctttatcaagtcagatggtttctaatttgtcattttcagttgtattatatgaggtccttaactgatttgctggttaacagattattaaagattattttagctctgatggagttcaaagattaacattgccttccaccacctgtgtgcttcctcttctccctcgctcagattaatttttctaactagcatttattattatctgacatgtgttatgttcacatatatatggattcatctactgccttttcccagtagaacataagctctgtgaagacaggaactatttgttaattgagtaagctttatttattcaatctctagcatgtagaattatgcctagcacttcacaggccctcagtaaatttttgctgaatgaaagaataaataaatggagaaatgaatggataaagagctgggaagtcattgttattaagggagagaatatttggaaacgtactgatattttaatataaatgatatcaaatgtgtaaagaaactttgaaaagtgaaatttagtttattttccaggaagagtctgatattgtttgatgttaaaaaagagcctggtcaggataaatgtttgagtattgatttaccactataagcacattctaaatttggattacccttggtcagaatgggttctgttctttgtctctttggttcccttgtaagcattttcagtcttagcagcccatgtatgccagttaaaaagcatgcatactttatagggctgagtccagtaaaagcttttcaatcaacccacattcacagtggaagattactttcattcctgggaagggtgacatatgcgtgtgaaacacagtattcagatgaaagggctactttggtattatttaactgtgtattggcaagactctagccagtatctagtttctctttagagctattttgcattatattacagtagtcttactgtgctgtgccaaggaaattaagatcagctggaacactctgtaggtcattggcttggaatcttagggcactgggaacttgatgttttgttttaatgacctcatttaggcgaaatctgcctttgtcccagaagcctaaggggccctttacaaaaccatgcctgcaccttgggaaagatatagaagaggttcagagaaaaatgactaaatatttaaaggtattgggtcaacctccatgtataaagtactttataaattaattgactctttagtcaagaaagacaaagaggagtcgtaatgaaagtctcttcaatacagatttacccgccaagttccatgatatctgaaacatacttttaaagttgaaggatgtaattttaagaaaaattgaaagaagaaatgattacacatcatgtaggggcttatgggtattgtgtcgtggcaaatgatttctaaaagggatttctaggggcaatcactcttgtggaatgatggacctcctccatatttctcaaagtgggagtataagatgcatatatgcatatgggatgtgtggggattgtgggagggccatatgggaagttgcatgataaacatggaacacctttttggaacgttaactttaattgaaaatatgggaaaaacattcttatattaaaataaacactcctgtatttatgagtagaatacataatgtgcatgaatttttaagaacaaattatacgcctcagatattcttaccctgagatggcaaaggctgtacaattactttcttttgcatgttgggtatctctggtggaaacatttgagaagtgctagtgtagttttcatttctgtgggaagtggctccttgtgactctcatgagggttggatatctctttattctttagccatagtcctttctagagcttctctgattttattggtatctatatcactaccagtaaagatattgggttttaaacatttgaactattttcctactttacttttctgcagcttggcaggaaatagctctcaactaaagtctctgaagaccaccttattcctgaagacctacttttgagtctttgtgttgatgtctgagcagttttagacattttgactactttttccttcttgaaatactttcttgacttctgcctcttaaaggttctgttgtaggatttgagtgttggtattccttagggttttgtcctagaacttcttgttttcattttactgccaggatgatctcatctacctccacggcctcaattgcagtgtgcatgtaagtctaggctagatctgtatactgggctgcctgttggatatcttcatttatacggtccatagacatctcaaactcagcagattccaaaacaagtgaatactcttcctcttaaacttgcttcttctctcatgttttccttccctggaaatagaatatactcttcctgtactagaaaataagatatcttagctcttctttggctcctctttatttctctctcctcatccagttgggtaccaagtcctttgggaagaacaactcttggatttatccacttttcaaaacttctctgctattgcaacagctcaggtcaaatcatctcttacataattactttgagactctcctcactggtactctatttttagtagttttctactcctagaggtgttgtatgcttacatgtttttattaaggagataaaattcattaagcataaaattagccattcccaaatctacaatttactggcatttacaatttactgacataagtgcatccacagtgttgtaccaccatctcctttgtctagtttcaaaacattttcattgcccccaaagaaaattctatacccattgaatagacattctccattctcttctccgtctcggcccctcgcaaccacaaatctgcattctgtttgtatggatttacctattatggatatttcattaaaatggaatcatatagtatgtgaccttttgcatctggtttctttcactcagcctgttttggaagtttatccatgttgttgaatgtaatactaggattctcaccgtgaagtaattccaaacagttagagaactaactttttttttttttaagaaagaagagattgttcatacatgattgcttctgctttgtgtctttgttctcaatcccattttatttcccctttttcctgctgtgagggaaacactgttctgaggttggtgagtatcctttctttccatgtttttatgcctttacacatataatactataatgtgtcctaatgatttatttaaaaatatattgtatgtctatctctgcaacttgttttcgtttgacatttttgattaatccatatgaataaatataaatcacttattttaattttatttcattgtatgcatgtaccacaattttttgtttacccattgaagaaaactgagaatttctcaatttccatcattaaagaccacactataatatacattcttgtgcctgtgtgcaagggtttctctattgtatgtatttagaagtagaattgcttggctgtagacaggtgcatgttcagttctactaggtattgccaaattgctctccaaagtggttgtgcccaccagcactatatgcgtctccatttccacactttctcatcaacagctggtattttcagaatttaaagtttttgccaatgtggtgagtgtaatgagatttaattactgtgttcatttgcattaccttgattatttgtaaggttgagcatctttttatttgcttctgtccattcttacttcttctttgtgaattacctgtattattctgttgcattgtttgcattttttaaaatgacttgtaagaatcctttatatggtattgatagctatctttttgcaactgtaaacattgcaattatcttttctcagtaattgtgacttgctttaactttgtttatagtgtttcttatgatacagaatatttttgttttaatttagttaaatctagttttgtacttttgtgtgtcttatttaagaatttttccctctctgtcctgaatattttttcgtcgagttaatatatatatattttttttttgaggtggtgtctcactctgtcacccaggttagattgcagtggctcgaccttggctcactgcaacctctgcctccaggttcaagtgactctcctgcctcagactccagagtagctgggattacaggtgcccaccaccacacccagctaatttttgtatttttagcagagacggggtttcactatgttggccaggctggtctcgaactcctgacctcaggtgatcctcctgcctcagcctcctaaagtgctaggattactggtgtgagccaccgcacccggcctcatgtagtcatttttatgttttactttacacacttgggtttttgacatagcacaatttatttttttaggataggaatttgattttttatccaatgaccatccattcatactagcaccacttattaatcatcttttcttttcccaaagctttttaacattttttcatcatgtattaagttccccttttcataggtggaagcaataatgctaaatggctaatcaaattatcttactcctaaaaccattccatgaatacccctcactcttcagatactgatttaaatgggaccctgaggtactatacagctggaccacctctctaatcatgcctctaatcctttccatctcatactctgtgctttgaccacacttaatttttttttagttttgtacaatgtctttctttttcttacctgactttggtctttacatgagatagatgttcaatcttcctgcatatctcttttccttaatctttaaatagctagcttcaaataacatatctttgaagactcagctgcaagagtcttctcttcccataatagatatatgttaggtgccctgcttagggataatctaccaggtcaattacattacattattagtgttccacaatccaggaatctctgggggcaatagggatcagttggcttggattctggattctagccttgtgccgggcacatactaagtcttctgtatatacttgctgaatgaactgaagtttcagataacactctcacctagagtaggattcatttttaaaatctttgttagatgatcatctgtataatctcctcttgagcattttcaatgatagtgagctcattagcttataatcaataaaatccttttataatgctttcttatgaagtacgtgtaaaccaagtttgtctgtaattgtaaggaaaaaaataattgcacatttttttcaggatattgtctccatccctatgtaaatctcaattttgacctattattccagcatgtcaagatattattgaattttggtaatttcagtaatcatctctctcatcatttccttatatgttcataggtatagaagatgttagtgtcttcattcaagagttaaaagaaagactgtattacttgattaaaattacagagataggaagtggcagaggcaaggtttgcagactcctaatctcccttcccctcccctcccttcccttcccttcccttctcttcccttctcttcccttccctcctttcctttttttttttttaaatttaaaaatacatttggagacacacaaaaagtgttttgttttataaataggccaggcctatactatggataatattgcagagtagaattccaaaggtgggcgtctctgatacattactcttacatggtataaccagtgtgcctgaagggagcagaaccggttttagatttatataaagtttcctttcactgaatgttaccttggacttgattagtttatttctagatatgtaaaattataataattaaacaaaatttaaatataaaaatattttttacttctttgggaaaaacagttcttcaaaactgttaagattgtatcctgaattgtgaaggtctgcagttgtaaagtagtgtgatttattttctctttcactggcttataagggtgcatatatcgtacctttatattaatgatgacacagtttctaagataatttcaaatatgttatttttattcttttaatatctgaatgtaataaatggaatccttagttttgtcctagttttgcagatggaaaaacacagggtcaaagatcaagggttaaatatacagattatgcctgagagagccaggacttgaacccagattttcagatttcaatcccagccctgcctatctaacacaaaattcacaggtagaattctatttagaaactacgttcaaaataccttctctgtgctttcagtattgtagatgtttatatagtgaaaacaataaaaagagttgtcctttacaccacccatgaaaccaaccttaatatgttctgatctccctctacctccatagtgtttttcttatggtatcggtatactgcctttatgaaatatcaaaaatcctttgtattattgtttcagaaaatgtcagaaatcattgtcgttattattattattattattttcaatttataagattttgaatgactttcagaaactgctagggaaattggatcattctaagatcaggatgtattcttactgaaagagtttagctgtactctggggtgttaaaattaactttcattgacagatccttgtctgggatttaactgagatttaagtcagtaaaaattctgccctgtggcctagagaacaattggacaaagtagatgaagtggagaggaatgtattttctcaaccttttttttttccattggaaagaacccaggtcacttgcagagacggtagagatttggcaatggactggtcctgctgttgtgtggtcactattagcaagccaaatactcatcattataataaatgtggggctataaatatcagtgcagagaatactgggtcttaaaagcatggaatcaaaaatgatttaagtatttagagattgaattaaattccatttaaaaaaagaaattaataaatctttattttacttgtcaatataattatccttccatcttagaaaagttgttttacatgtaatgctttaggatggcaattctcaaaccccagtgggcatatcacatgcttagagtatttgatacaagtgcagatccctgggtctcatccttggacactctatttccataggctgaaacattaaaacctttaacaagtacctgccgggagattcttataattctggggcagcttgactctataccacttttgaagaaaccctgatataatctgattgaatcagggtttgaaataatgacatttctcctacagaaggagtggtcaatcaatacaggaggagctattactcatacatccacatgctttatatatgtgaagttctataattttttaaaggataaccattgtctacatctgtttgcttcatctcaaaggtattagaaattgcttgaattttaaattgcattgcttttaaaattaaagtatatttattgtttaacaaacaacctctatggcaacgggaattgccctttctctatgactcctaaagtggttgctgaagtagatcacacaggggggcgctgtttaaatatgttttgtctgtggatagttccaaatccatacagcagagggtgcatgctttaaatgacacaaggaacctgtgacctgattgttttagtttgaattattctaggttgcattatcaatttaatttagactattaaagaaatatgacttgctgaaacttatttaagtaaggatcatgtgaagtttttataagttaataatttagacatgtattcaaattattctggtttcttcgtgttttcgcattacattataaacagtggctctaagtagcatctcttctatgttgggtcttttcttttttagtcataagaattaagattctgatatgcaaaagtgctagttgattataaatctacaacagacagatatcttctacagatgatttgttgtgtaatattttatagtgttttgcctgagaattgaagatatatgtcattcacatcataatatgctatttttcctccttccttccagacttagtgcatatgcaaatactttctttaaaacttgttctttttaggtagcattttcccatatatgcttctatcaattctctattagttacagtagaataaataaacttgagcttggttaatcagaaaagcactgcctactttgtcattctttttgtcaaactgtgaagttttctgaaggtagcgactgttccttattcttttttatctcttcagtttctgctatgaaacattggatagagtaatgagtgtcactgctggtgtcagttcctagatatagtctgtggtggattaaagatggttgtaaattctttactacatttctcattgagagaggaaatctatgtcctatcctcttggaaggctctgattattttacccatacgatactttggcagtgatagtgtgaccatttctggtccaaggctttgattggctttgattccatttcctgtttcttagaatactctctttgggaaccctgagctaccttatctgagccctctctgactatatcgaggcaccgtgctggagaagccatgtgtagattcagctgctcccatcttttcagccatctctgccaaggttttagacacgatggtaaagcaaggttggatggtctagactagctcctacaccagctgcgtgccttttagggaaagtgaccttcactgacaccatgtagaacagaagaattgcctagataaacccttctctccaattccacaaagtcatgagatgtaacgtaagcgttattgttttaagacactgttttggagcagtttgttagtgtgataataagagatccataacacaggctaagttctggagagaaaagtagatggtggcaactggaaggaaacttggagaacatcttatttaaccacatccatttatagggaaaaactgttttccagagagatgaagtggcatgctcaaggtcatctagatggctatggtcactgttaggactcttatctgactttgttgcccttgcctttagaacatcctgtaagatcgttgaattttttactttaaaactagtaagcgaagaccaataaatatagcctagagacacctgaagacctcctaccatgccagaaagaactttgcagtctcaaaaataccaggttccaggaataccctgcccaacaattttgtcctatgtaaacgattataaaaagttacattccagtgtaattgtacatttaatttaacattcaaatatagtaaaagatactagaaaaataatcatgtgcacagatgtatgctatcatatgtaaacaatcacaacatttaggcaatttgtatgccaaaaattctgtggtaaatttgggagcttggaatgcattttcccatagaaacaatgctattcaaaattcaatttaatacctaacatacctaaagtatagtacttgaagttatcaccataattatcagatttctttgaggaaatgctttctgaatgccaacttgttatctacggacccatcagtccaacccttccctttatttggctttggcagaaggacttcctgtttgttgagcaatggaggatagcaccgtatatcttgctctcaggaccagcttgcagaagatgtcttcttaggcttcaggatgaagggagagaaggttctagggtctcaatgcagtgagagaatgtcctctgcttggtgaagaaacagcatggttcaggacttcttgttggttaaatttcttagttcaagtcagctcttggtgattcccctccgctccctattttaagtatcctagggactggtttacttgctttcctttctatctgcccaacagcttcctctttccaaggtatcaattttgaaactcattagagaacaggatgaagtatttccatttttccctatgttcctgtttctaaaactaagaaagtgtttttattttttgcttctctttccttgtctcctcccacttctcctcctccttcttcctctctctcactcctttcttccttctgtctccctctcctcctcctcctgtccttgcatccctccctccattctttttctccctgcctttcttcttctctacccattgtcttatttttcttaaaatcaacccagcttctttaatggttcgagaattgttagctagtatagttaattaaattcctcagtttatttttagatttagggaaagtgagtggcattgctctgtatctttgttgcttgtataaataagacaaattgtaagtgttcctactagattataggcatttgaaaggaggggctacatctaatttttctttataatccctatcacataattttgaaatgcttagcagtatttattgtgcaaattaaatattatagctacagcttctttttattaatatatatctgcactatgaaagagggtgaaatgcactgaaaattattttgacatcctgtaaatccttgcacattgcctgtgtttctagtttgtatattgtatatggtaagtgtatgtgaggttataaagtcaaattttgctgttgattttctcttttagctttatttttcacttttactgatcgtgtttcactgaattcactttcactgatattcatgatgctgaggaattttcttcttgggatacaaccaaacagtggaactgtgtaatgttatggattgatgtggtcaattaactagtcataaataggatatctgacatttaatccttccgttccttagagttagattaaataaatgaaggttttgtagattatttcaaggattaaagactagatctaggaatcattttttttttaaagctggttttttgatgacaaatgaactatagttctttactcaaacagaatcatttgcacagtgagtgacggttccagctttccccaaggataagacaaaaattgtggtgaaaaagttcaaggtaatgtttgagtttattgtttgcttgagcctgatttgaagtgtaaaaataagatgctaacaagtcccaagttgaagaacatattattccacaaaatgttttctttgtgtatttatcagtattttactgtagccattctaaactatttgctatttttatcttcttagaccaaatgtactttaagtaattcctcaagtcatcaagagggaaaacacagctatgagagaatcctacatagtaattttaaaataagattagaataacatgtaaggaaactttttaaaaaggactttggtttttagtcctttctctctctgtcctttatttttgagaaagctggcatcttaatgacttgagggataattacttgtttctcatgttagggttcaggattgctctgattttccttggtgcacaaatattttaggaacaatatttcaaaagacaaaacaacccttactgctttattgatgcttggttcatttctgttacgtatttaaaaagtagctggttatgttacttctatcactgtatggtcacttgtgtttgggaaagacttatttgtgattgtatgttaagcagaatgcctacagtatattctaagttgggggttcacgtttaagtacaaatatagaattcagtctgtgtttctatctctttgtttttgacggagtctccctctgtcatcaggctggagtgcagcggtgcaatctcggttcgctgcaacctctgcctcctgggttcaagcgattctcctgcctcagccttccgagtggctgggactacaggcgcatgccaccaagcacagctagtttttgtatttttagtagagacagggtttcaccatgttggccaggatggtctcgatctcctgatcttgtcattcgcccgccttggcctcccaaagtgctgggattacaggcttgagcctctgggtctggtcccattgagcaaattctaattagattcatgatcttatttctgcactattgcaatagtctctaagtgccaccaactgttctgccagatcatacccgtctcttcttcttctgttattgctagagtgctgtctataaaaactcaaatctgaacctgatattcatctatgaaagtcatagctgagggacatcttaatgacattaattcttgaatggctccccactgcctgtagaatagaacctaagctctttactgtttcttacaaaaccctctgtgatctgactcctgatagccttcccctggcctctgtttcatcctactccacatcttacttccccgtcaggcttagtttgctgtcccagagtgaattaccccttttcctagatagcatttcctaatgtcctcaagaaaaacaaatcacatactccttaggcctcactgtgtccattgtgtttgtttgttttcatagcatgtataacatctgtgccccaatagttttttatatctgcttttgtctgccactagacactcagattgttgagaatagggattgtgtcttacccattgttagcgctgagcctttggcacagtaaacctttaaaaagttggatgaaagcatgagtaggcttaccaaactgaaaattcttaatgtccatttgactacataaacattggtttattgcaaaatcctttgcatgctctcaagtatttgatcatctggattattttattcttcctttgatttatctaataaacacatgttttcttccctctaaatacagatactgagctgggcactggtgaatgaaacagacatggacctattaatgggtctaatattgtctgatttaaagggcaaaaccagggtctaatattgtctgttaaagggcaaaaccattttcatgaagaacctttagctgagttatggcagaaacagactttgatgtttactgtaaagtctgaccttgaagaactacagggatacacttttctttgcctcttcttgaaatgctgtttttatttttgtcaatttccttttgttataaaagtttaaaggaaaatatttagtgggtaagttaaaatgtgtacacgatacttatggtaaaaaatgtctagccatagaatcacttatgaagaggtttaggaagaaatggattacatctttctgctcttaaatgtggcgacttccattaacaccctggagcttgtcaagttatgggtgagtccaaagttctctgtgcacctgtggtagataatgagcattatttaaaaatttctgagtaaataattacatacaacctctgtactttataagacagaatataggggaaagcatcctggaggaagaggccagaaacgtaactctacgcatggctttgacagtcatcaacagacactttacatgtttcttcatcagtaatatacatatgatagccattccatttatctcacagagtatcatgaagattaaatatgaaaatagccatgtggatgcatcaaattattttgtttcaaaataatgcttgcttaagtagtccagaaataagtcttataaaaatgagggaaagcctcttttgtcttcctgcatccagggcaaatactgccaaaggaggtaacccttttttttgttgagcagagggttttcatcaatattcatctactgtgttgtgagtcagcacaagatagactttttttttttattagacagactgtaacaggatactttagatgctatctactgatggaagctgaagatttttagtttttgaatagactccccttctcccctactgacaatatggtcacatcaaaattttttgttaattctgttaatatgactatgtaaatatcattcagtactgcataatgtgttatgattatgctcttttgttgtgaaaacattctgtttttcctgtagttaataattgctttgttgttccatttgcttcattttctttgattctatttccaaatttattctcctctcccaagaaacgtaaaacagtcttaacataaacttccaagtggccaactgtgcagggactctgttagttctgtccttcacctgaaggcatccctcctggaaatttccattcttctgcctctgttctgcccctgccgagagacgttgctctctagggctgccacggtactgtcctcaccttgggattttgctttgcctttgttctgggaattccttttttctctctcctgtattggattccctgtttccagggtctcatgatttcttccttttcctctttttgtggtggtgtacctaactgggggaaggaggagtaatttttctgagtctttattggtctgaaaatgcctttatattaagtttacaactcagaaatacttttgctgaatatagaattctagtcattttttgctcaaggcattttaaaattgtcttttatttatatactgttaagagttccaattcattctcaattccagcttgccatcttgaatctttaaatcctatgaaaacatattcattcatttatttacttgattttatttttttagtagtcagaatgtatatatagtttaataatatttaaaatacattaaaattattcactgaaaagtcttgctcctgttctcatatttatcagcacgtgtcacctccctcaatacctacagggatttgcctccattaatgtcttttatacatccccatgtacttacttatgtaaatataaataattgtagttataggtttattataagcatattctatttgctttgccttttggcttaatggtttcttggtgcctttacaggaaagcactttaagaagtacagaccgctatgtaacataaagtaatttgtattaactcataatttaggatgggtttttgcacacttgcaactacatgttgattaaacaaaaggcttatcatggggaatgacaaagatgggaataactgatcagaaaggtaagggcatggaggcagagttgaaatgctttgagaaaagcagagcaatattaaaaggaaataagagacatggaggtggttatgtagaacaactttcataaactgaggagtatttccacatttgaaaaaaattgttggtatgatagagtgctttactctatgtggagcacatacaaagtaagcagagagagaagtcttacaatgtcattagtcatgattctcttctttcagttttttagattgtgagtaggtttccatgcacatgaatgtcagacaatgaagaggaaggccatatgaatactatgtgtctagtggctgatgctggccacagacttggatcccagcctggtggtgcccaagaggtagggcctccatgtcagagctggcttgtttagggtggttcccaaaggtttcactgggtgtattagtcagttttcacactgctgataaagacatacccatgactcgctgggcatggtggctcacgcctgtaatcccagcactttgggaggttgaggcaggcggatcacaaggtcaggagatcgagaccatcttggctaacatggtgaaaccctgtctctactaaaaatacaaaaaattaacctggcgtgatgataggcacctgtagtcccagctacttggaaggctgaggcgggagaatggcgtgaacccgggaggcggagcttgcagtgagccgagatggtgccactgcactccagcctgggagacagagtgagactccatctgaaacaaaacaaaacaaaacaaaaaaaaaacccatgactgggtaatttataaagaaaaagaggtttaatagattcacacttccacgtggctagagaggcctcgcaatcatggtggaaggtaaaaggcacatcttacatggtggcaggcaagagagaagtgagaaccaagcaaaaggggtttccccttataaaatcatcaggtctcatgagacttattcactaccacaagaacagtatggggaaaactgcccccatgattcaattatctcccactgggtccctcccacaacacaagggaattatggtagctacaattcaagatgagatttgggtggggacaatgcaaaaccatatcactgggatcagtagtctatgaagcaggctctgggtcaagtttaccaagtgtgtcagctcagcctcccagagcaatagatactgctttggacaaggcagtaggctcaagaaatagttcttgaggattagtgaggaatcatggggaagttaactgccctaaggcctttggaaaccaatggccctcagaccaacaaccctgggaattagagaagatcaggtctccctagacctgtactctgaaaattagcaaattaacagaatgatattgtaggatgcagttggacctgaacagaatagccttttcccttgacctcatttattgaagaacacagtactattaaggcaccctgggcctgagggtctattataggcatactctaattacaggcacctctacatgaggtgttattggttgggggatagaaagagaatagcaatttttctttttgaccttcaagattttgtcactcagtaaacacttttaatgtaatgttttggtcaaaaccccttacttaatggactgaagtggaaggtacttctgtggtatgatgacaatagaaacaaaagctagtctaatcttcctgtgtgctctttctccttccctagtcttagaaagtctttatattctacacaaatgattgatgtggaagagtatttctaactgccaatttatctatttaactgttgttttgagaggaaagctcagttaaatacacagacagaatttctgtgcataatctccaatcagctttatattagaactgaaaacagtttcttagtgctaacagacattcattaggccaaataattttgctgtgttaacaaactgtataatcaatttaggattgcagccaagtattagcatgttattccacatgtgacttagctgttttcaaaataaatcaagtggcagctttgcaaacatgatttagaatagcgggaccagtgcagttgtatattcagagcattttaatatgaaaataatggagttaatattttctattcaaataatgaagaaaatgattgtatcttatttatgaaaatttaaaaaggtgaaaccacttgtacaaagcactatcaaagtgatttcaaccataggtttagatgaaatgatagtgcggaagagacatgattaggcttgtagaattcctccagtgtcagggtgctatgtgctgtatataaagcataaactgaatatcaatttgtgtaggattataatctgaataatggcttcattgtttccttcccccaaactattgaacttgctttatttgagtgtggcataaggtcatgaaatttatttgtttattttatatcagaattgaattgatacatccacgtaagtatgttctcattcacggtactcactgggagataactttaattctactgttatagttactgctcagtaattttgagacaactaacttttttttcattatttataactatcttttaagcattcccattggtgactggtcttaattccttgacagtatctgcttttgagaatgagcaaaaagttgtttagagccaattctaggaaatgaagtaaaacactcaaactagagaatatatgaagaaagtaatgaggctctgagttccttatgtgacctggacacatttattccttaggaaaaatatgaaaattgcttgtggagggttatggtatggactgaatgtatggttcccactgcctgcaaattcatatgtggaaattaccctatgtgatggcattaggatgtggggcctttggaggtaaggaaggtggagccctcatgaacaggcttagtgcccctataaaagggacctgagagctagctagctctcattcaccatgtaaagactcagtgaaaagttggctgtctgtaacccagatgagggttctcaccagaactcgacaatgctggcaccctgatttcggacttccagccttcagaactgtgagaaagaaacttttgttgcttataagccacccagtctgtagtgctttgttatagtggtccaagtgaagtaagacaaggttattcttggaataagagttctgtggttaggatctttgacccctccaaacctcatgttgaaatttgatccccattggtggagatggggcctacttctgtttgggccatgggactgaagtccccatgaatagattaatgcccttcttgagtgggaggcaaattagttgtctctccatgagctctggacagagctggttgtaaaaagagcctgacacctcctttctctctcttgcttcctctcttgccatgtgatctgtgcacatgctggctcccctttgccttccaccattagtggaagcagcctggggctttcaccagatgcctaatcttccagccagcagaattgtgagtcaaataaaccatttttccttataaattactcagtcttgggtattcctttgtaacaacatatatggactaagacaaaggatataggatatcaaaactttttctgtgacattgcctgtgaaactgcaaagtagagcttataggattttgtaaaaggataaataaagtattattgtagttgtaatttaaatgcattcacataggacagtttcttgaaagcaaaaatataataattataaacctttatccataagagttgaatactaatcttatattttaacttttctaaaatgtctgtaaatgtacacattgactacaagagtactctatgtactgtgatatgtacattcaacctacaaaaaatacaatcctacctcatcaaagttacttgcaactaatatgctggatttataaccataactaccattaaatgaatgttatccaaaagcaatttttggaattctttctccgaattgggaattttaataaaggtgtcttggaggtttaaacagaagtcatctttttctcaaaatagccttccctgcagcaagctgagtatttaaaactattgcattgattttagaacgatgttacttaaaattgcttgcaggttcttcctatttatgccagaaaataatggtctctcttttgttaataaactgtcaaatagatacaggtggctaaaaatgaaaatacaggctgattttaaacaattgagaatgaggctcaacataaggaggtctacctgaataacttctgagacaatcacttttgaagatttcactcacttgctgcatatatatgtcctggcatatttgttaaataagcataattattgcatagttacacatcataaatatttgaacttgaggtaaaaaaaattcatattttcctatagttacggttaagagtacttttctctctccacctacgtatgactctataatgatgtccacatttgctttctcgatgtttctgctgtgaccactggcagaaacagcatagcctaccagatggtccgttgatttaagtagagaaattctttggcccttatttaattcagttgttctactcaatctgctcaggagagtctaatgagagaacataaggctgctgctgttaagatgaggtacattggcaacatttctgcatttctttcccacccttggctgggcaatattgttagttttcttatctttatgaaaccatcaaatgaatcatttaaataataaaaaggttttcatgtgacataatattttaaagaggagttctaggtttaaatcctgtttcctatagagagttttagaagattggaaacacatttatctgttaacagttgacaagaagttgattatctcatttagcttgagaaatgttttgatgaccaccatgcttccaatgtggaaagataggaaagggtagttgggaagtcctgaaggaatgcagtcctttagaaccacatgtttatttcagaaattatcatggcaaacactgcctttgaaaagatccttccagtgctcacctccttttaatgtggaccacagtgacgccatttcaccccgtctttcatgtgatgttttacttctgtgagaaaagctttatgtccagtgcacttttctttcccgttggttttgatatcaagaatgacaaaattcttggggagataatcctaaatgtcagttttcgattagtaagcctagcagatcttgcattggaaaaaataaaaatgggtgaagatctttgccttaaattctttattggagtttaaagtaattgatggcctgactccctccttccttcctttccttattggcagtaatattatttgttagtatgtagtatgaaaattggtagatataagcaatatgacattattaaagacaattcctacattaaagaagacaatgactgtagagacatgggggttcagcatgtttaggggctacattgttccaataaactgcattttaaaacaaattattaactgaaagacaacttccttaggcagaggaactatcttgaacaaagtaattcaccttagataatgaacatccagcacagtgcctgagacataaaggatgttgattactgaggggctctgtatttaaggatgtcttcacttgacccctactcttgcttaatcacttgcttgtgtatagaattctaaagtcaactttgaagacattgatccattgtcatctgtcatccagttttgcaaatgaaagtttttttgccagtctgatttcttgttatttaaataagacttttttgttttgattcgttgttggtttttaactttctctctggaaactgtgcagtttttctcttattgttgctattatgatagttcattaaaatatgttaaaaaattgtctttaaaaaataactatttctgctctgtacttaataggctcatttaatctcatgcctacggtcttttattcagcaaagagaaaattatgtgtttcattattttctttcttctgttttctccttctgggtccaaattttgccaagcattatgtcagccttgtggttttcagcaagttaacctctaacatctttgatcatcaattgcattattataaagtggaaattataatccccagtaggccagtacccagtatggtaattattctttctccttcagatgtcttgcttctctaagcttatcattttgatcaagggatttgaatctaaatatagacttctggctcttaaagtgatgtctaggctgtttttagcatgaaggttattgggcatgactctggtcttcctcaaggtagcactggctcatttctgaaagctccaacactgtagcctgtgttttgtggcaaatgcagagatcagcacatagaaacgagtcaaagcatatatggaaaggggacacataatgttaaataacaaggaaactcttggagtttgttttaaggtagaagtctataaaagacaacagggggatctatagtatttttatgtgggttcatctgatgaatggctgccacatttatcttcccagaagaacagctctcatcatgtcatattctttgttaaaaatcttaactggatccccactgcctacaaaattaccatcagattcctcagcttaatttttgagttgtccaggaaagattaactccaatgcaactttctactatcatatcccactattctctatatattccttcactcaaatccaaatatgttactctatgcttcccagatctatcccatgctctttccttggattccttcacttcctcccatttataccgggacattcttctcttttaaggttcaacttcatgacctcttcctttaaaaaacctttgccaatctctataactcgaggttctatttctatgtatgccccaaagcacatgttgtgtgcatctcttatgtgtaacatactgcactgaaatgacttaaggcataatctatgtcatgttcatctgtgatctactaaggtctaacagtacttcacttataatctgtgctcagtaaatatggttgactaagtgactggatgcattgtagtcatgctgcattataatgttttatattgagaaaataaatttggaggttgttttgtttttgtttttaaaaagagctgactggtgaccaaaactgtgctttgttgactacattgactttacaggtttttatattatctatatgatcacttcttaatatttatttattttttcagctttattgaggtataaatgacaagtagaaattgcatatatttaaggcatacaatgtgatgttttgatatatgtatatattgtgacatgattaacatgactaagctaatcccatcatatagttatcatttttttggtatggtaaatatccttaaaatctactttcttagcaaatttcaagtatgggtttccacaaatagtgataaacacttgctaatgacacaggagtattgtcagatatttgggaaatagttattcagctttcagtctatttcctgtcagaagtttatataaagaaaaatgaaaatcaaatataatgctgcttgtaactgaaaacattgtgcatttaaatgaaattttttgtaccatttagcttgttttgctcttgaacattatttgaaaataaaccaacttattacttgggattgatggtagtaagtgtgctgagtgttgagatttatttcaaaatgcatggccaggtgcaatggttcacacctgtaatcccagcactttgggagtccaaggtgggcagatcacctgaggtcaggagttcgagaccagcctggccgacatggcaaaaccccatctctactaaaaaaaaaaaaaaaaaaaaaaaaaaaaaaaaaaaaaaaaaagccaggcatggtggtatgaaggggctgaggcaggagaatcacttgaacccaaaaggaggaagttgcagttgagccaagaccacaccactgcactctagcctaggtaacagagtgagactccatctcaaaaaaaccacaaaaacaaaaacatataaaacaaccccaaatgcattctctcttctagttcttttccactgatgaaatcaaagatactgaacaatccaatctttaaattggagaattccttgtaaggaaatgtgtaacttttataaaggtactagcagtttcttgataaatataagaaagagtagaacaagacattgtatggtggtttgttatgtgtgatttataatatttggggaagaccagccataattttgtgtctttagtcagtagaatgacattgatttgtggcaagtcaacatattcctttgtatttttgcaatggtgatatttaggagaacagtacttaagtctcctgaaaagtattttttttttttacatcgtagggacttattcttagccacacatctcctaaatatttaaatattttagttttgttcaggaaatgaaactgttttcaagtgtatattaatggttttttcttcttataaatggaaaagtacttaaagataattttgtttaaaaacctcattttgcagataggaagataaaactgaattttattgggctgaatacagattttcatttaaaataaatataggatagaaattgaaattgggttaaactatagccaataaattgaattaattgcaatgctggcctggtgcggtggttcacgcctgtaatcctagcactttgggaggctgaggcaggtggattacctgagctcaggagttcaagaccagcctaggtaacatggtgaaaccctgtctctactaaaatacaaaaaaaaaaaaaaaaaaaaaaaaaaaaaatagccaggctggtggtggatgcctatagtcccagcttggaagactgaggcaggagaattgcttgaacctgcgaggtagaagttgcagtgagctgagatcgagccactgcactccagcctgggtgacaaagcaagactctgtctccaaaaaaaaaaagcaatgcattctaaattctgcataataatataggattttattataatgcctaagtgcatatgaggtcacctaattgtgtcaagaagacaaaataagtattttcagcaccaggaaaggagactccctcaagtaagaaaagtccaatttcatcgaacttttccgcaatgtttacagtcagaaaatctatgaagaaatgatttctattttaatgtaagaatgagtatgatattttacaatttcagatgttttatcttatattcttttactatttgtcccaccagttttatgtttcttatttttgctttcttgcctttttttgactaatcaagtattttaaaactattttattattttactctattaccttgtagttatacactattttactggattttttttggtagttactccagatattgtaatgtgcatccttgattcattgaaatgatattgttaacactacttaaatctgttcattcactttctacccttaatgttaatattgtcatgttttttaattctacatagatcttctacgtcacaggacattaatatgtccactcaatattcactttgaattagcagtatatttacttttttcactgttctacctcccccctaacttctttttacaactgttgattctctctaccttttactctcctttttttttctttctttgaggttaattttcttctacctgaatatttctctttaatgtttattttagtgctattctgctagtgacaaattatctccagttttctttgtatggaaatggttttaatgtaagagggccatagggagaacagtgatatttagtgataaacagggttaaattagaatgaagggaaagttgagagaagaggttgaattttgtgggattttgttcctgattaactgtgagattcagaagcatagtaaaagaattttagtagctggggaagtgtggatggtgaagtaaaataagccaatggactgctcttcagtagagagtctggggcctgagaatggatgacctgggagttctggacctgtggtgactgacataaatggggaagggagagggcataaagacatttgtgttcaaggactcaagacaagcaatcacagggaaactgtaaagaggaaactgtttctaccaccatactaacttctgtgttctcctcttagctatttccatgacggtgtggagaccagggaagatattaggttatggagacctgaaggttccacttcattcttagggagtgaactgtaagagctgaaaataggccgggtgcggtggctcacgcctgtaatcccagcactttgggaggccgaggcgagtggatcacgcagtcaggagttcaggaccagcctggccaagatggcgaaaccccgtctctactaaaaatacgaaaattagccaggcatggtggcgggtgactgtaatcccagctactcgggaggctgaggcagagaattgcctgaacctgggaggcagaggctgcagtgagccgagattgcactactgcactccagcctgggcaacagagcgagactccttctcaaaaaaaaaaaaaaataataaataaataaataaataagagctgaaaataaatggattgatttgggagatgcttaggaagtaaaattagcagaacttggtgacagagtggatatggatatgggatgtgaatagagggaaatgtcaaaaatgactcccagatttctggtttatgcaacttgatgtatatggtggccattcactgaactagaaatgctggatggaggaagactaggtttgggtggcaaatggtgacaccatcagtttggcttagactttttgagtttgaattgcatgtgagtcatccaaatggggatatcaaatagccaattaaatatatgagtctattgctgtgcagagatatctgggcagaagataaaaatttgggaacatctttctataaattgttaattgaagtcttgggtctgaataagctggacaaaagagagtcaacagagagaggccagtcaagaatgccaatatgatgctgaaggacaagtagaatgaagacaagggtccttaaaattgaggagtttattggtaaaagataatttagctggagggaaagtttagtgtcttttttctttaaatcaaggggcttgaatatgtataaaagccagtgagaggaatctggttgagaaaagttaactatccaggaaagagaagagatcataatatagaacttctaagaagctgggaaggaaataggcatatattatttccccttgctgctgtaacaaattacaacaaatttggtgacttaaaacaacacatatttatctcagagttttggaggacagaaatttgaagtcagttcactgggctgaaatccagatctcagcggggcttcatttgttctggtgggtttgggtggcagggcaggtgtggagatccgtttccttttcttgtccagcatctagaagctgcctgcatttgttggctgttggtcctgaatcgctttgactcctggtttggtttttgcctttctttttctctctctgttttcacggaaacattagcttctctcactctgatcctcctctttctctctcttttaaggacccttgtgactacgttggaaccccctgtataattcagggtaatcttccctgatcaggaccattaacataatcacatgtgcaaaatcccttttacaatgtaagattacatattcacagcttccaggaattaggacactgacatggggtgaaggcgggggaattattcagcttcctacaaagaccaagcacagttagaagggcaggccctaaaggaaagaagggaaaatttcctaatttaattgaagagaaagaaggtagaaaatagaaatatgggtggtttgtatatgtcatagtggaaatacaatgtatttcctatttcactaaagtagaggttgtttcacttgtttgagggaagaggcactggtagtagatccgtagaagaaagtgtcatcctaacaactagagcatgttttcacttcgctaatagaacagcctgctgtgtgccaggagcccaatgggtagagggatataaagatatccagcacagggtgattattacctttctgtcactgggagttttcaaagcatgttaaatatacatttcactggaaaagtttagtaagtattcctgggtgctgagttacaaaagatgacttcattgacagttctaatatttgctaattgtgtaagtaatgcatactttctaaatagaatgcacttttttttttttttcttcctgagatggagtcttgctctgttgcccaagctggagtgcagtggcacaatcttggctcactgcaacctccacctctcgggttcaagcgattctcctgcctcagcctcctgagtaattgggattgcaggtgcacaccaccacacctggctaattttgtatttttagtagaaatgggatttcaccatgttgcccaggctggtctcgaactcctgacctcaagttatacacccaccttggcctcccaaagtgctgggattacaggcatgagccaccgcgcccagcctagaatacactctaaagaaatgtatcataaggctgggcatggtggctcacgcctgtagtcccagcactttgggaagctgaggcaggcaaatcacctgaggtcaggagttcgagaccagcctggccaacatggcaaaaccccgtctctactaaaaatgcaaaaattagcccggtgtggttgggcacctgtaatcccagctagttgggaggctgaggcaggagaatcacttgaacccgggaggcagaggttgcagtgaggcgagaccacgccactgcactccagcctgggcgacagagcaagactctgtctcaaaaaaaaaaaaaaaatgtatcatagaatgctactagaaataattgatcagaagtaaagatatagtaagaattcttaagaagtttttccagatatttgtgtagtcagagctcatggcactctattaagtacttgccctttaacttgagtaatctgatagctttttaaaatttaatttttccactgatagtaaaggaattataaaaattataagaatgaaaatagatacattaaaaataaccactttatgatctcctctgttctcttgttttccttcctagagatcaagattgttaaaaatttggcatagattcgtggaggtccttttctatgggcttacctatgctcatgtgtatagctggtcctccaataaggtcattttcttcaacatcatttttatctaacatggttgaggaaaaaaaaaatctattccgggattaggccactgtctgtgtgaagtgtgcactttctctgtatgtctatgtgggttctctccagagactcatttccccccacttcccaaagatgtgcaggtcaggttaattttgatgtctaaatggtcccagtgtgagtaagtgtgtgtgtgtgtgtgtgtgtgtgtgtgtgtgtgtgcaagtgtgccctgtaataaaatgaggtcctggccagggtaggttcccaccttgagccctgagctgccaggataggctctggccacctgtgaccctgaactggaataagcagataaatcattaaatcattatctcacttgtttttactcatctttcttaaatgtatatatagctcaaatttatttcagtgtttaatatcagaagtgttttgggtctttatttagaagtttggtgatgtttttatgaccagaaatgtgccataggaccttaacttatgtattttatcatttagcccatggtgaaactggtttaaatctttattatgtcttttggcttaaagtcacggtttctaagaaatgattgacaatgttaagtaaggatttactatttatatagaagtataggatattttattgtttttacacaaatggggtcatactaagtaatattgtataatttgtttttttttaaattggacactgtgttttaacagttcttcgttagtccatactttagttctcttaattcctacccagtattccacagtctgaatatattacattttattcatatgtgaccatttccagtatatatggtgtttccacattttctcttgtaaacagcgatgcagtgaactcttccagatacttttctaatcatttatgctccttagtctatagagaaccagaaaaggagtgcctatgtcaagggcatggcttctcaagatttttacaggtgctgccaaatttccttccgtaacatctgttcccatctatatgctttttatcagtattagagaataccactctctcacttgacacttgtaccagcctttggctttatcagtcatttacatttttgtccaactcatgaagatgccttatgttaatgtatgtttctcgtatcactgatgagattatctttttaagtgtttatgtccagtggtatattgtgtgtgtgtgtgtgtgtgtgtgtgtgtgcgcgcgaattgtcttttcgttccttttttttgttcatttttcttttgggtttttttaaacttttcatttttaaagaatgctttctgtatttggattattagtttattcttaaatatattgcatatatacttactcaatatgtgttttgtatttgaattttatttgtggagtcttctatagcattaaaatatttatgagtcaaaattgtttttgtaattccttttaggccttactttggaagacttttcatattacaagattattaaagcattctttttttcttttttttttagacagagtcttgctctgttgcccaggctggagtgcagtggcacgatcttggctcactacaactgccacctcccaggttcaagcaattcccctgcctcagcctcctgggtagctggaattacaggtgcacaccactaagcccagctcatttttgtatttttagtagatacagggtttcaccatgttggtcaggctagtcttgaactcctgacctcgtgatctgcccgcctccacctccaaaagtgctgtgattataggcgtgagccaccacgcccggccattaaagcattcttgagttatttcttctaacatatttataaactaattaattttttagaatttctttttagttgtctaatgttacagtctattttagagtatggtgttaggtaaaaaaatctatattttgtttactcgggtatagttagtctttttagaaagtcttattctttattgattttcagtggcatctgttgcatgcatgcacacacgaacacacgagtctgtcagcacctttttaaaaattggctaactacagttttattatatattagtgtattagtccattctcacactgctataaagaactaccaaagactgtgtaatttataaagaaaagaggtttgattgactcacagttcaactggctgtacaggaggcatggctgaggaggcttcaggaaacttaaaatcacggcagaagggtgaaggggaagcaagcatgtcttcacatgatggcaggagagagagagttgaaggggaagtgctacacactttcaaacaaccagatctcatgagaactcactatcacaagaacagcaagggggaaattcgccctgttcataccagatccctccccaaccattgggtattacaattcaacatgagaattgggtggggacatagagccaaaccgtatcaattaggtacaccaggtatgtgaagatccccctcattgatcttgtttgtctgcctttcttggctacaattgtacattttcttaactttgaaatagtttggctagcactgaaatgatctgttccttaaaggttatatagaatttttttgtaaatcaaaccgtctaggatttggccacaatttttagcagtatctctttgacaactgtctttcttctatagcaattaatttctttgaattttatggagtcaatttgtataaattatattgtccagagaataatctatttcattatgtttttttgcataaaattgggggaagtagtctcttatgattcttatcatttctctggtattatttcttattttgtatattttggtaccttctccctttttccccctagatttgtttcagtatttatctgttttattgttttccccaaagaccagattcagaacttattagttttatcattttacctttttttttcaagttttaatttctacttttatatttattagtttattctttctgatttccttaggtttaatttaataatttttttaaaattttgggatgttagtaaatttatttttgtttaatatacctgtatttaagcttatgaattagagtctgagaattgttttagcagtatgagatatgatatatagtgtttattatatttattattattacatagacattttacactttcaattttcattgttttctttgccagaagagttatttgaagagtcttaaaattttcagatgctaggagcttcttaaccccagattgattagtgatttttccttttactgtattgtgattagtaactattatctgtattctggaatttactggggttttatctttgatgtccaatgtgatcaagtttttttttaaaccaatttcttaaacagaagggatattctctgatttcaccttaaagttaaatatatggcaattaaatctattttattatgttaccctatttatatattttatatttatacctactttttaattctcttgttattcaggctttgagaaggttggataacagtcaattaatagtatgtttccatctgattatctttatacctattttagagtttgctttacaaatgtgtactatatgacaccgagacgtttataatcattttatttttactgtgaattacaccatttagcattatagtgttttcttccttgctcctttcttcctttttatttttatttgtcctatttgcttttgcctattcttatgaacaggcaacttgatgaaacacttggttatagagggttctctttcccatagaatagagcagaatctgtcttatgattcaactgaatgtttttctttcaataggtgagtttagctctgcaacatctctgagataacataaaagtttagcattagtactgttattttatgttttccaatttatagatttttgaaaaaaattcacaagatgttctgctttcttagctttgtgtttgctctttttattagaaaagtttatatttctgttatgattataaatgtaactgtaggaaagttcttaatcctcttatttccttaaaaatgatctattattcctttctgcagatgtttcctcttcatcctcccttttctaccagctgaccttagcattataaaataaattacttagaattctcctatgatttatcagtttaaaatatctttttgatcttagttagcaaagcagtcagtttatatagtatatactgcataccatgtccttgctccctcagctttcatctttttgaaaaattttatcattcatattttcatattgaaatttcataacgattcttaaattgttatggctcatattacttacgttttattatagcaacataatcacatacatgattggaatttagtaccatgattgatttcagtgtttatttcagttatttcactcaggtttttacaatcacttggatgactaaaatttatcttctagtaaattcctcaagaagatcctatgaaaacaagattttatatatttgtaatatgttcaaaattttgaacattgtccgttgcctttataattaatgagtttgattgaatttaaaaatctcatttgtattttcttttttcaaggatttcatgcacattactgcatccagtggtgtatctagagggcagtggtgtccactgaatctgactgttgaatgttgctgtggagagatttgacaacagactgattcctgccttaaaacaagctactagaaaacttttgccttgctgttcaaaatgtttcagtaattttactaggaagtgtcttagtgttgactgtttctctggggaactatgtgactttcactgagttttttttttttttcttcattttgagatagggtctccctctgttccccaggctggagttcagtggagtgcagcctcaaactcctgggctcaagcaatcctcctggcttagcctcttgaatagatggaactacaggtgctcaccaccacacctggccgtatttttttattttttgtagagagacagggtcttgctctgttgtccaggctgatctcaaattccttgacctcaagccatcctcctgtctcagcctcccaaatggctgggattacaggcataagccaccatgcctaacgatcaataagttttgactacaaaaaagtcttatattttatttattcttttctgctgttttggttttcttctgtgcggatttcattttctgtctaatgtttcttaaatttaagataatttttctggctgggcatggtggctcacatctgtaatcccagcactttgggaggccaaggtgggcggatcaggtcgaaagattgagaccatcctggccaacgtggtgaaccccgtctctactaaaaatacaaaaattagctgggcatggtagtgcatgcctgtagtcccagctactcgggaggctgaggcaggagaatcacttgaacccgggaggcggaggttgcagtgagctgagatcgcaccattgcattccagcctgggtgacagtgtgaggctccgtctcaaaaaaaaaaaaaaaaaagataatttttcctctcaatttggttacttcactgttagagtggaggggaaaaaatggctagtggtggatcagatcagctcatcaactgtaaagactgactctatgtcatttacttaaggaagtgaaaattcatagtagagtatgatgagctggtaaaaccagagtttctgaatttacctctgaagatctaggctacatatttattgctgcaacaatctatgttaagaattttcttctcaatattcatggccaacatctggcttctaaaggaaaggcttttggtcttttcaatcacttgctgatagggtgagactgcattgttacccataaccacatgacctaatttagaatcaatcttggcatccagtcttgcatttctaatcaaatttacaatccacctttcagcttcttctggagtcatgttcaatttatctgccaacatgttaatgctgatacactggtggatgcgacagaaagtctcaaatatgaagagacgggcatgaatattgagaagaaacttaattagaatagcaggtcagaggctcctaactgggcaactcaagattctggcttctactgaagaaccataaagaaaagatgaaaaaaaaactattaaagaaagatgaaataataaaactattatataaagggtgacttacattttggaaacaacatattacgtataaattttgaagaattggaataaaattgattcatttaaaaaaaagaattttctgagactggtgttctcaagacaacatttagatttagtgttcacactagtggtcactaatagagctgtgtcagatagtgaaagaatatctacattttcctgtaaagaagactttgtgcttttgttcagaaaaaaatcataaggctaacaattgttaagatgagaaaggaggcttgtccactatgtaaccggagtgactagtctttccacattgattgtatgtgaacataaggcctactgtgtacaaagaacactctgctaggtattctgggagaagcagagaaactaagagactcagtcctaaccttaaggattatatttgtgttgagtggaaaaagtagagcctgttgaaggatttataagttatcaaaacaatgcattagtaagtctcaggcaagaaaggagaaatggaaaagtttaagtcctaaaaaaaattacaaaacagggagtgatatgatttatatggagggatggctgcttgatggaataaattttgatctatgtctttgagagagatgatgaacctagctaggcaatgagttatcccaagggggcacagcacaatagtgtgagatacagggaaagatgaaaggacagtgcaagttgtattttgtgtgaggcaggagattggctggattaaaaaagtatttgtaggacttgatattcaagaaacatctccttattgcttttttttctctgtataaagccactgggggctttatacagtcagatagacactgagatggtcagagagaagttagacatgccactgccctcaaggaacctccattctaaataatatagaatgcatccacataggagacagtagctgaagtttgaataaactggtgtatgagaaagaataaagtggtagtattgcaaggacaggtagggtttgaatctgtaaaatgagatgaaataatacttactttgcagggctgttagaataaaatgaaataacatatgcaaagtgcttaacacttaatgggcaattgatatgtgtttgtcatctttccttccttccccacctctcaattctgacataacttgtatataaaaaggagagatccttgaaagatgcacagaagtgaaattttcagaagaggtgtgactggccttgggccttcattgtggggcttaatgaactgaggaacattatgaacaaagaggtgggaatacagaacatgcttttgggagcttcgttgaagttgagtgggagaagagatttgaaagggggacttgaaacctagaggttggatggtacttttgtattagactggtgcaaatgtaattgcggttgttgtcattactttcaataataaaaaccccaattacttttgcaccaacctaatagcatttttcttctgcccagattccactttgtatactataataactgatggtttatgtgtcaccctgcatcagctgttttggtaaagaggagtcatgagttgattaactttgaattctccataataaacagcacagcactttacacatagtaaggtcttcaatacatatttataaagcaggttaatcaaacaaatgcttgggtacgtcaggaacaagggctgtatgaatgtgacattttatgctaatgtatcaagctatgtatttaataataaaatgtggaaacacatgttgtagagtggaatagtggggtgccttggagagagccagattacagttttctccctggcttagtggctatggactttgtgaacttggtcaagttcttttgcagtatgtgcttaaacccaagaccatttcttagctgcctgctcttctggccttaatttcctcatctattcaatagctagtaccttatagagttgtgagcattaagtgaaaactagctcagtgcctggcacataatgggtgctcacataaatattattgataatcacaataatagttatttttatttttcctaattgaaatattgatatgaaaatattttaagtgacacatttactcttgttctatccaattatcaaataaaattctaaataatgtacactgctattctgtaatattttattgttgactctgttgtgttaaaaacatcttataatgttagtttcgtttttggagataaaagaccaattctctgcagcgggagtttaaggagtgttttgttagtgtctgccttgggctcttccaggccttctgcaaacttgatttcctttgatcctcacagcagttctgaaagttttggtcatagttttttatcctcatttttgcaactgaagaaaattaagggtcaagtgacaaggttagtgagtggcaaagtcatttataataattaatgagaaaaaagaataggctgaagttaaatttggaatcagtgtctaaaataactaggaagtaagataaagcacagtcaatatgagcacctgcaaaggattacagaaaaatgagattccacctgtcttaagtatgcagggtgctatcttgttcagtctgctgactatgaaaagtatcggtaagcttcatttttcaaagacatttgcctttttgataacatagtcacaaaatgccaaattttgctcttcataattttccctgaaaatttagaaacttagttttccagtgttctgaagggatgacctatcacacacacgtaaacagctagtcatctattaagtgtttttaagcccttttagggcatgtatatattgcactgtaatctatacaggacctggatactgttttgaattgaagcgttcattttatacatagtgtttaacaggctttatggtgtgatacaaaacagcatttctaacttccccatcatctagacttcaaacctcagagtaaactttgagaccttgaccctgtgttcacatcagttttcaagttctgcatattcctcacctctattcacttttcaaagcaagtgccgtttccttcttgcagcctgccctgatcttacccctattgtgcagttgcttctaccttggtgcacccttgatacttagcatttaatcactgttagtctcaacttaccactgaatgggatattttaacttaaaaattaatatctctattccactatgagacagtgaccttaactgtcttaataatagtgtgttcctactgcctgatacagggtttggcaaatagtactttgcttgataatttagtgaaatgaattactttcattatgatggaaccccagtaaaatttttgagaccagagataacactttttttttttttttttttttttttagatggagtcttgctctgtcacccaggctggagtgcagtggcgcgatctcggctcactgcaacctccacctcccgggttcaagcaattctcctgcctctcagccttccgagtagctgggactacaggcacgtgccaccatgcctggctaattttttgtatttttagtagaggcagggtttcacagtgttagccaggatgcagagataacactttgtaatatttgaaggctaaattgagaaaagaagacagataaggccaaatattatgggtgatattcttgaaattatttgttaccatggtctttgttattgttggcttgctgaaaagtagctcaaggttagaacagaatcttttacttcacaaatgctaaccccccatcgctgtattagttggtatttgctttcttggtaattttcttttaaaagatcatgataaacctaactggataaggatcaaattaattaatgcctccaaaatagatctgtgactttttatattaagcgcattactgccactcccaactaccattctgagggatttttggttttgaaattcaaagcagggatccttggagttgtagtgtctcttttttcttttgaggaatatgagctcaccatgcatattaaactcacttatgtataaagcagtaaagtgaacactgcctagtagcagtcaagataacgaaatggaaagtttgtgtctgtgttgctgagtatcttccattttgccttgttactacaacaaccacattgtaatctggaaattaccagttcttctcccgctgaaggcagtgggtcaggattgaagagcattgagcagttcagtgaagcttgtccagatgtcagtccagaagagattttacaattgtaaaagctcagattagttttaacgttgcaatcctttttgtcatttttgagtgtttctttcattttttatttagacttcattgaaatttttcttgttagttatagatgttttccattgtaaacctcctccagcctccctcccctagaaacattagaataaacttttcagtttttatgagaagaaatgcaaaatggtcattaaaattttgagaaagttttggcagtggttattttttaaatgcttttaatggaatgaaatatgctacatcacacacatttgtgctttttaaaaacataagtatttgagattgatatattgtagtttaatcccctctttgtatttaatactattatttaggtttattgttaaaataatatttaacagtgtgtgatatcaaggatagctggaaggcttataatacaaaaattttaatgtttaggaaatgaaagatattaatatatattaaaactcttttattataccatagaaattaacactttgtgccaattctaacctcaggattattttttgtgccttgtgtatgttccagttgatctcttcatcaattttatgaatagcataagtaaatttagttcattaatatatttatatactttaaatagaccaatgtaaacagattcttatctgccatatgttgaaatgctttagtaaagacataactgcctagtcaacaaagatggcattgaattgcactgttttggaaaaaaagttgagcgaactagatgcctgttaatctggttctttaaatatcataaacaaaagtatcagaatgtgtttccaaggacaaaggcggggttttccgggctttgattggttgctgccttgtcctgtcccacagccatccttaattggctttgggtagattggaatcacataagcagggtgacatttattactttcctagttgtttcattgcactgagccctgagattcccaaggagtaaccataaaagatttcttttattttgtccatgacctacgagacaggatcattctaagaagagcaggcatgagtttgagtgcaagaagagtcactctgcctgcaataacgccaataattctacagaaaagggtatgtgacttctttatcctttttttctttaatttttcttgctgctttttttcccctgttactgtgtgtttattaatacataggaagctttacttacatacccttgaaagagcctataattcattaaagttgtaggtaaaattaaaggacatattattggaattgaactaggaaaaataatactgcgctaggacatcgctatagttaaaaactttcacctaaaagaagtttgatctcgatttcaggtcactgtgatttagagactgtattgaaacttttccttttttttctttctactgtaacttcaagcctctttgtttttagctcagtaggaaatctgctgttatgtcttatatttgtttactaaggaatagtttctttgtttcaccataattcataatatatcaatctcttcattgttgaatagactatacaattattttactgtttaaacatgtgttaccagtttattctcaggtttctacccatttctattgagcttctgcgtatttgcttaagaaaaactttccattaaattcccctgtgaaagggctttctgttaattattaatgcagtcaatcctgtgtatgaaaatattttatttattagttttttgtaaagattatttttatgtctcacttacagcattgcattttacaaggtggtatatgcaaccatgtcatgtagtcatagtaaacttttcttgtaactctccaaaataagaacattgcactggacttcttaaagaatcaaatctgtcgcattgagaaggaaggcactaaaactcagttttggcaatatgcttaccaaatggttttggtgacactagaaactgtagtgtttatttttgaactcaacttttaatagttaactgttaactatcagtgcattccattaagtcaaaggtcatgttgcaatttatttgaaacatggcaaatctaacagttaaagtggctatagtttttaaaaacgaagtgcctctttactatttttaatttttagattttcagcttattttcttatccagtcaaccatttatttactgagaatattttatttggcattggaacagctatatgataattttgccaacatgagttctttatctttcttgaggccttttgctaattgtaagcaaatttaattaaaaatattttgctttgggttttaacttttatttggaattggacttagcagtgcattaataatgacaatataggttcctggactcactgaggatgtgaaaaggcatattaacatttatcaagtctatgttctcatgtttgaattcttctttatccggttaatattgcagtttagattgactaagaaacttctatcatatggtttgtttttgatgacatgttggtatgatggaaaatgtactatctggactctccatttactagccctgtgactttgggcaaatccagtaaactcttggagtctttacttcctcatctgtataacaaactgaggagttttcagtaaataatatcttcagtcttatttgtgtctataattctgtgaaccaaatattttatattttcatggttatagtaaaatatgtaaattatttttattattttagaattattataaaacattaggaaagaatgctgtaattttcaaggagtttgaacaattagcctaggggaaattggttatgggaaaacttggctagaaaaataacttctagcactgtttgccaagtaggaaaacaagattactctggaaagcggtggttattattgatgttacatctgagctgccaatggtcacctcattgtgatttatcgtggtattttaataataagcttcttgtcaagtttctgttataatatttataaaagtcaaaattccctagactcaagtctatgctatttttttcagtgagtgcacatattttggtgtttatataatttagcacaccattatgtgcttctcctgatattttaactctgaaaatacccatttgattgttctgaagatcttaatgtcttttattttaggagttgggtattttctgatttaaaaatcatccatctgccctggtcacaccatgattaattttttcttccaatataagaagttatttcatacttgtaattaatttattttccatatatgccataattttaaatgatcttataaatcagtacaagcatttctcagagaatttggggagcaacttattttcccatgaaggcaggtgctttttccacaggtttggtgtaaagttcactcatcctgaatgagtggcccttgacaaataatttatcaaatggaatcctaatcatttaaaaggctgagagcattctgaaaatgctccgtagcaatagggagtaattttcttatcaggtagtgtgtctgatccaagtggctgtaagtgtctctggtagtgcttaggaacttgaattttaaacatggcccttcatgtggtatagatctattttgtagcagagaaagtacgccttgatctttgagaagaaaggtattttggtagattctctatcaagtaaattggaaagaaaatgttcacttccaaattctattaggatctgatttctctgatttaagtgaattaaggttctggtgaagaacgttcctcatgtgcttcagaaacgatcacatcctcagcaaacattgtgaatgaatcttttacctcatcgcatttttctcagatcatcactaggttgtagctttttactttttcaaatgagaagactgagtctcttgggtgttgagtgacttatgcaaggtcacccagaaggtcagtggcagagctagaaatagaatctagatcttgtgacttccagtatgcttctcctagatacgtgttacctcctgaaattaatatggaaatgaaattgccttatggtgggtataattgccattcaagtctggaattagcttaggcaaatcctttcatcttcctctgcacctccaccaactcccttatgctctagcatagaaaacattttattcagaaagcaattgtaagcagccaagtgtgtgtgtgtgtgtgtgtgtgtgagtgtgtgatagaaagacagtttatacctggaactccagattggcacattacataaagaaaacattttaaggtcccggagagttaacataaggctcaagtattgtaaagtataaactaagtataatataaaattcacattcttttatggaaacactaccaggtcagaaggccttacatccatatcctgattcggtgggtcaggcatatttcatgtctctatcagattaacattttttgtttgtttgtttatttgtttgttttttgagattgagtcttgctctgtcacccaggctggagtgcagtggcgccatcttggctcactgcaacctctgcctcctgggttcgaacgattctcctgcctcagcctcctcagtagctgggactacaggcgtgtgccaccacacctagctaaatttttgtatttttactagagaaggggtttcaccatgttagccatgatggtctccatctcctgaccttgtgatctgcccacctcggcctcccaaagtgctgggattacagacatgagccaccgtgcccagccaacattgtttttaagttatgtttgcaaacatttttgcattcttcatccatgctacaattacaggagatgttcataagcacacaagatcctgaagtatcttctgaaatctcagagaaaaaaagggatacttttaatgacatatatttttttaagattcaaatccttttgaaaattgtaaattcatgagtgtaatacggagcaatgccatttatgagaagatctaattccccattcatataagagaatagttcatgttataatcatttctttcctcatacaattagactaattgctatgattttctaaaagtgatttagtggaggaaagaacacatcatcacatcactatttttcccagaatcttttaaacatgcacaaaatcagtccaggcttccttagcatttgccatgctccagggcctgcctggccctcagcctgcccagcttcccttgaagccttcactgcagcatatcgtttgcctccttgggcttcaaacggcttttaaaatctgtatatctgcacttctgctcccagaattgtgctctgcagcctatagacaacaccaggctcatttgctttcccaaatgctgtctattgcctaagtgtcggctcaggctgtgttctcatcctaaagccttctaagactcttttgcttcacctttatcttcaaggtgccttgatttagtatcagtggacccacctttattactcatttgtcaattcaaccactacagccctgtaacatcaattttattattaccttttaaataatatttaagtcatattgccgtccataggtgtgtacaatatgactttcagttgctctatcttgtttatttttgtatatcttggaccaccatttggtttccaaaagttgtcttttgatttttggtcttacaactagatcttagtattttaaaggaagaaatctttaaaatgttttgtcatttatgggcagaatgtaatttcatgtaaccaaaaaacacaaaggactgtggattaaggaggaaaagagatttatttttctttcactttacaaggataagtccaaagctaatgttgcagccccacaatgtcctcaggcaactgaactccttctcgctttctattatttcttctctagtgtgggtcctttttccttttatggaaagataaatgtaaatttccagtcatcctgtttacagtctttgcacagagaatgtgaaggaccaagaacaggctcgtgagttttataccagttaacgtgccattgtggagtaaccaggagtttctgcttacatcttgttggccaactctggatacaagaggagtcaggaaatgcgggcctggagtgtagcacactgccctcctcaccagaatcaggattcatcaggaaggaagagaggaagggtggatattggtgggtaactcgccatctcctctacaagtgccttggacatattagacatttagtaaatatttgtctgggatttttgttattctggtgccagatatgaaatgtagctatgctttttgagcaaataatattctattacttgtatagggattgtaggtatggtaataagtggggagagagcagatttcctgtgcagaagagggtcgtggaaggccatggatggtggtcttagtttagatggtggacttgcttggaaggtgatagtgaagtggtagtgggcattgttactgctttttatccagagttctcattcttgctaaaccttgatatttctcctgccctttttacttttgtacagagtaacttagttgcatactcaaccaggaagggtgtcacacagatgaatggtatttgcattttagtgaaatgtttcttttcctgagaagtgagtttttaggaagtgtgttgtagcagattatatgtatgctttagagccaggaaacccagagtttgagttcagcttcatcactctccagtgccctggctttgggagcattctttcaaaaccctctgagaatcagtttctctatcttggggatgatgatgcttcctcacagaacagttgtgaggattcaacagaataaatatttagaagcatttcacacatagtagaagtctaacaaatatgaatttccctttttccccacctgtgaaatggcatgttttactagtttcataaacagtttaaatttccctgtgactgagaatttaaactttccgtgccctattctcctaaagtggttatccaaagatttcatagtagaaagtgagtcaaacaaaaagtggtttttcttcatagatttcagccagggagagaaagacaatatatctttcaaatgcttgctcccactgctttcctttctgtaactttagaaggtctctaatttgaattaaaaaaaatgaatccaactatatacgctgatgaatatattttttaaaatctttgggaacgtagatttaaatacaagataggtggttaattactcctcctttcagtgtcctaaggagtattagacggggacttctgggttgtatatttgaaagggataaaagtaggtctagtattaagacgttgcttcagtaggcaagtggtgttactattaatagaaccttagctgtatgatggtgagaacttgttacttttgatcatcattgaaccccaatgcccagcacatagaaggcacaaagttggtatctaattaccaattagttggataaaaacaatttttgtaaaggcaagattgagctctttagatactgacctgctatttccttcctaatatttgtctctgttgcttttctttaatttttgccaagtttctcatcttttgggatgaaaagctgtaatgctcaggccttttcattacctttatctagctccaacttgctgcagtgggcaatttggtatacccttcacacagagtattgcccttcacaaagaacaataaaaaatagcagctacaacatgttcagcattgattacacattcactttaaccctcataagaaccctaaaagcttggtggccaaacccatttttggatgaggaaaattggcttagagagttaagtgtcttggccaaagcacctcgctcataaatgacagaggtgggacagaggtccgggcctctgctccacctagcacaggaggctgtccctcagaattgcctgggcacatgtactgcatagctactcatcaccgtgtagctgcagtaatttgtcctctcacctgtagtcttttcatgggacgaatctcaccttttctgccaatctgccttttgctctcctagttacttttccttgctgtgcactcagttttgcctcaaagacatagtgattcaaccatcaggtcagagtttcttagagctcaacaggactgtaggggtctcttgggacttattcagaaatgccttattttgctttcaaaattttataataataattgctaacattagttgagtgctatcagtttgccagcattttgcccattttacagtatgaggagtctaaaactcatggctaataataagtttggggtctgagatctgatcacagcagattccaggatcccctgtccactgtgaacacctgggctgaacccccatgagtacagttgctgggcatcatgattttgcacactgtactgcatgttccacatttggcagtgaaggctgattaaaaatagctgggctaatgaacggtctcagactactgcttggggcggtctgtagggctggctctcatggctgtgccccagaactctaagccaaatattaaaaataataatctcttttttggcaggaaaaaaaagaagcaagacttttggtaatttcagattctaaacccctagaaaggataaggattttctacccctgtaggatattaataatgcttgctattatgataattctcaaagaggaattcaaaatttgttttggcaagaacagcattgtcagaaagcctcctaatcagacatgcatatttgaacgtatacattcaggctttgtttgggaaaataccaggaattattattttgcagtttgaaaactgaaattatcttgggtagttttatcaatatttgaagaaaaaatttgatataactgttcgaaatcccagcgaaaactccaagtttgagttccaggaaaggttcctggtgaggtgacacatatgtatatatacatatgcccccccaatccttcttattaatgtttaatatgtagaaatcatttatcttaaaaattcaaatatttactaattctgaaaaaatagatattaactttgtcacaagcttgtgattgtatcaaacagaaaccccatagttttaacaaggttgcagttttcgaaacatgatattttctctatttgcacaaactgagaaataaagactccctctgctggctacttcagtatttgcaattattctggcgagaagctatgaaaagtgaaaaaacaaaacaaaatgaagaaaaatagtctttttttgacactcaaaaagctaggtgctttgggatatatgtatgtatacatctaattatgttctagtgtttatttatctaatacttttatccaagatgtcatgtagaagcagcagcttaaagcagcctaaatactggacgaacagaatggtaagaatacagcatcaggtgggagccagaaatggggttctgtggctggctcagctggtgaccatttggaggtccttgagcaggtcaagactccagcttcagctttttcatttgtgaaatgggaggatttcagtggatgttctccaggaacccttctaacctttagtattttatgattctaaacagtatagattccatttcttttacaacactgtgctctatgcatgtctttcactgatgtaaaataaatatttagaaaaatgtaaactagtacaaccactatggaaaacagtatggagattcctttaataactaaaagtagaactaccatttgacccagcaatcccacttctgggtatctacccagaggaaaataagtcattatacgaaaagatacttgcacattcatgtttacagcagcacaatccacaatggcaaaatcgtgtaaccaacccaaatgcccatcagtcaacgagtgggtaaacaaactggtatatttatatgatggaatactactcagccataaagaggaatgcagtaatggcatttgtagcaacctggatgaaattggagactattattctaagtgaagtgactcgggaataaaaaatcaaacatcatatgttctcactaatatgtgagagctaagctatgaagatgcaaaggcataagaatgatacaatggacttcggggacttggggggaaagagggagcaggcaagggataaaagactacaaatggtgcagtatatgctgctcaggtgacgggtgcaccaaaatctcacaaatcaccactaaggaacttattcatgtaaccaaataccacctgtaccccaataactcatggaaaaataaaataaaataagaaaagtaaataaataaatatttagaaaaatgaaggaaaagtaaaattacaaaatgggtatacatcagttgttcccagtgtttgttactgcatgggaatgttaggatctagaaagtgatgttttgtacactattataagtttatgaaataatacccccaaatgtcctgggaaggttgaacatagcatattttattgattgtatggcactttaagttgtaagaagcatcattattttatatacttccaataaaactataacataccattaagggtaagttacatccaggtttcagagaagttaaatgtgaaaaaaatgtgcttttaaaaaatcaaggaaataaggtagttcctaaaagggcttcaattgatgccagacaactcaataattgcaataaagtctgatgtgtcttgggctctagcaaacagtatctttctccacctcacgttttccctctcttctaaacacttattccacctctgccctactacttgttcttctttctcactgtgtgaatcaatttttaactttttcacttagacatgtcttatggctgttctgggaataaactattgcttaaaaactgaaatgagatcctgaaataacattgtgtccaacataagcatggccagtggtattctgctttaaatatgaattagcattagcacttgcagaggttttcttgtttcaaagatgaattagccctggcatcttagcaggaattgcatgagtattaaaaacactgaaacttcagagaacacagctttgatgaaatcatcggaaactttagtgtgggatttgtgatttgaacctctttattattcatattggatttaggtcttaacatgtgtgtctgtgtgtgtgtgtctgtatgtgataacttaggatattttctaacttagttgttaatgtttgctttcttttataatgaaattggagcagtttcttttatctttttttctgccacataacagagccaactgaaagggcttgaatttctctttgtcaaattgaacccccacttgagttggagtccttctttctacctaataggaagaaaggaggcccaaagaatgagtactcttcatggctcttggcctgagacaaggagagcagaaaaggtaaataatagagtaggaggataaaggtgaatggaggggctttaaggagatgtcctgagcctcttcttgcctgcaggctttttttctcttggttggaaccctagatgcggcatgctgctgcagtgtcagtgccccaggctatctggtgtgacagtgctaacttcccttctgtgccaagtttagggcatttccagtagtgagaccactactctttagcctgttgctggatgggaaattaatgcatcataaaacatcatctgtggattttgaattcatatccaggactcctggaagctctctgtggatccccaggaacacaaattctctatttctgaatctctttagccaggcatgaccctataatttactgcagaaatgtaatatcatacaaatctataccagggctgggtttttacagagctggtgtggagatgatccatcttgcgaccttaatgataagagctatacctcaaagattgtgaaaggacagaaagagccttggtcaggggtgacttgatggaactgcctcaccaaatcctgagctgcctgccctggtttcaaatgtgagaaggaagtcaacctcaatctggctaacccattgtaggtaggaatgactttctgttattgtagctgaaccctttcctaagtgattaagtcatcatgtggatatttatcctgattctcttaccactttgtaatcatattcatgtaaaactgtcatttttattattaaataacatttaatttttaagaattatttctacgttgccaactttttaaaaagctacccatcacttgtgtatcttgaaaagcatttcctattgtggtggcccctggctagtttgcactgatggaaaccagtgtaccacagtaccgggtgaaggcaccccctcctcaggctgcctggcacccatgcttactccctgtcctcataacttagcccttctgctctccatttagtgtggtctggttattctttcctgagtattgttcactcctttcttcctcagtatgtttgctcatgtttgtcccacacaggtgttttcttaccttctttccttattctttcagaatcccagatatgaaatggctctcagcagtcacctaagccacctttgttcagtccataagtttcatgaaaatttgcctaaattttctctttggttcacatgtgtcttttctcccatagaggttttcaaactccgtgaggtgtcaacactaccattttggaattcactaatactgtctcatacaggggtgtacatgatggtttctttcatcactgaaggaatcgttttgactgtcgctgtgtgccccacattttgctcactgctggggatataaagaggagaaaacagtggtccctgatgtcatacatcgttcttatggtgaagggcaacacgtagtaattatagttgcacacttgcatgcttgcaacaaagggcctggacctaagctggagggtctttggaagcttcctcccagaaataatggtttatcctaagatatgagggagcagaaaaagtagagggtagggaaaccgtgttctaagcacaagcagtagcatgtgcaagggccctgtgttgagaaggagcatgactttttcaagaaacagaaaaaaatgtaggattggagtcagaggacaggattgtagggaataaagtgaaagggggtacaaggatgtggaataaacctgtttgtgtcaatccttgtaattctgatattggtgacagtatctgttttaagtaatgtcttataactaatttaacatgtactgttcatgctcaaggaaaatgtgtttttgactatccctcgcaagtggagaggattggaggcttttcttgcaacctgatttctcaaaactatatactgtttttctcttagtaaatatttgacagctagcaaaataatacaggatagcaataagaaagcagtggatattcttgagctgttagggtcttttggagcagtctttatttttaaaatgcaaaattttaaaaacacaattagagatttggaataagtaataatgactacattgcttcccattccttttctttcaagggaactactgagttgcttaattcaagatatctaaaaatgtctcttgttatcttaggacactgtgtttcttatttataagaatgtaaaaattcaggactactctgaccctgatataaaaatatttctcatgaaatattagtacattgcctatctattagtacattgcctatctattaaaaataataaagaaaaatattgaaacattataagctcttttataattttactgtggttagatgataaactttcaaagagctgtagaaataagcttagctttaggacacagttcagagcaaattcctgtgagccttgtttcttttatcttgtattaactatatgttaactatacatatataattaatagatacaatacataaattaatgaatttatatttctgtttaaaaattatatatgtctcatcatgctaaggtcatatttaaatatgatatttaaaataaatttaaaataaatataatatttaaattattttaaattgaagactaattaattaatagtaatttagttaggtttaactattgaatttaaaatttcctaaaatagaaactttgacacagaagataaccatagataactatgcccaaatatctttttctttcacttttgctcttttttttctttctcttgcttcatcttatggattcttactcattgttttatgtttaatccatgctcattattttacctgctgaatgatgatttctcttctctctattcttgaagaaacaaagaataagtggggcaaacctatggcataattaatgactttccagtcatggcagatccaaagccctcttctgctccgtgacattctcaaacgaccattgacaatgctgaattcatttcaaatattctagaatgaattcacattgaaaaggatctggctatcccatgccatcccattccttggagtcagcaaggaggaggagaaaggctgactgcttagcctttgctcacttttttccttagttatagctttccaaatatgttcttagaatttcaggtgatgcagagaaatactaagtatgctttgggagcaaggtgatacatactgacttgactttattttgtttatttatttttagaaatggcctttgactttcattttaaatattttgtcgcttttagtctagaggctttaaaaggcctcaagtttttttttctgaaaagttaccatttcttcttgtgctttaacattgttgcatctagtattctaaaaatgggttgtgttagtttttttaatctctttcctccacttactttttatgaagagcagtctaggggaggagttgatgtgtaaagtgtataaacatgccttgatagaatgtcagccaaaacagagatttgcttcacccacattccagcatatccctgcaagggctgcagtgactacgtattaaatttgcattgctaggtgccatgtgctcctagggcagtttttgaagctgtaaactactccaaaggccaaggttgttgtgattgtcaggattagagtgacacagaagggctttccaacacaggcagtgtgtacaatcttggccttctttggacgctctgtttatgctggtgggttgttatagataaacattatcagtgctatgtttcttttgctagtcaactttcaatcctttgatggaacaaaatttcttcctattcttctttagggtccaggaagaatttcttcctgttggcatccaatttcaaaagatcttgtaaataaattgatatgaataatatactcctcactctaaagcaagctatgaatttgggccactgcactggaaatgtataatatccttttattaaagaaatgtataatatccctttattaaatagcatgattatataatgtttaaatttttttttaccttttagtatgtataggaaatagaatactaatattttgcttcagtggttcttaagaacagctctgctatttgttttttacatgatcacaaaagtctttaacttagttttaacccatatagtcatgcagtttttgtgatgagttgaattcttcttaaataggaaggtttagtgtagtaattctttgggcaagaggcatattcaactctactagagagttaaggcttcagttgtcttttccttttatatatatatatattctttattgagtcagagtgttgctcttgttgcccaggctggagtgcagtggcgcgatcttggctcaccgcaacctccgcctcctgggttcaagcgattctcctgcctcagcctcctgagtagctgggattacagccactcctggctaatattgtatttttagtagagatggggtttctccatgttggtcaagctggtctcgaactcctgacctcaggtgatctgcccgccttggcctcccaaagtgctgggattacaggtgtgagccaccgcactggccctttcatttattttaaggaggaataaatagaaattaaatgagactttttaacaaaggcatcccattcatcgtataaggaattttgataattacagactatatctaagagatgacagagatttactgcgtggaatatcaacctaaatataattccgttattcatagatgaacgtgtattttggataagtgtgagcattaaataggatttttaaaaaataagggcttgaaatggatttcaaacaaaaatattaaatttttctctcagcaggttttattcattctaacaatgaaatatatgcacttattccagaaattcaagttggcctaagcccctctaaatttgtgcatctcaattcttgtcaacttatgtctaaatttgcagtgacatagtctgaagaaaatagtggcatatcctgattatttagtcactttctcattttatccaactttacctcttgctcttttctagcccttttttaaaaaaaattggtttagccttcagaatgtctctagtttttcattttcttagcttctctgaaataagagatagaacatgcaaaataagaggcatacttctgttaccccaggtgatgagagcttactgtaggaaaacatatgggggtagtcaggaggtgcagagaacattttcagcaacccctagatcattcttcaggccccccatttcttggcatggaatgtgcagcagggaacagaaacagtgatgttattgctgcatatgaaagagcagtcccagagttggttcctcttgttctctcaggagtggtcatcttcacatcatctttggcagaagcacccacgagtgtttagtccaggcagttgtaagcacagcagcatgcctcagaattccatcagttttctagtatagatgcacatactgaagatatatccttaagagcagtggcctaccaagatgcaaacatgagaaacactgagactccaaatagaccttgacatcatagggcatgacatgtattcaccaaaatttgaatgaagtgaaaattcagagagaatagcatctgattttgacagtgtgtttttatgacctttttcatatgacttagtatcagcctcaatgacttcaaaaactcagaactgccatattgagtcagttcctacctaggaatttgtatgatgagaaagtatttgtctcttactcattgagaatatttttaattttctgagcataaaaatgggaattaattatatactcaaaggcagaaaatacttttctattaaaatttgccattatatagagtacctaccatttacaatgcactgtgataggctttgtaagtggtacaaagttccctcgctccacatatctgtattaagtcatgtatcaccctggggtaggttcctgtgatacaatgataaattatgaataaagagagacttttcttaaaagagtttttgctaggagggtgatacagtttggatatttgtcctctccaaatctcatgttgaaatttgatcgccaatgttggaggtggagcttagcaggaggtgtttgggtcatggggacagattcctcatgaatgtcctggtgctatattcatgggattgagtgagttttcactcttagctcccaagagatctgtttgttaaaaagcatcttacaccgccctcccctccctcttgctttctctcttgccatgtgacacccctgctcccgctttgtcttctgacatgactgtaagcatcctgagctccttaccagaagcagatgccagcaccatccttcttttccagcctgcagaaccatgagccgaataaacctcttttctttataaattacccagcctcagatattccttaatatcagcacaaaacagtctaagacacatagctggggagaaagacatgcaaacaaaaagttacaaaatgagagcacataaaagaggcgcattatgaacccttggacagtcagggaaggctttctggagcaagtgtgattggaaccagggccaaatttaggtggaagtttgccagagaaagcatgttgtttgtgagcggagcactgaaatttcttccaggtagaaggaatcacacgtgcaactaagaaagaatggtttgcaagtgtttgtcttatttggtttgggtcacatagtgatctattccataggacactaatcctatttataggggccccacctgcataatgtaattacctcccaaaggccccacttccagatatcatcatctgggactagggattcaacatgtgaattttggagggtacaaacattcagtctattgcattatgacttactctgtgtgggccccatttgcccacagttgttcttttagtaacagtagcagctccagcctacattttcccaggcttaggtccagtagaaaaggaagtgtgtgccaaggttatgtgaacatatatctaaattggctctaactgcttctgattaagtcacatgctcatctgttaaataatcactgttgtctgggtactgattagtcaatatagaaaacatcttccaccctggagctgaggcgatggtgcactgataaactggctctaaaaataaaaattttaaaaagaccttatatgtaaaatttactggtttctatcatataaatacttccatcatggctgattttaagatgcctggcttttagagctcctgaatatttaataatcagctcttgcaagccagttccagcagctccagcaaactgtcactgagctgaaggtggagctaccagagcaccaagtctgctggtgagggagggagtggtactctaaaaggaaatgtatctatctatcagaagaggagtaggcgactggtagacaaagccaagtaattttgcacgtaccactgaagaatttttaagtgctcttatatcattttcttgaataacatttttagggaccatataatattccattctgtgaaaatactgtagtttgcatttttttttttattgttggatgtttaggtcaatagaatgacacataatgctttgctggacatgtaatgcctaaagccattttccatatttagttcagatgtttaaagtagtttgcttaagaaaaattgctgggtcaaaggaatagaccatttaatacttctggtaaatattctccaatagatgtacaaaatagttttaccactttatatcattgtaagagagagcaactatttcattgcactgtcattaagtataatttttaaaagataggacagaattgatatatcattttaatttataacattagctgctgtaatagataaatcctaattcacagtgagttaacagaatagaagtttatttcttgctcatgtcagagtcttatatgggttttcatagttaggcgtcttctatgtggttatttaggaacaaaggctcattctgtcttatggctttcctttcctctaggcctttgtagtcattctgttcagtgggagaatggcaaaaagcaatggaggacaatatgtaggagattttcatgggccaggaagtgtaacattctatatgcttacattccattgactaaaattcaattctttggccacaactaattgcaggggagaaaagagaaaggattgggtgaacatctggccaatttttactgaaatattcatacctgagatggagaaatcttttcataaagtctgattctattccctccttgtactacttgagtatatctgcaataaatcacccatgttactagggttatttacggaatttaaatatagaatatgaaattttattttattttattttattttattttattttattttattttattttattttattttattttattttatttttagatggagtctcactctgtcacctaggctggagtgcagtggcacgatcctggctcactgcaacctccgcctcccaggttcaagtgattcttgtgcctcagcctcccaagtagctggaattacaggcatgtaccaccatgcccagctaattttttatatttttagtggagatggggttttgccatgttggccaggctggtcttgaactcctgacctcatgtgatccgcctgcctaaacctcccaaagtgctgagattacagatgtgagccactgtgcccagctataatattgataagagatacatagctttttcatagaccaaagtggtggggaagtaatactaaatagttattgaatgacctttagtttagacactgaagagaatgaaagttgtcggacaaagtagctttggcacataaacaagtcttggatagataacattcattcagtgtataagaaaattaaatgtagaagacactgtataaggaattataactgattaatctttgctgacttaccagaatgatattttaataaaatattttaataaaaaggctacctgtggattgggaaaaagtatttgcaaaccacatgtaattataagggttaatatccaaaatttataaataactcatacaactcaatatcagaaaaacaattaacccaattaaaaatgagcgaaggactgggtgtggtggttcatacctgtaaccctagcactttgggagggtgaggaaggcagatcacctgaggtcagagttcgagaccagcctgactaacgtggcgaaagcccgtctctactaaaaaaaaatacaaaattagctgggtgtggtggcgcatgcctgtaatcccagctactcaggaggctgagagaggagaatcatttgaacctgggaggtggaggctacagtgagccgaaatcgcaccattgcactccagcctgtgcaacatgagtgaaagaatgaaactccttcaaaaaaaataaaaaaagcaaagggcctgaatagacataaaaatggctaacaggtatatgaaaaggtggtcaacatcaccaatcatcaggtaaatgcaaatcaaaaccactatgagatattacctcatacccattaggatggctgttatcaaaaagacaagagataacaagtattggtgaaagtgtagaaaaaagggaatgctagtacactgttggtgagaatgtggattgatacggtcattctgaaaaacagtatggatatttgtaaagaaattaaaaatagaactgccatatatgacccagcaatccctctcttggatatatacccaaaggagtttaagtcagcatgtcacagagatgcctgcactcccatgttcattgcagcattatttacaatagctaagatatggaaacaacttaagtaccatgtcccactgatgggtgtatattggagcatatatacataatttattttatatttgcattacacacacacacacacatacagatacacacaatgaaatactattcagccttaaaaaataatatgctgccatttgctacaacatggatgaacccagaggacattaagcttagtgaaataagtccttctttcttttctaacagaaggaaaaatattgcatgatctcagatgtgctgtctaaaaataagtcaaatatgcagagatagagaacaaaacagtggttaccaaggacagtggtggggtggagggaaatgaggagatgtagatcaaggatacaaagtagcagatgtgtgggatgaacacatctagagctctaatgcacaacatgagaactatggttcataatagtgtattgaatttggaattttgagaaatgagtagattttagctgcctttgccacacttgcaagaaaatgggtagctatgtgaggtgatagacatgttaatttgttttactatataaccattttgctatttatttatatatatctcataatatcgtgttgtatactttaaatatatacaataaaatttattaaaaacacaaacaggaatattttaggtctttttcttgtttctacctacacaggtgattaaagtatacagtgaagatgaaaccagcagggctttagatgtacccagtgacataacggctcgagatgtttgtcagctgttgatcctgaagaatcattacattgatgaccacagctggaccctttttgagcacctgcctcacataggtgtaggtaaggatacggagttattgtctcacatcattgcttttctatttcttgttcagctccctcttgaacaccaataattcttagatttggtgttttgagataattttctatatcttgtaggtgatcccagttccttttcattcttttttctttttttccttctgatcatgtattttcagatagccaactcattgatgttttcctctgcttgatccattctgctgttgagagcctctaatgaatttttcagttcagaaaatgtagttctcaggttcacaatttgttgtattttttaaaaaattcaatctcattgttaaatttatcttataaatatctgaattgattttatcagtttcatcctggcagtcactgaatttccttaaaggtgctattttaaattcttggtcagagctcacatatcgctgtcttgctggggtcactaactggttccttgtgtctgtttagagagatcaaggttccctgttcgctgttgtttttgtggatgtgtgtctgtatcttggcactgaaggattagttatttattcgagccttctttacctggcttcttttgttctttattggatatattccttagaggtttttgcccataggtcattgccttctttttggctctaggtggtgccttaaacctaggttcgccttggctctagtgaaggtcagagcactgcactttccaaatgggagaggttcccaaaggggatatcccaacagtttgggacagctggctagggacccatggccaggggacctgtgggatgaacctcctatcgtgtggtgctgctgaacagccactctgatttggtgtctcctttggctgggttgcagagcagagtttctggggctgggaatggttgtcctgcccccttttatgtctctgcctgtcctcagggatatttctcccatcaggcaatcacgatgcttcctatgattaagacagaggcagatcttctgccagggaacccaagatggggtaagaggttgtctaccttaatctcactttttctggtgtaaacacagtgagttgggggaaagtttttcacaagcttgtgggaggggcatcgtggtggatatggaagtttgattctcttaccatctggagcttttctttactttcctgtcgcccgtggaactgcctcatcttcatatttgagttctgggatacttctggggaaaatctcagtgctatttatttggttttggttttctgttggggagagtgaagccagtggcttctttgccattatttttcaggaagtcctgcttttctgtttattttagtatagatcctatggtgaagattttcttccgaggtacaaaaatagaaaagaattatgaataatcatttctttattcttttattttttgttatttgtagtcacaagagaaagaaagtagcgcaaagtagaaacaagcctagaaatttttataatttacccacccctcttcatttaaagatctatgggaattttagacctaaaacagctcaaattgatggaagaatacatttcataataattttattagcacaatgcaaagtgtttgatttatttaaaaaagtaagctgtcatttggaccacattttgagtcaattgtagcacagacaggtacaaatatccatagcagtggttctctttatggtagtgtagaccctaaatttttcttgaagaaataagtaagtccttcacatttttaagacataaacacaaggagtagcctcttaaaatgttttatttggaaatgcatctctattgtgaagtgtgaagggcttaaaaatattcttttagtatgttctaaagaattcgttctactagagtgagacaggatttggcaacaattttgtcccctgatttcttatttttatagatttgttttcaaaacatgtttacatataagtagataagacaggaaggagttcgttatggcagtgtcattcgattctttgaactccttattagtttcctgtggttgctgttccaaattaccacaaactcgtcttaaagcaacagaaatttattctcacattttggaggccagaagactgaaatccatatcactggagtgaaatcaaggtgtcgtcagggatgtgtgtcctctggaagctctaatttcttgcctcttccagctctggtggctgccagcatttgttggcttgtggctgcatcacctaatctctgccactgtggtcatattgctttctgctcttctgtctgtgtcaagtctccctctttcttataaaagcggtaacatttcgggcccacccagataattcaggataatctccatttcaagatccttaatttaatactgtctgcaaaattttttttccacgtgacattcacaggttctaggaattaagatgtggttatctttcgggggctatagttcagcctgccacaaacttcattgcattatatgtttaacaacttttagtaagaaatcatcaaaatcattttaaataatttatcagtgacagctccattagttgcttcaatttgttcagacttgtgaaagaattttatacatagtcattagagtcatttactttctagcatagctgccaatatacaaaatcgtccctttgtttgatgcattcaagagtttatgcctcagagcaatgtgccaatgaaaggttctgttcaaatgaacatcctttctcttatgaaatggaattaaaaatgattttggcagaaaaggtgtgttcttagaaggattcattttttaaagatttgggaagtggtttttttgaacactacatgcattccctgaaccatttagaaaatgtttgtacttctgatttgacaactggtgtcctaggacatgtcagaacctcgtgaaggggatagagtaaggcctgtggagaggaagctagaattgttccacggtatcctcagctgatagctgatgagctacaatagtgcaactgactttgacagctcagcctagatagttatcaacctgccaaggacgcttgcttctaaaggtatgtcatactggccaatatgacttgttgcctcatcttctaggacagaagaggctcaacatatattttcttcattgccacttgtgactagtttaacttctatacatgataattaatctcctagaagtatggtgttaattctcaatagatatctgccctattccaagctatttcatttagctcctaattagcataatatattattacagtattttatattcttaaatttttctttcggggggacttaaatttttttttgttatagtcactaccatttatctctaacaaatagctttgcagttcagtaataaaaatctgctctgtaaatcaagaagtgtttttccctgagaacactgcaaattatttgtattaaggaataaaacacacaggtcttttaatgcaaaagctgaaagtggaacactgggaattaatttgatccacatactaaatttaaacttttaggcatcaagtagcaatagaagtttatttctttattactgtattttctggaaactgctgaaataaaatcaaagatatgagcatattctcatgacttcatcaaccatgcattagaccaaagctcataagaaagaattttatttccagagccttcttgtgtttttgttttcctttggtttttcactcagattatatgtttaaacagaacaattgaaaacattaatgctaccccaaaactaacatgtattagatttaatagcttccagttctttaccgatgtaagaggagagtaatcactattgaggtactgtcatcttcctcagcacaaaatataaacagttttgtctttaaaatgttttttgttttagttttgcctttttgcttagtttattataatcttgcaatatctattcagtctaattgtggtaggaagtaaaatgttcaatttaatttgcatatttaaatgaatggaaagaactacagtggtttttttctccttaaatgtgatatgcagctacagatactctttgttaacagaataaaccgctgacatctttactgcaagtcttctgtgagtgctactgatgtaaagaaccaaaggatgaactattttccagaactttagtgatcagctagtcggctctgcatattgtttaagaaccattcttgcactctttttgtccaaaatgatgaattttcaataaataaaattatatttggttttctgttcctgtgttaacttgcttaggataatgcccttattgaatagggagtccagcatccatgatggctgtaggagtgtggctttatttctttttatgcaggacatgatttcattcttttttttatggcttcatagtattccatgatttatatgtaccacttttttttttttcttttctgagacagagtcttggtctgtctcccatgctggagtgcagtggcgcgatcttagctcactgcaacctccgtctcccgggctcaagctattcttgtgcatcagccttcagagtagctgggattacaggcacatggcaccacagccagctattttttttttaattttatttttagtagagatggggtttcaccatgttggccaggcttgaattcaactcctgaggtcaggtgatccacccaccttgacctcccaaagtgctaggattacaggtgtgagccaccatgcctggcctatatgtactgcattttctttatccagtccactgttagtgattctgtgtctttgctattgtgaatagtgctgcaatgaatgtaagagtgcaggtgtctttttatttattttggatgtatgcccagtaatgggattgccgggttggatgatagttcttttttaaattttttgagaaatctccaaactactttccacagtggctgaactaatttacattccaccagcagtgtataagcattcccttttctctgcagccttgccaatatctgctgttttttttacttttgatgatagccattctgactgatgggagatggtatctcattgtggttttgatttgcattcctctgatgattagtgatgtggaggaatttttcatgtttgttggctacttgtatgtcttctttcaagaagtgttgattcgtgtccttcaccactttataatggggttgttttttgtttgttgaattaggttcattatagattctagatattagacctttgttggatgcatagtttgcaaatattttctcccattctgtaggttgtctgtttaatctgttgatagtttcctttgctgttcagaagctctttagtttaattaggttccacttgtctatttttgtttttgttgcaattgcttttgaggacatagtcataaattcttcctcaaggctgttgtccagaatggtgtttcctaggttttaatcttttaaatctttaatccgtcctgagctaatttttgtatgtggtgcaaggtaggggtccactttcattcttctgtatttggctagccagttttcccaataccatttattgaatagggagtcccctcctcattgattatttttgtcaactttgtcaaagctcagatggctgtaggagtatggctttatttctgggttctctgttgtgttccattggtcaatatgtctgtttttgtacaagtatcatgctgttttgattactgtaggattataatatggtttgaagtggggtaatgtgacccctccagctttgtttctttgctcaggattactttgactacttggtctctttttgggttccgtattaagtgggagctaaacattggatactcatggacatagagatggcaacaatagacactgggggctactaggggaggaagaggtgggaggaagggttgaaaaactaactgtcgagtactgtgctcactttctgggtgacgggtgcgattgtatccagacctcagcatcacacagtatacccatgttaaaaacttgcatatatatatatgtgtgtgtgtttcttgaattgaaataaaagttgaaattataaaaaataaataaatagaattgtaaagggaagggcatagtatctatttatttaaatttaaattatttatttaattttttttagagatagggtctcttttgcctgaggtggagtgcagtggtggagtcatggctcactgcagcctcagattcctggactcaaacaatcctccagcctcagcctctgttattattattattatttattattattattttttggagacggagtttcactcttgacacccaggctggagtgcaatggcgcaatcttggctcactgcacccttcgcctcccaagttcaagtgattctcctgcctcagcctcccaagtagctgagattacaggcacccaccaccacgcccagctaatttttgtattttttaaactagagtcagggtttcaccatgctggccaggctggtctcgaactcctgacctaaggtgaaccaccccacctcggcctcccaaagtgctgggattacaggcgagagccaccacgactggcctattattttaaaaaatattttaaatacaaaaataatctatctcattgtaaatacctcaaaaatcatgaagtaaacaaaattattcataatttcaagaccgagataactaatgttaacattttttaaaactctttaatcagtttctctactttaacatagttgctatatgtattaactcttatagactaccttctttttcttttttcttttgtgcacttaaaatatatcttgagtatttgtagttttttacttgtcattttacagattccacaaaaatcagtaactcctcttgccttctctggctgcgttacccaaacagtttagcaaatatttattgacaattttgtaccaagcctatattttgctgtagattctggggatgcagtatgagcaaaacagacaaaaagtattgcccttgtgagtttgcattttcactgggagagagacaggaaacaaggcctaatatttgttatcccgtagaggatgataagctctggggagggaaagcaggaggaaagagggagagtgagtgctagagcagaagggagatgtgctttattttttatttatttatttagagaccgagtctcactctgctccccaggctggagtgcagaggtgtaatctcagctcactgcaacctccaccccccaggttcaagtgattctcctgcttcagcctcccaagtagctgggattacaggagcctgacaccacacccagctaatttttgtatttttagtagagacagggtttcactatcttggccaggctggtcttgaactcctgacctcatgatccacccgcctcggactcccaaagtgctgggattacaggtgtgagccaccacaaccagctgggagatgcactttaaagaggcatcagagaaagcctccctgacggagtgatgtttgagtagagaaatgaagcacgtagcaggcaggctgtgcaattaagtggaagattgttctagacagagggaacagcaagtggaaaggcctggacgtggcagtgtgcttgtgttcaggaagcagcctaggggccattgcacctggagtggagtcaataaggtggaaggtaatgggagaggacatcacagagttgccccaggaccagatcgtgtagggtctcataggccaagaagtgggcctggcatttacactgagtgagagaaaaagcaaggggaggtctttgagtcagagaagaatatgatgtgatttagttttaaaagtatactactaaggagaccagaatgcaagatttgaccttttattttgcttttccatcagactacctgtggctccctggaatgatccccacctatctgtcatttctactagctgtacatgcagccattgtaccatcttcacacgtggtctgtttatgagatttagtgtttgtgagatcctgaggcctcataggtaaggatattttgacttataggatagatgagagttgagggttttctgcactttagctcacttttagtgaccaagataagcttaggccagtttcagagacattccgagttgtgaatacatatgctactatcgttgcttctcatctgtctaaaccatatcacaagctactaaaagcagaagggggaatacttgaaattcaaaatgtggtaagttcctgaacctgaagtctaatttcagagttaaattttctgtggcaaaggaaacttcaatcttattagtattttttttttccgagatggagtcgccgtctgtcgcccagggtggagtacagtatgtgatactggctcactgcctcctccgcctcccagctgcaagtgattcttgcgcctcagactcctgagtagctgggatttcaggcgtgcaccatcacgcctggctaatttttgtatttttagtagagatggggtttcactatgttggctaggctggtcttgaactcctgacctcaagtgatccatctgccttggcctcccaaagtgctgggattacaggcgtgagccaccacgcccgaccgttattagtatttttaatataaatgcatatgtgtgatagctactactagtgtgcatagagtatgtattttaatatccatttacatgcaggaatacaaagatctagattccattagattctgtaatctgcattttccactgaagcaagttggtttcttcccaccacaatatttcaagcaaatgttcctgagattctgcggtcggtttgcctctgtctcactctacatctctctcaggaatgctataatttaaattgcaaaccaccaggaaaactttcgtataaacgttcctaacccaggtggtaatgaaattactgagattgaactgagccaacccagttcaccttatagcagagccagatatttattttggctgagcgagagagaatcatgctaaaagttacctgtttttgaatttgtacaaaacatgaattgtataataatactatgtttggaactttgaatgcaatgtccatgtttcatatcctctacctgtaattattaatatatggctgctgagaattttaataggcagagtcagtcatggaagacaactaaatatcttgattttgttatgaatctctgaatggcctgattttggatcatattattatatggttctacttgtacacacactttgacagacattgaatttaaaatgtcagcacatcaacaaatatttctcctttcatgatgtagtaaaccaggttttgcaactggtgtggtttgcttcacagccactggatgtcactatagttccccagatagaatcctctgtgctgttataatcaatgtaagagtagggtgggggaaaaactttagcttcaagtcctctgaaacttaatgggatccatgtttgtcttgctcccattctgattcctaattgaagccatggtatgaagcagtggcaattaacacaatacctcaagcgcatacctacagactcctcgggaagaggaattaattgtattttagtatcattgctagggacagctgagatttccattgtgaatatcattgtggagtggctttaataagcaaaatgaatgactggaggcttttaatgaaaccattttaatgtgtgcagctatgcccacgtgatcgccttaagacagaagcgatgcacagtgacagtgagggaatggttcacagcctcctgcttggaagctgctccttcgctcttttttttttttaacaaaggaagtacaagtgtttttcctcttctggagctgacatgtagttggacttcctgtgcagtttataacataccagccatcagagttgtgaccaccctcatcacagcagaaatcattgtgaagcctttgggacatgtggcactgtgcttccttccataaagagaaccatgtgccctgaccctctgggctttcaggagacatggtgtcctggtggcacgcacagaccggaaatgggcaatatgtaactagcaaagatagtaagtgcccacaactaaatctgcttctgattcagctgattttttcttctacatattcttatagcctcggctacatgaattcaggtccgagcatctctcccctcaggtattatgttagcctcacaactggtcctcctgcctctggtagtaccaacattatccatctgaatgcagacctgattctttttgcatttggatccaaggtcctctgtggggcttgtagcatcttgtgacctgtctgcccttcatagctgcagtcttaatgtctcacccctccctccttttagtttatacattagagaactgcctgcagatgcctgcatatactacagtttctactcagttttcttgtttgtgatgttaagagtcacaggaaaccccttcctgtccatctttacttggctaactgctatgtatcttccagggcttagttattttagttaaaaatgtcaggaaagtaaaaccccagccttttcttaaaaatacttatggcaataaagatgaaaactctgagctgtccaagctgactgataggtaacgtagtgccactgtccagggagagtggagagagaaaagcagttggaggcatcccatgctcagccttgtgaagtagaatcaccctttccatctatctgacagcaggccgggagacacacctgcctcttacacttgcctgactgcatggcgcaaactgctgctgctgctccagggctgttccttgagatgatcaggatgcttgctgccaccgtccgtactcatacaccccttgggcaattgcaaatcctgaaaacagcagagagctgcaggaggcactaagagtgttagtgatgaattgtgtcctgggaggtgatgcttccacaggacatactatataggtgggtgtgagaaacaagccgtgtggacaagatttagatacaaggttgttcaaagtagattgtttataatatcaattaactagacaagtaaaacctcagtataaaaggagaatgttataaattatagtacatccataggttgtaatgttatgcagcttttgatcatgcttttattcttcctttgaagactgatgtgggtaaatgtaaggttgtggtgacgattgaataaaatcagtgcataaacatatgatgttttctaatattataaaaagtatatacacatacactcatatagagcaagagaaaacgacaagaaaggaatatactgaaaggttaggtgcttattcctgattgacaggtttaaagatgtattgtgattgtaagttatctgtatttgtaaaatttcctttaatggaatgtattattttaataatcagaaaaaagaaataaacacaattttaaaaacttttaaagagatttttaaagccttagctcagacatctttctgaagccccaagttggacaaaatacacatcttctttgctgctgtaacagtttctacaactatcttaacagtgatcaaattattaaaattagacagtaattccatggagctgggactctctgtacactgcatctttgtaacccagggtctaagacaaataaatgtgtttggaactaagtcatactaaactgtaaggcatttatatcaaaaaattaaaaggatggattacaaagtacatagaaggaataggcttggaaaagaagccaaagaaatcacatgctgtgctcagatagaatttactcttgagtcctcaaagaatgctgtgagaaccttcgaattaatggaagctgtctgtaagctcttcagatatttacccagtcaactcgagatcatatatatgcaggcatttttgtggaaaaataaggctgcctctgaatataagttccaatggttgggtcggagttaattggagactatttcccctcgcagaagaatgaactgcagggctttatagccatcaagctgaagtgtcacaattttcctattattgcacttggggagttgaatgtgtctgatggcaattttctgagggatcctgctggtattaagtagtattcttaggttaaggaaccttttagaaattgagctgtgttttattctttgcttctccagtttttgttttgcttggccagaggctgttcatttttatctgaaaataagattgacaaaatgtatgtagtttctacccagcatagagaagtacaaggaccatttgtctcctggagtttcctgtaaaaaaggtattcaaaaaattgttttctgagcgaattagaggtaaaagccacttttgtttcttctcttatcaagtgagagaagagtagggactcaggtttctatttgagctccacgctgtacttggcagtagattcagcaaagaaatccaggcagaaggtcacaggtgagcactctccattcttggaggattgaggtttttaaaaagactttgatgttaaatcaacagtttcagaagaaacttcttgctttcttcttcttttttcttttctttttctttttttaaagaaagagtttctgaaaattcaaaaacagaattacatgtagttatcattatttggtaatatttctttttattaccataagacctcactgacctattagaaacaaaaaacacaacttaaggcaataggaaatttttgtttttgttttgaaaaagcctttaaaatgcttttgaagcttttctttttccatcttcttgattgctatgttgaagtaatttaagagggcttccctcctatttttctacctacatatgagtggtagttgacaattgtaatttactttccaatgcccgaaaaataacgtcagaaagttttattttaaatagacttgtatctgtgaagttttaataacatgttttattatagtattttagatggattttataaagttttaaaaataaagtctaaaataataattttgaattcatgtgattcctacctgtggtcacttctcaaatggtaattcaaaaagtacctgagttcattctgggttttgaacatagcagcaaagagcccctagttgtagaattcatattgttcctttttgatatttgaaataaatgataaataacttagtaggattacttacttggttaaaatttgcttggtaggagaaaggtccaagaaagtttattaaaggccttttgttttagtgttttgttttgttttcccttttcttaggtcttggtgatggtgttttttggctagaccaaggcaagagaaagttggtcttcagcaacatttcacctccttttgcagcgtttttattttcttctcaaagtagtccatctagtcatcttgtatattcctgttgaattttctgtctactagggcctgtatttagtcagatatctgcattgaaaaaagaaatgctaattttatgtgagatgtgattaactgatattcaattatgcctcccagggttatttggattattgtaacattaatcctttaacataatgagattggttgggggaaggtacaattcatgcaaattgggatggtgatatataaatttaaaaagaatatgtaatataatttctaaaaatcagtttctacaataagaaaattatatcttcattaccaggctagtatataaggtaaaaaactatagctgcattcaatccacttgacttttattagcttccttaatatgttatctgaatttttgatagaatagtactagaaatcttttttcgaaggaatggaatgtatgtctttggctttctcacatactctatttcttgatggctttttaaaagatgtatttttcttaagattaccagattattttcctagtgctagtaattgcagtatgtaaatactcagttttatagttctgtgacattttctgcaaatcttttatcctttattttattttttcaagattggtattctggtttttatttgcatgtagtcaacaaaacccctgactagattccacttcttggtaaccatacacattacgctagttcttttttatattcagactcctgagtagctgggattatgggcatgagccaccgaacctgcttagttctttagttacacatttgtcatagctgttcaaatgtagtttgatttttcaaccttttttgttttattttcttttttgatgcagtccaaattcaaatgatttgtactttgaagattgacataatttgaaatcttgcccattactgttttgtcccttacacttaaaatgtgatttactttcagttaattagcaaatatttattgaatacctttcaaaataaaagaattggggccgggcgcggtggctcacgcctgtaatcccagcactttgggaggccgaggcgggcggatcacgaggtcaagagatcaagaccatggtgaaaccccgtctctactaaaaataggaaaaattagccgggcgcagtggcgggtgcctgtagtcccagctactcgggaggctgaggcaggagaatggcgtgaacccgggaggcggagcttgcagtgagccgagattgcgccactgcactccaccatgggcgacagagcaagactccatctcaaaaaaaaaaaaaaaaaaaaaaaaaagaattggaaacaactaaggtagagaacggcaggagcatgaaagagcaattttagttgatatagacagaatgtgcaggatgtaaatagatccagcagaggcgctagggaatgtcccttgggtgagaacttccatgaagttgaagcaatgtgtgcagggaaaagaacatcaacttgggctcagacatgtggttgtcattcaacctgggcacttgggacctacaagagggggcacttgggacctacaccatccaattaccatccagctccctcacagtctccactccaccagtttccttcaataactctttaactctgcctcgtttcccagagggcagagggtgggtccatatacatggctattctgaacctctgtttctatctgtaaaatggaactataacttgcttattacattattatattgatttcctaaggcttatgtaacaaattacaaatttggtggcttaaaaaatagaaatgtattctttcacagttctggagagtcacattctttccaagaaccttagggagattccaccccttgcccgttaacagcttctcttggctactagcattccttggcttgtgatgatttcacttgaacctctgcttccctgatcacattgcttttcctcttctgtctgtgttaaatcacctgcctctgtcttaaaaggatatatgtgattggatttaggtcctaccttaatccaggatattccccccatttcaacatccttaatttaatgacatctgcagaggctttaccacataaggcaacatttacaggttctagagattaggacctgatatctttagggccattatttagcttactataggtattataagaattaaatacaataatgaaacagctgtcagactcagacatgcagaaattactgtattttgaattagtttctgatactgagtaacctggcttaagaacagacaggttattcttctattatttgtttgttctctggattgttcttagtctttttggggaaaataatcaatgcagtttttatcaatgagttccatacacgtttgaaatgtgttcagttgaaggtttagacctaccttcactcctccagcactctgttgggacatgtaaatccccagagggatatctgtctaacttttatccaactgttgtcttcatgttgtagaaactcctgctttttaagcttattgcttatatcatgatgacccttaggttcatggtcttcctttagtccttccacatttcttctcaggaatgtggcactacaatactcttgccccgtactgggatgctgtggacttgacattgtacttagctattgcttctctgtcatgcttggtgaagggcttctatttaagggcagggtatagactttcctaagtctatgctctgatttgagccacataccactgttaaacctatccggagtcttacaactcatagagggttctgttcaggaaggaggcaggatatggggtcacttgggacctacaccatccagttaccatctagttccctcacagtctccatccactccaccagtttccttcaataaccctttaactctgcctcctttctcagagggcagagggtgggtccccacaagtgacaatggaggattgactaggcatgcttcttcctaaataattatatttgtcaaaaattgataaagtctactgtgacactcaaaaaaacaacaaaatgcctctttgctattttttcctttctttatagtgtagtatgagggcagaattcatactattttcttagaggtagaggaaggtaatgggtccaaggaaacacaggttggcaaagcaaacaaacaaacaagcatctttgttgatatcttgaaattgtctcccactgcagttgcaaagaatacagataccgtgcttagcacatagtgcatttaataatgtgtacctgtgtttcataatcttgaaaataccagctgagtttgtgtgaaaagtaaacagaagtaaggacagatttttaaggatgcaacttcccccttggtagctcagtgatcactggatgtccctccagtttgtcttgcagtttttctagcttattactggtaacacatccttccaagtgctaaggctgagaaccttgatgtcttcctcaagtactttctttttcactccatatccaatttgtcagtgaattctgttgtccctaccttcaaaatacatcaagattctgtgtattttttttaaccacatcaactgctaccatgctaatgtaagctgcatcatctctcctggggttagttccaatagcctaccaaatggtctttgtgctttcagccttttaaaatcagttttctgctccacagtgtgatcctattgaaacttgttagttcatgttattcctgtgttcaaaatgacttcccatctaacacagaggaaaagcctagcccttactatagactgcagggctttctacaacccactatctcatccccattatttccttaacttcttctcctgggataaccccttttccttgttcagcattagccacactaacctcctggctgtatttcaaacataccagcctttctctcacctcaagggtttttttttcttgcttctcctctctatctgcttggctcctgtcctcttctcctttaggtctctgtttaaacattaccttctcaatgaggccttcttgataagctgatggaaatggattcctatcccctgtcctcagcactttctctctcttcgctgctctatttttccctgtaaggtttatcaccactattatggtttaaatatatgcccctccaaatttcatgttgaaatgtgatccccagtgttggaggtgggcctagtgggaggtgtttgggtcatgagggcaggtctcttgtgaatgacttggtgccatccttgtggtaatgagtgaattctcactctatttgttcacacaaaagctggttgttcaaaaaagcctggcatgtctattgctgtctcttgccgtgtgacacgcctgctccccctttaccttcctgcatgattgtaagcttcctgagacctcaccagaagcaggtgctgctaccatgcttcctgtatagccatgagccaaataaacccctttcctatataaattacccaacctcaggtatttcttgacagcaacaaaaaatggattaagaccactactttttatgattcacattttatttattgtccatgtattcccattagaatgaaagcttcatgagggcagttattttgttactgtcttctccactacaaaatttttagccctaagatgagtttttgacatactgtgaaccttcaacaaatatttgttgaatggatgaacaaatgactaagttataactaactgccagactatatgcatttatctataacaggcagaagcagacaagctttttgggcagggttcacattcatacacatgttttaggaggtttgctatgctatcggtgtccacgttggattagaagaatgagaaagtagaggcttgaagattagttaggctgaacaacaaaaggcaaaggtctaaattgaaatggtgacagtgggacctggtgtgggggttgtttgttgtgtaagagacactcagagaaagaatccctgctatctgagaatttcaggagtagaagatattggagcagacgtagagaaagttgcaaaggtgagttgtagtctactttttttgacggaatgtggtaaaaatgacagtaatggagacgggataatttaggaagaaaaagtcatttgaaagggaaaaatgtagatgactttgtttcgtttttaagtttaaaaagttttttggtaccatttgaaattttgtatgtgtacagttcagtggcgttatatgaattcacattgttgtgcaaccatcacgactggccatcaatctctgaaatattttaattttctcatactgaaactctgcatcaattaaacaacaaccctttattccctactccctcctacccctggcagccaccattctactttctatctctatgaatttgactattctaggtaccttgtataagtggaatcatacagcatttgttcttttgtatttgtcttatttcacttagcaaaatagcttcaaggttcatctatgttgtagcatgtgtcagaattacattcctttttaaagctgaatattccattgtaggtactgcgtataccacatttgttatctattcattgttcatggacatggacattaggtttccaccttttggctattgtgaatgatgttgctatgaacattggtatacaaatttctgtttgagtccctgctttcgcttcttttgagtaaacagccagaagtgaaattgctgatcctatggtaattttatgtgtaatattttgactttggttttagacatactgtatttgaggtggtgcacagtatagtagttaggacaggagcatgggtgagaacaattatagccagagatttcacttcagaaaacctgacaaattagatggttgaagaggtgagaatggattaatttatagggggagaaagaaaagagttgaaccaagattgtaggaggagaaggagctagtggagccagtcgatgggatagaaaaggagcaatcagagttaggaatagaaccccaagtgttgatatatacttagctcaaactcatccatattcattgaacactcttaactgaacttcttttttggatgaataaatgtctatttaagaatgatattactttcaagagtttgggtgttgtaggtcacaaatcactactgaatgttgaatttctgagacataaatgctttttaaaaacatcctagaaacagtaaaacagcagagagtttccatattccttatttggttgttctccatttcctattttgcattggtaatttccagtttcttttcttttctccaccttttattgaagtatggcatacattaagaaaagtgtacaaaccaagtgtgcacaactcaatggactctcagatattacatatactggagtaaccaaccccaagatcaagaaacagtattgtactcaccccagtgattccgttcatgcccccacttacttaatgtctccaaaaccctttctagcactgtagattaattttgctgttttgaaccttatgtaagtagaatcatgcagtatatactatctgtgtctggattctttaattaaatattgtgttcatgaaatgcagtatttatccatactgttgtgggttgttgtagtatattttcactgtgtgcttttacacaatttacttgttcattctcatgtcagtgggcatttgggtagtttcaagtttggggctattatgaataatactactgtcaacatcctcacagtttcttataaaaataggaatttcgcatgttatagtcacctctttaaaactgcctttgcttacttcatttaagtgccttttctgccaagtgccttcccacccacttaattatcttcattgttaatacaaaatatattttccttggtattagctttgaaagtataaagtgccccaaggaattgggcttcttaaaaaaaacctgtatcttcttgtattaaaattttcctttaaagcatttattttaattcttctcagctatccagattagtctggacagtcttaaatgcacatgaacctgtcaaaattcttcatctcttaatgaggtgaattgtccaaccttgaaataaatactttagttttggcaccatgatgagtcagagaaaaaaatagttcccatatacttaatgcagatgtgttatcaaacttatattatttacacagtaataaaaggaaattgagataacaaaaagtacattatgatattttatacatttttttctttctagacaacagtctgctttggtataaaaatgaacattagtaattgaaaattgatgacaaattttatcaatctggctatctcataattaagttgaaatctgctatgtttaacaaagatgcgtaatacattttatatgtttgtatgtgtctgtgtgtgtatatatatatatatatatatatatatatatatatatatatatatttgtctatctgtcaacatactcattgaaacattctttacagaaagaacaatagaagaccacgaactggtgattgaagtgctatccaactgggggatagaagaagaaaacaaactatactttagaaaaaattatgccaaatatgagttctttaaaaacccaatggtaagtgaaatccctcctaatagttacggaaaataaatgaacccgttaaattttatgtgaagaagatagtcactgtaaataaaatacagtcctattcggtaaattgtagatgaagactctggtcctttgaaattatacccatatttcttatgctaacaatgattagtgaacattatacacagaagttcagatacacaggtgcaaaactttttaaagccgtattggtaaagtctgaattgagatgaatttggtttatttaatttaaaagtattaggaaacctagttttgccttttgtgaaaaggtaacaattatacatttgatgtgggaaatgaatttctataggttctcacccagattaggaacaagtgttaagcaaaatattatatcttaacactttctatagaatttaggaaatttaaatagctttctaaagtaaaagcagactaatgattgttgagagtattataacttagccagaaattaagattgacatgaatcttgctattccaaattattttgttttcggtgcagtaatttttgaactaagtagaaatgagataaagaccagtgcattatctagtaaatactactttcattgtagttctctttaaaagaaaataaatgtgtgtcacattctaatgaagactagggatctagaaaagtcagaatagcctctgggctcattattttaaattgtttttgtctctgcagctgaagcatatttttacactaagttttggatgataattggattgaaatgattctttatgaaaaatatatgatacacaccataatagaatattttcaaaccctgaaagacctctcacgttgtcttttatcttaacctattaatagaaacataatgggatgatctttggcaaagaaaattagtcataataaaaattaaataaattcaactgtgaagagaaagtgtttctttttgttgtgagtccttattaaagacaagaatttaaaaagatatatttaaagaaatattgttcaatgcttgttttttatttattttttatttaaacaaggctggacatttgttttgtagacctattgcagtggttcttaactgggaggtgattggacaatgtctggacacatttttggttgtcacaactggcagtagaggggagggctgctagtgagcagaggataggaatactctaaacatctataatatgcaggagtgccccccctcaacacagaattattagaccaaaatgttagtagaactactgttgaaaaaccctgtcctagaggaaatatagtagaatatattttcccaaacttgtctaatcataaaatttactgaggggagagtgcttattaaaaacatagaatccaggacttgcccggatctactgaatcagaaactccaggaatgaggcctgggaattcctattttaaacaactgccctgggtgaattttatgattaaaaagtttggaaaaatggtaggtagaaagaactggacttttagctcccagcccagtttaagtcctgacctccactgtgctgtgggctatgaccttgggcataccctaaactctgtacttctgtgagcctgttccttgtaaaatgtcatggatagtccttttgacctgataggctggttgcgggactcaggaataagatgtgggagcaagcacattgtcaacttcagggcagtgttttataactccagatacttgaatccatccacatcagcattatctgggggcatttgctaatctttgtgcccaactccagacattctcattaaggtacctatgagtagagtctaaggacgggcattttcaaaagcacttttgggtgaattttagtcacaccagtttaaagaacttttgcttttgattactatattggtcataattgaatcttttctagcatgaattttgtgataatttaactgtgtctttttgacagtatttttttccagagcatatggtatcttttgcaactgaaaccaatggtgaaatatcccccacacagattttgcaggtaaaatatatttttattaacatatataaataatagcataatgaaggaaaacttttaagtccttttttatacatgcccagattttgaaaagttatgctttgaattattattaatattttttgctggaggtaaaactaaaaaaaaaatgcacccaggcaaagaatgtcctaaatcaataaagctctttaacaatattcttcttcccagttttagccaattgtcaaaggattttacatatttaaaaatgtgtgtcttaaaaggaaacttgcaattttgttctgtgatgtgtgtaaatattatgttagtctttagaaaaatcagaattctttgtaaaatacagatatcttaccaatagatactcagtatcagctttcataataaacaccctcaatcctatttgtaataaaatgtttagcaaataaatgaaaggagataaaagatacaggatgcaaatgtattcactagcgtttgtaatagctgttatggaaatccttgcatagaattgtgaaatattcttagctgaattaagaatactagttatctaattaaaaatctccttatttttgtgtctattggactcatttcttccaaactggcagtggcttgaaatggttattttcaaagacattgtcattacaataaatgaataatttcagttattttctttaattttcgatagatttgtagattttacatcagaagctctacagttgttttttacaggttaatgttgagcaatgtctttataatggttgccgtttgagctcagccccatgcatccccaaacccactcagtatcccctgatctttaatgaagacaacttttaatatttccagtattgtttgaccttaaaaatattaggttggcagagctatcatggatttttctgtgggctttttaataggttatatttcatttttgtgcttcagaatatttttgaaacatgattagtccccagagatttttctaaaagctgcttctgtgctcctgggtttttacagagacaccctgtcaaaatgttaggtaaatggcagcagcagctgtgccccaggactttcagatctcagccctctgaatgcttcaccactgtattacaacacagtggtgggatggagtttttattccgcctccttttgcaagtcttcctgtagcacagttatgttgctttaatgttaaattataaaaacaagaaaaatcacaggctttggaatcagatagtcctgcatgtgcccctgacctcttctctccactgaggcaatgtttcccctttttaaaaggtttcttctttttctagtgtgacctctatgactctctttttaaaatttaattggtttggtttaataacttggaaagcactcaaactaaaaaacctacttgcctgttttgcatgtcaattaattaatatctgtggctcattaaattaaatttcttttagtaatttactttaaaaaacataaatatctactgtcagcatttcctttagtagccttttaaaatgtgttacactattttagttaataaattcccttatttcaaattttttccatttgtttattcagagggatttctattttctttttttttttaaatgagacactaatgcatttccactgtcttattaaggatgctgagcacaaacgctcagttgagctattccttttcattctcattttcttgaccaacacatgcccactgtctcaattaattattaccatgtaacaaactattccaagcctttgtggtttaaagtatccatttacattttgccaacaatttgtgggacaggcatctgggaagagtttagctgggtgggtcatctctgaggcacgttgactcagtgctggggattgaaggtccccttctaagagagttttttgactgcatgtcgtttgatactccttggtgtctctgtctctctcccctgtttccccccacttactgtctctctctgtctgtctcatggtgtctcatcctgcagggcttttccagttgcattggactttttacctgtgatggtctcagagtagtcacatttcttatgtgacagctggattccaagggccaagtcacgaaaatcaccaggctagttaagggccacacctagaattggcaaagggtcacttccacatattgtatgggtcaaagcaatgacaggcttgctcgcattcaagggagtggagaaagactccacctttttgtgattcagtggcaagatgacattacagaagagcatgtgggatggaagacattgttgctgtcctctttggaaaacatgacctgccacatccacccacaactgagaaccacagatgacaaagaagagatagttttgtttgctttacccgcctcaaggaggtgaacttggctcaacttcctgcttcacaattgaagtcaggattgtggtcttacttataccataatgaagttaataggtaaacctgtaatctcagggaaaaccatggaaaacgatgaaaagcatatcaggacttaacgcaatagatgacgtccaactttttgaatggacattcaattagctgataattttggtagttagataactatgtactatcacttagaatgtatattttgtgaactcattttcatttgaaacatcttaggtttttggaagactgatttattttctgtgtgtgtatgtgtgtgtgtatacacacacggagatagaaagagagacagaggagagagatataccaaggactatcaaagcaatgcagtatacacaaacacatagttaattaccataatgttatatgttatgatcttgtgtgatttttacatgtttatatttggaatcttaatatgattagtataaggctaccatatcattgatttaatcatagtttgaaaatatataaattttctttcagatgtttctgagttcaagcacatatcctgaaattcatggtttcttacatgcgaaagaacagggaaagaagtcttggaaaaaaatttacttttttctaagaagatctggtttatatttttctactaaaggaacatcaaaggtaaattgaagtatccatgatgtgttatgactgacatattaagctgtaagttaaaacacgttgactttgttgtatttattactttattacttgatgtcaaaggttggtctttgattttcttgatttaaaacgtttgccttgattatttaaacactactcagctttacttcacactggtttcaaagtgtagtatctttgatggagtctggatactcttatttcagtacaacgtatgttactcctttgtcctcactctgaattcactcctttctcctcatccttggcttcagagtttgaagcctgatgtagtgtataccttttctttttaccccaggtcatactgctgatcttgtctacttctgaatctctgttgatcaacatcaacagaacagttaataatagaacagttaataaaatgtctcttctgagtcatttattgctcttttattattgattgatggatttatttcaataggtttttaaggaacaggtagtgtttgattacctgagtaagttctttagtggtgatttctgagagtttggtgcacgcatcaacaggcagaatacactctactcattgtatagtcttttatccttcaccccctcccaccttttccctgagtccccaaagtccattgtatcattcttattcctttgcattctcatagcttagctcccacttatgggtgagaacatacaatttttggttttacattcctgagttacttcgcgtaggataatgatctccagttccatccaggcagctgggaatgccattatttcattcctttttatggttccgtggtctgtctgtctatctatctgtctgtctatctcacaatttctttatccactcgttgattgatggggatttgcgctggttccatatttttgcaattgtgaattgcgctgctataaacttgcatgtgcaagtatctttttcatataatgacttcctctgggaagatacccagtagtgggattgctggatcaaaatgtagttctacttttagttctttaaggaatctccacactgttttccaaagtggttgtactagtttacattcccaccaacagcacaaaagcattcccttttcaccacatccacaccaacatctactgttatttgatttttttgattatggccattcttgcaggagtaaggtggcatcacattgtgattttgatttgcattcccttgatctttggtgatgttgagtatttttttcatatgtttgttggccatttgtatatcttcttttgagagttttttattgatgtcttcagcgtactttttgatgggattctttgttttttttcttgctgatttgtttgagttccttgtagattctggatattagtcctttgtcagatgtagaaattgcaaatattttctcctgctctgtgagttgtctgtttactctgatgagtgtttcttttgctgtgcagaagcttttagtttaattaagtcctatctatttatctttatttttgtttcatttgattttgggttcttagtcgggaagtctttccctaagccaatatctagaagggtttttctgatgttatcttctagaaacttttgtggcttcaggtcttagatttaagcctttgatccatcttgagttgatttttgtataaggtcagagataaggatccactttcattcttctacatgtgacttgccaattatcccagcaccatttgttgactagagtgtcctttttcccacttttttttgtttgctttgtcaaagaccagttggctgttaagtatctggctttatttctgtattctgttccattcgtctatgtgcctatttttataccagtactttactgtttgggtgactatggccttgtagtatagtttgaagtcgggtaatgtgatgcctccaggtttgttctttctgcttagtcttgctttggttatgcaggctcttttttggttccatacaaattttaggatttttttttctagttctgtgaagaacgatgatggtattttgatgagaattgcattgaatttctagattgcttttggcagtatggtcattttcaaaatattgattctgcccatccatgagcatgggctgtgtttccatttgtttgtgtcatctatgttttctttcagcaatgttttgtagttttccttgtagagttctttcaccttcttggttaggtatattcctaagtattttattttattttttttacagcttttgcaaaagggattgagatcttgatttgattctcagcttggtcactattggtgtataacagagctatttatttctgtatgttaattttgtatgctgaaactttgcttaattcatttatcagttctaggagtttttgggggaatctttagggttttctaggtatacgatcatatcatctgtaaacgatgacagtttgacttcctctttaccagtttagatgccctttatttctttttcttgtctgattgctctggctaggactttcagtactatgttgaatagaaccggtgagagtgagcatccatttcttgttccagttctcagggggaatgctttcaacctttcctcattcagtataatgttggctgtgggtttgccatagatggcttcgattactttaaggtatgtccttctatgccaattttgctgaagttttttatcataaagtgttgctggattttgactaacgctattgagatgaacatgtgatttttgttctaaattctgtttatgtgttgtatcacatttattgacttgcatatgttaaattatccctccatctctgatatataacccacttgatcatggtggattatcttttcaatatgctgttggattcggttggctagtattttgttaaggatttttgcatctatgttcatcagggatattggtctgtagttttcttcttttgttgtgtcctttcctggttttggtattggggtgatactggcttcatagaatgatataggggtgattccctctttttctgtcttgtggaatagtgtcaatgggattggtaccaattcttctttgaatgtctgatagaattcagctgtgaatccatctggtcctggacctttttttttgttgatcatttcttttattaccattttaatctcactgcttgttattggtctgctcagcgtttttatgtcttcctggcttaatctaggagggttatctttccagaaatttatccatgttctctaggttttttagtttatatgcataaaggtgttcatagtagccttgaatgatcttttgtatttctctggtattggttgtaatatctcctgtttcatttctaattgaccttatttgggtcttctctcttcttttcttggttaatcttggctaatggtctatcaattttatttatctttacaaagaaccagcttttgtttcatttatcttttgtattgttttatttgtttcaattttatttagttcttctctgatctttgttatttcttttcttctgctgtgtttgggtttggtttattcttgtttctctagttccttgaggtatgaccttaggtttcctatttgtgctcttttagactttttgatgtaggcatttaaggctatgaactttcctcttagcactacctttgctgtatcccagatgttttgataggttgtgtcactatcattgttcagttcagagaaatttttcatttctatcttgatttcattattgacctaacaatcattcaggagcaggttatttaatttccatgtatttgcatgattttgaggtttccttttggagttgatttccaatttattacactgtgttctgagagagtacttgaaataatttcaatttttaaaaatgtattaagacttgttttgtggcgtatcatatggtctaccttggagaatgttctgtgtgctgatgaatagaatgtatattctgcagttgttgggtagaatgttctgtaaatatctgttaagtccatttgttttaagatatggtttaaatccactgtttctttgttgaccttctgtcttaatgacctgtctagtgcagttagtggagtattaaaatcccccactgttattgtgttgctgtctatctcatttctttacgtctagtagaaattgttttataaatttgggtgccttaggattaggtgcatatatatatttaggattgtgattttttcctactggacaatttcctttatcattatataatatccctctttgtcttttttaactgctgttgctttaaagtctgttttgtctgatataagaatagctattcctgctctcttttggtgtccatttgcatggaatgttttttccacccctttaccttaagtttatgtgagtccctatgtgttatgtgagtctcttgaagacagcaaatacttggttggtgaattcttatttattcttccattctgtatcttttaagtggaacatttaggccatttacagtcaatgttagtattgagatgtgaggtactgaggtactattctattcattgtgctatttgttgcctgaataccttgtttcttttttcatcatgtttttgttttataggtcttgtgagctgtgagctttattctttttttgtaagatggtgatatggtttggctgtgtccccaaccaaatctcatcttgaattgtactgtcataattcccatgtgctgtgtgtgggacttggcgggagataattgaatcatgggagcaggtcattcccatgctattctcgtgatagtgaataagtctcacaagatctgatggttttataaaggggagtttccctgcacaagttctcttgtctactgccatgtgagatgtgcctttcaccttctgctgtgattgtgaggcctccccagccatgaagaactgtgagtcccttaaacctttttcttttgtaaattgcccagtctcatgctgataaagtatatctttatcagcagcatgaaaacaggctaatacagatggagtcttgctctgtcacccaggctggattgcaggggcaccatctcggctcatgcaacctccacctcctgggttcaagtgattcttctgcctcagcctcccagatagctgggattacaggcaaggaccaccatgccagggtaatttatgtatttttagtagagacagggtttcaccatgttagccaggctggtctcgaaattctgccctcaagtgatccacccacctcggcatcccaaaatgctgagatttattctttaaagaggttctattttggtgtattttgaggatttgtttcaagatttagagctccttttagcagctcttgtagtgctggcttggtagtggcgaattttttcagcacttgtttgtctggaaaagactgcttagtttcgctggatacaaaatttttggctgataattattttgtttaaggagactaaagatagggccccaatcccttctagcctgtagtgtttctgctgagagatccactgttaatctggtaggttttctttttttttttttctttttctttgagtatccctctgttgccaggcagaagtgcagtggcatgatctcagctcactgcaacctctgcctcccaggttcaagtgattctcctgccttagcctctcaagtagctgggattacaggcgcacgccaccatggtaggttttcttttataggttacctgatgcttatgcctcatagctcttaagatttttttcctttgactaggctttggataacctgatgactatttccctaggtgatgatttttgtgattaatttcccaggtgttctttgagcttcttgtatttggatgtctagatctctagcaggctggggaagttttctttgatgattccctcaaatatgttttccaaactttcagatttcttttcttcctcgggaacaccagttcttcttaggtttggtcatttaacataatccgaaacttcttggaggctttgttcatcttttaaattattttttttttgtctttgttggattaagttgaaagccttgactttgagttctgaagtcctttcttctacttgtttgattctattgttgaaactttccagagcattttgcatttcttttagtgtgttctttatttctaaaagttgtaattgttttttattcatgctatctatttcactgaagatttttcccttcatatcttgtatcatggctttttttttttttctcactaagttgaacttcacctttctctggtgccttcatgatgagcttaataatcaatcttctaaattctttttctgacaattcatagatttcttcttggtttggatccattgctggtgagctagtgtcatcttttaggggtaagaagtaacttgttttgtcatattaccagtattgtttctctggttccttctcattttgggtaactatgtcaaaaggaagatttgtggctgaagggctgccgttcagattcttttgtcccacagggtgctcccttaatatggtgctctccctcttcccctagggatgtggcttcctgagagccaaactgcagtgagtgttatttctctttcagatctagccacccagtggagctcccgggccctgggctggtactggagagtgtctgcagagagttctgtgatgtgaaccatcttcaggtctctcagccatggataccagcagctgctccagtgaaggtggcaggggagtgaagtggactctgtgagggtccttagttgtagttttgtttattgtgctcgttttgtgttggttggcctgcagcccggagttggcactgtcaagagcatatcagctgcagtagtacaaggaggatcaggtggtggatggtgccctggagcacccaaaagattatgtcctttgtctttggctaccagggcaggtagagaaagaccatcaggtgggacagggttaggcatgtctgagctcagactctccttgggcagggcttgctgcggctgctgtaggggatggaagtgttgttctcaggccaatggagttatgttcccagggggattatggctgcctctgctgcatcatacaggttaccagagaagtggtggaaaatcggcagttacaggcctcacgcagctcctgtgcagcccagaagttcagtttagctcactccatgccccgccaacagcactgagtatttttccaggcagcaggtgaacagggctgagaacttgcctcaggcaaccagcctcccaactgaggaggcaagcagggatttcaggttttgcacctccctacctgccaaggcttctgtactgtgtttgcactcctgattcaccccctcccccaggttctgtctaggaaacaatgagtcagttgaaattgttacaaagttcagctggaattttccttctctctgtggtcttttccaagttcctctggcagccctccccagggacccctgtgagacagtcagaaaaggcttccccagggaccgagagtgcccacaggctcttcctgctgctttttctaccctgtatttcactcaactctaaatttgtctcagctgtaggtaatgtcaaatccttctcctgtgatctggaccttcaggttccgcagtgagggtgtgtgttcaggggtggacgatcccccttttcacactttgggtactcacagttttttggctgtcttctgggggccctgaagcagcaattcatttccttcaaagggtctgtggattctgttggctttccttgtatgttcctgtggtggttcttggagcaaaagttcacaatgtgaatctcctcatgctgttccgcagagtgggagctgcaagttagtcctgcctcctgttcctttacttctctttagttattttgtgtgtgttattttgtctccttacatacattgtaaattcctagaggaagttatgatgctgtcatcagggatgaatagatatatttgtctacatgcttatatgtttacctatataatggttacatagatacacatgtgcagaagtttatatgcacatacattatcacttaaacataaatgtgtattctacagtgctgcctggtttctgtgtctagtctatgtccattatgttatatagtctttggcatacaagtgttgacattttatgcaacgcattggtgtctttcaagtaaaaattcttttgagaatttttatgggaggttattattattctattttcatgcatctatagttgtcaatgacaacactgttgcttctttatgggttaaactgtcttttttctctggcagtttttcaaacattcttataagctttggtgtgcagtaatttccctgctatattactaggtgtgttgaaatatagtctgctaaatcttgcttgattcttagcacacacattcaatctgcaaactcatctttttttcatactagaaatgtacatccattatttatttgactacttcttttctattcttgttatgtgatcttttgcatttgtcttaggattttctgtcttggctagttatgacttcagatgtcccatggcttgtctctgcctttgtattcacagggccttctccctttctctctgtatgtctcttataacaacacttgtcattggattttgggcccacctagataatctcatctcaagatccttaacttaattatatcttcagtgaccctttttctgaattaaggttacatttataatttcctggtattagggcatgagcatattttttggggggctactattcaatccactacagaaagccattgaagtgtttgaacaagggagtgaaattaccaaaagagtatcttgagattagtttggtcacagggagcttaaaagatcaaggagacagagagtgaaagagagaaaaagagactgaagggaagaaggcaaaggaggcagagagggaggagtgggaaggaaagagaaagagagagaagtagagagagaggggccacaagattaaatggcaaaaggccagatttgtgtggctgattgatatcaaagaagaggaagcagttaaaaatgttcttaaagataaaagaaaattaagaaatagaaaataaaaataaacaggaatagcatatttactagaaggtaactctcttagaagacaaatagtgatcttagttctggatatgttttattgaggatgaagcaaacaaatggcaatgctcaaaacagctaacgacggagaccagatgtttgggtaatggtcttgataggagatatggagctgcaaaatagttatacctgactttttcccatattttcccccaactgctcttgtatagcttccttctttccctcatacacagttttcttttgttgctgttcttgtgtgtgggtcttatgtgtgtgcatgtatttccttgtggtataatgcttcatgaaccactacctggctaccatctatgtttgctcaaggccctgggtctctacagtcagcacgtagtgaagcctgccaggcttgtgtccttccctcagggcagcaagttcccccagtccctgggttggtctagagatgccatctgggagccagggactatagccaaaaaccctggaaatcggccaggtgtggtggctcacacctgtaatcgcagtactttgggaggccaaggtgggtggattacctgaggtcaggagttagagaccagcctggccaacatggtgaatccccttctctactaaaaatacaaaaattagccaggcgtggtggcacaagcctgtaataccagctactcaggaggctaaggcaggagaatcacttgaacctaggaggcagaggttgcagtgagccgagatcacgccattgccctccagcctgggcaacaagagtgaaactctgtctcaaaaaacaaaaacaaacaaacaaacaaataaacaaaaaaccttggaaatctacctgttgttccattctactgtggcttagcaggcactcaaaccatgagacgcaggccttcccactcttccccccacttttcactggcagaggagcctcacctctggccactattactacaagtccccagggagtactgctagcaactgctgatgttcatctaaggcccaagggctcttcagtcatcttgtggtgaatgccaccaggtctgggactcgcccttcatggtagtggactcccctctgactcagagcatgtccagaaatgtcatccaagagctgaggcccagaactggggacccctcagaaccatcctggtgctctatccatctgtggccgagctagcatcgaacatacattgaacatacaggacaaagtctcctttacttttccctctgtttttctcaagcagaaggaatctctcaccatagtcaccacaactgcaaatgtgctaggtttcacctgaagccagcatgtcttaggatctatcttaggatctcatccaagtcccatggattactgcctggatatcactgctggttattcagggcccaagatctcttagtcagcaggtgatggatcctgccaggactaggtttttcccttcaaggcagtgggttcccttctggctcagggtgtgtctaacaatgtcatctgggagctactttctgaataggggcctcacaactctggtgccctgtcctactgtggctaagctggtatccaagatgtaagacagaatcctctttactcttccctctcctctcctcaagtggaaggaagggatctctttttggagccacgagctgtgctgcctgggcttgtgggaagggtagtgcaaggactcccgtagccaccccagctgttgctcaccagcttgtgtgccctccaagtgcatggcttccaatcccagctcatcactaggacttgcttaggagttgcagtccttgcagcctagactgcctttcatgtctatttagggctcagagcagtttagtccgcagttgggaggctcgccagaactcgagttccaactgctgggatgggcggttcccctctggttagggctggtctaaatcctccctccatgggtaggtgtcagctgagttcagttcggttttgctttccactgtgacagggcagcactgagttcaatgcaaagtctcatagttactgtgctctccctctcccaagtacacagattctttctcctgctaaggaacaggcgaggggaggtactgacaatgtaagactgtctttcctacctccttcagtgcctctttcagtgatatgaagtccccagggagtactgcagggactgctgatgttcacttaaggcctaagggctctccagtcatcttgtggtgaatgcaccaggactgagactcaccctttatggtagtgggctcccttctaaaaccaggtactgtgagtgctcatctgattttggttcttagaaaggtgcttttttttggtgtaaatgttaaatttggtgttcctgcttgggggaggataggtagagccttctgttcagacatcttgctctgcccctcctaatgtcacatatggcatttctacctgcaaagaaaccatttcctatccttttctctgaggaggtcttgattggttttagttctaaatttagttaactactgctgcaaatcttaaagatgtggtcatgaatatatttacagagaaatctctaagtacgcttctctccacctccccatgtccgtacacatggggaaatgtacaaatgtacacatacttagattttgctaaccatgcccgttcaacttcatagccttatagtgccataagccttagcagtggtggaacaaaaatcaagagaaaaaaactcatcatacctcttattgccttccagtgtttctcaagctaccttttactcttgtttgaataactgaactatattgacttctacagcatcagtggacaggaatggttttattccatcttactagaaatcaaacatttttaccagcaaattaatttttatccaggaataagatttttaaagccagggcaataagcttacctttctctttcctcctacctttttccgagggtcctattctgggtctttttaaagcaattttctttcctgtcttattctccaatggtgttagaaactacagtcattcattcgattaaaatgcttaagaacagtgaatacagagaaactcttgttctgccagttatcagaggtggaataacaccggtaaatgacaatgaaagattcttttggtttttggatttgaatggggttgcccgttttgctcagtgtgttcttctgtggggtgtttttttttttttttttttttccactgcttctcaaattttactgcttatgaatcacctgggatcttgttaaaatgcagatactgattcaggaggtctgggatgagccctgaaagtttgcattgctaacaagctcccaggtgatactgatgctgctggtctgagaccacactgctagcagcaaggttttagagaacaaatgcattttggtcagatttgattatacattcaacctcagaattaagcacttctccaagttattaacctatcacagaataatatgacctagtgatttcccatgaccagttttaaatctcatggatttcccagagaagaaatagctgttcatgattccactttgcgttgaaaatcagaaacattcctctgccagctaatttccctgaactcatctatctgtacagactttctttctttccttttgtaaagttagagtcgctgcttcctgtggtgtgttccactgtacacaaatgtgagggatgactgtgtgtgaatgaagcaggaatcattgtcttgttctcatttatcttctctaactgctatggaagctcaaaccaaccttctcccctttgttgagctaccattatttgaaagctggatgaggaatacgtttccaaaagccaatctttgctaacttttttctctctcagattccttgaaatggtggttaaagagaatcggaagtttaaaacaggaatttatttatattattggaaattaaattataaacaaaattttcacttctcaaattaaataaaattgtatccagctcctggttaattaaagatatggcagcttagattttttttctccttttatttttgtggcatcatattgaacttctgttggtcataagtttttgcccaaggtataaattatataatataaacacacaaaaaagataatgcaaaaatatgtatccatgtcaatacttttttttttaaggaaccgcggcatttgcagtttttcagcgaatttggcaatagtgatatttatgtgtcactggcaggcaaaaaaaaacatggagcaccgactaactatggattctgctttaaggtacaggcttaatattttgatagatgaataaagcaagcctcagccttttaggtaagcttgagtttcctttaattgcttttgaaaagagacagctttctcttatatataggagaattttagtggcttttatttcaacaggtgttaccttcaagatatgcattaacgataaacaatgtgctgtggccttctagcctaacaaagcgggagggccccgagacctgaaaatgctctgtgcagaagaagagcagagtaggacgtgctgggtgaccgcgattagattgcttaaggtaatctcgccggaggcatgaatttctattaactgctgtgagtaccataaaagttagaaaatatctgtatttcagaacgtgaagtctcactgggtggctacatgagaaagaagaaaaataaccaccaaatgtgtatgtttttaaaattctaaatgataaacattttcggagtagagtggaataacctaatacatttctgttttgtgtgtggagtaagtattccatttctagaaatgttctgattttcacttttgtgaaggtattacatagccagtgtaactgaatgaaatgtctcctatacatgactaagtctgcactcttaaaacgttgccaacaatccaaggtaaagtgtattttaaaatgtgcccacccttgagatatttaatgtaactgttttgtgttcgattcgtgttttataaattgctttctagtttaataagcatgactcaaattattgtacaattttactatgaatatattttttaaacatctactctcgtgctaagtagaaattacaacttccgtaagcataatttgttgctgctgagcaattttgaaatgagtaacaatattctaaaggtagactctcataggaaataaaagcagaactgatgtcttccagaatgtatagaaagcatatttattttcaaaaactgtttgccagaaaattgagcaaaacttaaactgtatacttatcaactatttccttttaaagatactgatttggtagtcacagttagggaggaaattacaaaattttgttgttgaaaagatacaatccagggaaagtgcccgtccacattagttagtattgctgctgctgaagccaacaaaatacataatttattgttattattaaatttttggtttaaaataagagcattaacattttctaaggtactctttataatttatgcctaggcactaatataatttgccaatatattgattatgcatattatatgtgtattagatatatataatccttttcttaccacaggaagatttagattattaacaatgcgtgtactaaaactagcttttcaatatagttagaaatgaaaatcagagaagctggagcactgtgaagtccttaggttcccccatttcatttaccctgaagaaggggatgaagtaaacttttcaattgatttgcagtttgtatattttccaggtgtactttttttcttctgcctttgccatttttacctcttctgctctctgttgactttttcctagcatccaacttaagagatatcagggtaaagaaggacagaatagtaataatcagaatcattatcataccaggtttagaagaaagttttattttgtattcttacaatttttaaattgaggtaaaattcacaaaatataaaattaatcaaactattgttaatgtgaataattcagtggcgtttagtgcattcagttccaagacattttaatcacctcaaaagcaaactccatacccattaagcagctactcccacaccctagcaatcaccaatttgcctctgtctgtgtggatttacctattgtaggtatttcatataaatggaatcatacagtatgtgaccttttgtttctgacttttacttagcatagtgttttgtggttcaccaacattgaagcatatgttagctctttattcctttttatggctgtgtactattccattgtatatatagctctctatatctatctatatgttggataaacacagtttatccattttttcactgatggacatttaggttgtttctacctttggctattgtgaatagtgctgctatgaatatgtgtatatgtatttgtttgagtacaggttttcgattttgggggaatacatgttgtaatgaaattgcttattgtatggtaattgtacatttaattttttgagaaattgccaaaatgtttttccacagtggctgaaccattttgcattcctaccagtaatgcatgagagttccaatttcttcatatatttgtcaatacttgttatttactttttttggttcttgttcttgtcaattatggtcattctagtggatgtgaagtggtattggaagaaagttttaacaaatgatttaaatgaagctttttgtttaactgaaatttacattcttttgctgttttggcagatagccaccatgtttacttctttatgagaggtttgcttgtttttcaaatattctgctgttaaagtcacctgagaagctttctgaatttacatgtggtccccgccccatccttaaggattctgaataagaactactaactttgtccagccctccagttttacagataaagaggctggtactctttggaaggctctactccatcaagagttatggtagagaaaatttcttgtggtttttggttttctctgtttttcaaaactggaaatcaggctaggctgcaaagaggatgttcttcaaccttgttaacccatcttcctcccttctaacttgggcttaaagtttgacacccaaaacagaagcaggtggtaagcccacttcctttaatcagcatttcacttaatctaagaagccattggtttttaccaggagacatcactatttttattagcattaaaaggaaaaaaaatgatgccaataaaatgatgatatgatgctttcatatcacttacaatttttgttttatttattcagatagttttgttaggtttatttgaacctagatttttgtaatttaatcacttttgtttgtatacactcagatgtatatacatatggacataaatgtattttacacatacacatatatatgcattaagtatatacacacataaatataaaataaaatatataagtagaatacattaattgaggtatctttaaaacttcttcttattctaagcctggcttttctgaatcattttcatctcagagtcacagatacctgtattttccacaggatatggcatggggctgtgttccactgatattgcgtgtgcaaggtttgatgctggtgatttcttgatcccaccaaaggtttcgggcaatgacaaatcactgggtccatagtgaatgtaagatgttatagattataggatgcagttgaatttatagatgttaaatttcgaaatgcacatctaaaaatgggtgaaatacactaaaagctttctttaattcttccatttcaatgaggcttattttctggaataatgttcccttctcactattttttctcatcttactgttcttaaggcatctttcaatcagattcccagttcaaagatgcgtcattgtgttggttttctatgactgctgtaacaaattaccaccagggtagtgacttaaagcaacataaatttattgttctttagttcagaagcctgaaatgagtcttactggattaagtcaaggtgttggcagagctgcatttcttactgaaggctctagaggagaatccagttaccttgccttttggcagcctttaaaatccacccagacgtcttgtctgggggccctttcaacatcttcaaagccaacactgtcacagcaagtatttctcacactgccatctccctggtactgcctcttctgcctctcccttccacttattaaggccccttgtgattacagtgggcccacatggataatccaggaccatcaccccaccttacaatcagctgattgacaaccttaattccctttttccatgtagcttaacataggctctggagatgaggatgtggacatctttgggggaccattattctacctaccacatccatgtttcctgttcatttcaataatggcgaagcttttccagatgaggctgaagagggaaggaggcatctgtgaggccctttatctggaacctgtgagaacccaaacaggaaagagacatgatatgatctcttttacactgtaaaatacccagatcacaggaagccagggcttgctccaggtctcacaacacagacacgcttgtggcattctaatggtggagtgagttggcttccctggcaacttcttgtcagcagggctcctcctgttggatccccctggctggtgcagctgggatcacctgatggtagaagtgtctttaacacctactttgttttcttttgttgtctactgtgttatttccagcgtttaccattgtacttagcgggaatgaacaaggagatattatcttggctaaaccgagagtgccctcttttttcatcacacaccacttgttagaaacagcctcccaccaagaatttggccacttgttttattcttacgtccttttcttttatatatatgtaaagtcttcatatggatcagatggagactctctttttctctttggataaattctaattacatatagaattatagaatatctgagacttagaaaatgggagattttctcacatgtaatgtcctagttacatgttgtctcttttccttcccttcaattagaactctgcaaggtcctctctaacatattttggtcccttatctgcccctccataggatggggaaatgttaaggtgacccccgccctacctcttgtccagagttaaatgcctactaaagaccttcagaagcacagaggcaactacctaacactgcaggtaccagggacaatatatctttgaagaaaacagacttattagtaggcagctggcttttcaatgcagattaataaaaggtggccaaacagcatgtttcttgtgaaagtgttggtttgaggttattatatattctccaaaatgaatttgactaggaattaagctcctttgccttctttttaaagctattgtaggcttagagttgatttgaaataaatttcattaggtcccattaatgtcaatcaaaccttaaattaaaaaataatttttagaagttgggaaataattggataagaagtcaacacagagaattttaaatgaatgtgggtttgcattcatgttaaaagcaaaatcttgaaaacagtgactcctttagacctcctctgattttttttttttttttttttttttttttttttttgcctaattaccaaatatacccattgtgctagaattgcttttaagggaatgactatttttctttagtagaaaaacagctctgctggaatgtttaaatagaatttatccttcaggtaagatttgattccatggtgtctatttaatctcttttatataaaacctaacttttaagttcattatggctctatgaaatggacagaattgcagaatctaggggaaaaaaggctgtttattccattgttttatttttcttttcttttttttttttttttttaacaaagtagcttaaacctaaaggaggttagcttccaaattcagatgtggaaacctccaggacaagtttggttttggcagttggcattcttactgtttttcaaactaataatccagttataatccagaccggttttccaattctgtcctgccagctcaatccatatgatgctgcctcctgaaagtgaagacactgaaattcttatcttctaccacttatattgtaccttgaaagctttcatttgaaatcagcttgattcctcactattttggtttccaggaatttgaagtaaaaaattaataatggcattaatagttttgatataaggatgctatattgtcaataattttcaacataggcccatgtttatggatttaccagagggaaagtaaatcattagtcattcatcagagaggtacaataaattttgcacagtgttgcttaggatgtgtgtgaagtttttggaatctttgtaccagaaagcacatcgcccttcccaagtgagtttttttttttttatcatgaggcagtgtactactccagatagttgtggtacaatttggtgctaagaataatgagtagatatgtcagctcctgaagtctgtactggtgagctggaccttaagttgtaggtctaagtaaaagacttcaattgtctttttaaatgtattgttgcagggcactaaaagttcatctttcaaaattttggttgctttacttgtttgctttaattgtttttatatttatattgtataattgatgaaagtgttgattttcatagattatcagagtagtaaaagtggtgggaatgtgttttatttatttattctgcagtatggcatgcagctgtaccagaattatatgcatccatatcaaggtagaagtggctgcagttcacagagcatatcacctatggtaaggaccaaatttttgagcctgtgttttattttacattcacattatattaatttaaattacactacataacagtatcttataataatttatgttattttctgttggtaaagtaactctttggcaccattctagtataatgttacattgaattttttatttttggattttatttgcttgcaatctatgtgataaaatcatatcattatacataaagtatttaataaaatatataatagtatatgttaaagttttaaatatttgaaacaattatgtgtctttctgtgtcattacaacatttgaagattagatcttaaaaatataatttatagaacatattccttggcattgtagattgtgttttgttaattattggttttgattgtggtttcatattttattttaataccgattctgggattgtcacaatctagtataaagatgccagtgatttgaattttaaaagctacagtatacacatgtgagctcttttgcattctggctaacaataatttttttaagttccaggtcctttaaaagcagactgctttccaggaaacccaaaaactgcaagccaaaatataggtcgtgtgttacattaactctagcactgcttttcagacttatactaaatgtaacttggatatttatttgcagacacacacagacacatctttttccttctttaggatctaattttaattttgtgtgcattaacataagaaatgtatttctgaacttaagatttatgttctgctatttttgctgcactccttaagatagggtatattaggaattcagatgtatgcacatgtgttacaaatcagttaatgtgcatttttttaatctacattttcacttaggttaaaaatatgctcttcatgtatgtgaccagggaaggtgcatttatcccacatgtaatgtagtagatgaaatgctcagttctaggaatgaagcatgaaataatgttgattatgaaacctgatagactatatagaaaaagaactccaattttgtagttacgtcactttaacttatggaagaataactttccatctttgtatggtattacttttaagccctaaaataagaaactaaggggcacagtgaatttttataaaagcaatcatgttaagatgaatgtttttacattttttcagcttactcttatctttcaattcatatgtatataaaaataataatgaattttattatattaatcctttcctaaactcctccaaatttcttttagagtccaaaattattaggatgaacatgttaatagcagccaaatatttggaggcaattatttaatgtcctcttaatcataggaaaaatggttataaatgaagttcttcctattctcatcactgtcagcatacatgtatggtattacccttgtctttttccattgaaggtgatgctgctattgatctagatgtggataacagtttagtgtagctttccttgttcagtgccaggtaaaggaagagatactccttgagtgagtttggttgggaatagcagttggaggatgcaggtgcctgtgtggtaaagaaccatcctgtctagcacttgtcctaatcagatacagtagtatgtgagaattacatctttaatattattaatttacatgaaggaaacttagaatctgttttgggaagtagttgtgttgactttggtgtctctataaaatctcacttttccagattatttgggaagaatcaggggcctaaaagatgccagtactctttaccagcctttgttgcttttcatccggggactattttcagcgattaacatataagtttttagtatatattgtagtataaaactttagttatatttttaaaggaacaatattattttctttcttttcctaacttttccaggtatacattttgagaaaggaaatgagaaaaaaaattctcaaaccataatgaacatcttagctatataaaggatgtaacagccaccccatcagcctttgaagtgagaatcaatcagcagcagacatttcaggaagccaaatatatttggtcctttttagggaaaacaaaggattcatttaaaggagcatttatcaatattgccctggctggagtgaggggacggagggttggggaaggcgagtctactcaagctctttttatgcttcacttttgacctgaggatagacattctaaactgcaattcctccactgtatttcccactctatggaacataaaagaaccctacaacagacatatctgttactgcttttaccataagctgcctgtgtgactttggtcaagtcactggtatcctgcagtgtaaaatgagggtgatggttgtataatctagaaaccattacatttctgatgtctgtagctttgtataaagcaaatgagagaaaaatatctgaagaaattgtgtgcccttttgctaatgatggcactgtaagtttatctaaatccttcaaatgggatgatactggttgtcacctagccaaacttcctgaaaaaccattttatgtgcagcctcactaagaattagtagatgtgatctcaaagtatgggctggataatccagggtatacccagacctattttttttcttaaaaagaaagaaagtcatgccattaaaatcatggaccccttttttagggccttctctgttcatctcctaagaaggaagagctagaaaaggggagaagtgttggagaaatataaccaattctgaatgttatcaacattgcttttctatgtgaaagaaattgatctgaaaatgaccttttgagtttgtcagactctgctttacttccatttttttgtccaccaatggtaaactattaattttctatctaccacctgccattcagtagaagacatttgctatagtcctgtgttttccgttaatctagttaatgtagcaaatgaaaacgttccttatttgtagtgtcgtcttcttatgtatgtcaagtaaatagggaacacaggatcttgttttatttcctggcctgctatactagagggagaaaaataggacagctgattatttttttcttaatataatggtatttttatgttgccagggagttgagattacagaacctaccttggcatgtaaacggagagatattataaggataaagctattatgattgaggaagcttactctgtggtttgggcaggtggatgcttttcattaatgtcagcaaagcacaagtatatctgactggtctacagacctgcacagaagatcacggggtgagaagggcaaactaaggtgtgacagcaaatagagattacagagacagcatctgtgtggaaagagcagctgtcagttataaaggctcctgtaacaaatgaaagattgcatgccagatctttagaaatatagatgaaccataataagattgtaggccactacagcatagtttgaagagaaaattacaaatgctaataaagtgggatatgttgaagcagtgataaaggagtcctatagttatctgtggataaggttttgtttgaagcctacatttgactatagtctatgcaaccaagccaggtatagctgaatctacataaagagagataaaatgcttttaagccagggggccccagatgcaggctggctagtagtttactattataacaccactttgggttttgctcttctattaattagtagaaaataactgttattttccatgggtgttttaaaatttttcttttggagaattttaattccttcttgatgttgtatgaacttatgaactgagtgggattcttgactagagattttgacaatggtctttcttaggattcatgacttgttgtggggtggcatatttgttaaaagatggttgtaaagtagagccccaaacaaacaaaaaagaaaaagaagatcgggttttgcatattttactttcaactcaaagaatataaatacaagaagtagttagcaaaaacaatgactttatcatttgtttaaactaagtttctttaaagttgccttctatcagttcttattcaggcttatttttgcagccctcatgtggccaagtgtattctcacaagatgaaaatgtattcatatgttaaatcatggaaattttaaggttatggaattatcaggattattctttcactaaattttattttctaagtaagatgaaagttgatgtgataaacttttaaaatacatattctagtttgctccattataaaactcattaaaaataatgagtattatttctcaagagatatatgtcaatctaagttataacttttgggtatcttgaatcttaaaaactagttgcttcataagtagatggatttgacatttaattgatgactgacggatctcaaagcttaatggagacatcaattcagaaacaatgtatctttttaaccagaggaagagctattcctttctaaatggaagttttcccattttactagagaacgtgaaaagataagtttgttttagaagaaagacatactttaaaagcttttaatctgtttattcaactcttcaattaccttaacaaattactatttagcttttttaacaaaaatatttttagcacctttatatcttgaatatgtattttcactttaaatattctgctagccccttcaggcaccaccttctagaatggaaatgtactgccagaaaaacactgagagaaaaacactgaaattgaaaaacactttcaatttatttgaaagataactttcaaagaaattttcataactcaaatgtgtttcttttttccagagaagtatatcagagaattccctggtagcaatggacttctcaggccagaaaagcagagttatagaaaatcccactgaagccctttcagttgcggttgaagaaggactcgcttggagggtacaagtagcttcacatgcttcaaaatatttatgatttcagtttgtttcacctaaaaacttgagatttgttttctccttccttgctcagaaaaaaggatgtttacgcctgggcactcacggtagccccactgcctcttcacagagctctgccacaaacatgggtatgtctgttcatagtcattgccactgagtagacggatagacatggaaaggacatgtaatgaaattgcagtcatctcaaacaaagctttgcattcatccatcctatttctttagctatccaccggtcccagccatggtttcaccacaaaatttctagagatgaggctcagcgattgattattcagcaaggacttgtggatgggtaagtttggtatttttaattttgagtacttgtgaattggatttctcctataagcagaaattatttattccatagccacaaagagttcttgatttgggcttatcataaaacagaagtgacattgttctataaatgaggtcatcactgtattctaacagtatctatattatacctggtacatagtgtgtgtctggtatttgtatataaatggacaaataacggaatagagtatcttgttcttaaccagtgatcactaatattacccattatgtcctgattctagcatctcagatatcaattgatgggggaaaatgaacttctttttaagtgtcaatattttgatttgaacatatgatttcgaagtatggtttatattatgacattatgtcaaatgtatttttttaggtatgatgcaacatgtattaagtaaaaagctgtttcttaagtgttttgaacacttatttttttgtgtgtttacatccctattgtcctttctctaaattttaacatcttaaagtaatatagatccgtgaaaagagtacctttcaactgtttctcatgttgtcttttagtggggtaccatggaatacaaaagagaaatataaaatgtattatgaaagatttataatgtgaagaattttatttttctcaaattactcagtgtttcagatactttctataatactggctgaattccctttccaaatgcagtacaaatgagggaggttgtattgtggtttagatgagtaatgaaatcattatcaatttaaacaagtggtgatgggatcttttatcttcaaaagttggctaatcatgtcattatcatgacaagatttcaaggtgatttaatactgaaatttggataacaatgcttcttcacatggaagattattaataggaagtcagcatttccccagactgtaaataagatattttaatacgtttctttgcatggaatgcagtctttttggaaataaatttgaacaatcagtagaattacaatctgatgaaaccaagaaaataaatgagtcacaaagaattattaaaatgttttgaaagattgtaattttctttatttctgagcccagtatttataaagtgaatgaaatgatcgtataaaaaaagatactatcttatttttagtatttttggtattcttttggagagatgtgatggtgccaagtgatccactaggtggtagtggtgatctacttgggaatgggaaaagaattacagcttgatttaccagtgaaacgcccttttgtcccatttcccagtgatgtaatgtcggaatctcacacagcacaaatgaaatggataaactcgtcagacatctgtgatgctttaaatttggctgcctctttgcccaggcacagtgagattcatattggattcaccagtggggatcatttacacggtgtatttaccagcagttaatacaaaactggttttgcattgcactgccagtgaataagaatccacttctggcagcatttttctcttaggctgttagaggccatgtcttgtttttctagcctgacattatagaggcttttctgctgcattcttcaaggttaaagtatgtgttttttggatgattttttttacttaaagcattttgcttaaatatttaataaataatttcaagatttttttaaaacaatatattgatttctttcttgctattgtgtatgaacagttgaaaccagaatcaaaagaaagggtatccagtatagaagagggggttataataaaataaaatttcaggccaggcgtggtggctcatgcctgtaatctcagcactatgggaggccgaggcaggcggatcacttgaggtctggagttcgaaaccagcccagccaatatggtgaaaccctgtctctgctaaaaatgcaaaaattagctgggcttggtggcatgtgcctgtagtcccaattacctgggaggctgaggtgggagaattgcttgaaccctggaggcggagattgcagtgagccgagagcactccagcctgggtgacagagcgagaccctgtttcaaaagaaaaaaaaaaattcattctaaattcttaccttctttcaaaacttaacatgacccagaaggtaaaataacagtatgaaaatgccttaatctttaggcaaaacagttacatgtgaatacccagtttcccagtgcaaagagaacgtagcaccaattgttgatgcagacataacagtgtattgtttattgtgatcaaacaaacaatctgactaatgggttgtgtatttagcctattaaaattacagtagcagtgatgacagctttatagtgcagattatattataccatattgattgccaagttggataatcccacccattgaatacatagtaaaggagtccccagctacatttatgcatacacttcttggatttattaatgctatagttctatgaaatccatgagtaaatatagaaacattgaaattccttctctctctttagagttttcttggtacgggatagtcagagtaaccccaaaactttcgtactgtcaatgagtcatggacaaaaaataaagcactttcaaattataccagtaagtaattcgtgatttcacatttgtgtattagaaatgaccttaatgcataagcttttgatcttaatgcataagcttttggaaactttggttttcttttggtctttttattaaatataatttggcagcttgtgctttgactagagttaactttggcagaaatgattttatgagcctgaattaatataagaaatacaggaattgtaaaaattaaattttcctttttctatgaaatatgatttagcaatattgtatagaccccatgccacctattgttaaaagggcactaaagcttctttctcctgaattccactaacggctctttagaaaacattactttaaagccttttctcctctcttctctcaaaaatgttttttttgttttgttttgtttttaatggctatggctagaaacagagattctatggaactggtgaagacttctgaacacatttttaaaagttctgtgattcggcttctctgtgacacacaacttgctttgggatttctgttgcctcttctgctgtgtgtctgtgtgggtgtgcatgtatgtatgtgatgtgtatagtatattggaactgaatggtggggagtgaagattcagtctttttggaaaggtattccatagtattgctaaattactagtgcgtccttttgaattgcctctttttggagttatccaaaggctatataaaatatcctccctacttcttttattttgtgatcaatgtccccagcaaatacgaattgtttagtaccagaagacttcactgatttaaaaaaaagaaaactgacagaatgacattccattagcataatatgtgattacttcagaataaatctcataaaattatgtaaatattcatttttgtggctaagtagacaacatttagaaaaggaaattaatttctcaagtgggagcattaaaatcttcatttacttttactctgaatattgtagatttctttcattgattcaaaatattcatactgtctttactaacagaatgctgggagaattagaactagatgaagtagagtagcagtgcttctcagggatcagctgatatttcttttaaatgcaagtgatgttaaaaaaaacaagtagatatgccgtaacattcttttcactgtcttttagttttataaacttggcagttttggcatgtggagatagtttgcaatcgaatatgattgtccttctgtgtaatttatcctctttacttatttgttgcttttctttttgcaggtagaagatgacggtgaaatgttccacacactggatgatggccacacaagatttacagatctaatacagctggtggagttctatcaactcaataagggcgttcttccttgcaagttgaaacattattgtgctaggattgctctctagacaagccagaagtgacttattaaactattgaaggaaaaggactcaagaaaaataataaaagaccataaataagggcgaaaacattaccatgtgaaaagaatgtatttcacctgcaagttacaaaaaaatagtttgtgcattgcaaataagcaaagacttggattgactttacattcatcatttaaaattcattagttaaaattaaaccttaggaaaaaaatgacttggtgtgttcttgtgtgatttttacattgctataatattttcttcaaatatgcatatttaaaacatgtctcccttatttaccatatagcaacatcagaattctgaaacacaaaatatgaaataaattgggagtcaggaataattatttgtgcactaaatttcaattatactattttttaatgttaagaaatatgataataacttatcaattaaaagaaactatccacaacctgttaatgaaactaaaaactattttgaattatatattttccgggtttatgatcatcttaaaatgaaatcatattttgagatagtagctttaaaccattttgaaatatgttgattttttccaggtaatttaaaaatattattaaatagttaattataaaattta

SEQ ID NO: 1195 - DNA, 15974 bp, Homo sapiens
gctggcggcggccgcgggcggcgggcggcggaggtgcggggcctgctcccgccggcaccatggccaagaccgtggcctatttctacgaccccgacgtgggcaacttccactacggtgaggaaacagggatatgcatgaggggttgggacacggaggttttgaggcggggttgcaactccaggggtgagagctgacgaactctcttctccccacccccaggagctggacaccctatgaagccccatcgcctggcattgacccatagcctggtcctgcattacggtctctataagaagatgatcgtgagttccgccgcctcggccgggggttggggggtggggcgagctgtggccgtagggataggtgggctggactgagtgcatgaagtgcgacccgcccctagagtatcggggagctggatagaagtcaccaggagtaccttgaaagtgcagggtgttgggggtggcgtcctctgcttaatggaaagtactttctcacctcaggtcggccaccctctgactgtaggcacactagcccttggcctagggttagcgtgatgtggggctggtttgaagacagaaggtgtgttcctcctctgcattttagagtgtggatagggccttggcctcaggaattagggttaggggagcggatatcactgtatcagggtgtgaggtttaccctcagttcccactcctcttttaccacctttctttacctccaaggagctagggctccagggtggaacgatgctgccgtctttgtaaatgtgtatgtgcgtgtggaacagaggcgatattttagatattcctttttcagcctggaatacctctacatggttctgcttaatcgctatccagtttttcatctaccagacatacacatgctgtcttcccagcttggaatttatggctgtgatatgggatagtaacagttaagccacgccaggcgtggtggcccatgcctgtaatcccagcactttgggaggttgaaatgggggggatcgcttgaggccaggagttggagaccagcttgggccacagtgggacccacatctacaaaaaataaaaataaaaaaagtagccatgtgcggtgggtgtgcctgtagtcccaactacttgggaggccgaggcgagaggatggcttgggcccaggagtttaaagttacagtgatctatgatcagcagcctgagttgacagggaggaccttgtctcaaaagaaaaaataagacaaaacagctaaacccaggctttatgtgttgctagggaaactagtgaacaatatgaatgaatgttcattgcttgtgccaaggcacagacaaatggactggtcatagaaaagactgaggtgatgttagtgcaggaatctatatcccttgagattgtttgcctgtatgtacctgtgtgcattttctgggagaagaaaagctctttcttgtgcagttttcaaagaggtgtgacacatccccctgaccttccaaagataataaatctttgattttaattagaaagttgacatatatcccatatatttgactccagaaagaagaatccagaggaaagaggacagaatcagagcttgggggaggagatgagcatggagagaactgggaataggagattccaaggaacagggcaggtggatcagggctcaaagttgagaaggtacgataggctgagctggaggtggaaaggaaaagaagtggtcttcagggggctcatttgtaataacttacctggttaatcggagtctctctactgacttaaggattgtgggatgaggggaatgctatgtttggcttcatatagtctccaggactgggttcagtatgggtggtctgagcctgtggagtggggctgaccctgcctgggttcatcttgtgtctccatcccgaggtcttcaagccataccaggcctcccaacatgacatgtgccgcttccactccgaggactacattgacttcctgcagagagtcagccccaccaatatgcaaggcttcaccaagagtcttaatgccttcaacgtaggcgatgactggtgagggaggactgggagttttgatgtctaacagtttaatgccaagcccttcagtgaggtcttttggcagcagtgggaagatctcaaggggggcctacttgtcaatgcatcataattcattttatttgtttattcaataaatatttattggtcacttgttctaggcaggccctgtgctaagtgctgggaatgcagtgatgaacaaaaacaaaattttaatatcgtatttttgctaagtcttataaagaggaggtgtatgacagattatgagagtgtatacgtggaggattgtttagcttggtggagtggctggtcggtggggccttcctagaggaagtaaagattgagctgagatctgaaaaaagagtagaagtaatcagatgaaagatggttggagggtgaggggagaagtatagcaggcagtagggacaagtgctaagggtctgtggtaggactgagtatgactcatttgaggaacagaaaaaaggccaagtgcagagtatgaagaggaggtgaactgaattgaggctaaagaaataggaccttttaaaagcaaacagctctattatgaattggggtttttacccgtagagtagagggaagctatcaaagtgttttaaaaagcaagggatcttaagagggctatgggcagttaaaaaaacaaaaaaaacaacgaaggagtggtttgatatcattaggtttacattgagcttgtatcatccatagaagagtcagggttagaccctctggggaagagagtggacaacaaagataagccacactctactctatatccatgaaaaaatagtaaccatcacagctaccagttgctcaattctacttacttttgtttttaaactttttattagggaaaatttcaaaaatttctgaaagtgaagtagtgcagtgacctcccatacgtccatcacctagcttcaacgcttatgagcaaatggccactctttttttttttttttttttttttgagacagagtctcactctgtagcccaggctggagtgcagtggtgcagtcttggctcactgcaacctctgcctcctgggttcaagcgattctcatgcctcagactcccgagtagctgggattacaggcgcctgccaccatgcctggctaatttttgtatgtttagtagagatggggtttcactatgttggtcaggctggttttgaactcctgacctcaggtgatccaccagcctcagcctccaaaagtgctgggattacagacgtgagccatcgcacccagctgagcaagtggccactcttacttcatctatactccctcatgttagattgttttaaagcagatcctagatgttatatccttttatccataaatattttattatgtatctctaaatgatactcttttaaaaaaacatagtatcattatcaaacctaaaaagttaacagtgattccttaatgtcatcaaatatgggatcaatattcaaatttctgcagttgtctcataattattttgtagctaatttaaatccagatctaaacaaggtctatacagtgcatttggttgatatgtctcttaagacttttaatttgtagcttttctgtcacccccttgaatttatttcttgaagaaaccaggttgttgatcctgtagaatttcttatgatagctaccatttactgagtgcttactctgctaggtattatgccaagggttgctggtaaatccacttaattctcataccaatccttagatgtattataatagacctttttctgatgttatatataagtaaattgaggtttgggaatatctaggtaacttagccgtagtcacataactggtcattggagggggcatgatccagatcccgggtttttaaaccactaatctgttttcctgaaagatcttaatgacagaagcagccagggctgtaggatagaggccaactcattaggctggcattggcacctttccaactttatccctacacctcagctgcacaggatgccttcctggaatgcccttagttctctattcaacctcttcaaggccttctcagccttcacaccatctccatgaaacctttcttgaccacaccagcccatagagctctgtcttgcacacactgcactgctcatttggtgttcagtcacatgctgtttggggaggtttcttgtttttttgttagtattcctgctgttatttctgagctcactttctagctctgtgaatacagggtcagcccttacgccacactggggtcccgtagatgctctttgtgcgattagggaatgctaattagaatactatctctgggctatttatgctgcatcagtcttcctgtcaaacaagttacagttgtgcttatctgtatttccgatgagaatcaggaatttttcttctgtttaatgaatttctgattggtttcaaagtattctaacataagtagccaaattgtactataggcctttaaatgaaaaaaataaaaaagtagtcccaagccgggcgcagtggctcacgcctgtaatcccagcactttcggaggccgaggcgggtggaccacctaaggtcaggagttcaagaccagcctggccaacatggtgaaaccccatctctactaaaaatacaaaaattagtcatgtgtggtggcacgtgcctgtagtcccagctactccaggaggctgaggcaggagaattgcttgaacccgggagttggaggttgcagtgacctgagattgcaccactgcactccagcctgggcaacagagtgagactctgtcttaaaaaaaaaaaaaaaaaaaaattccagacctctccttttcacccataaatccctctgcccagtgacagccactttcagctcctttcccctatgtcttctggtatttacctttggatttctaaataataatattaattgactgttattactaatctgtaatccttaggtaatacctgttatatactaggtactgttctaagtgctttacagccattagcttatttaatctcaacaacccctatgaagcagggtctattattgtttccttttaccgatgaggacacttaagcacagaaaggttaaacagtttgtacaacctcactatcattagtaggtgttaaagaacctaggtagtctagctccagaatcggtgcttgtaatcatactcccctcctgtattgtctctcattgctatttcttcgtctgtcaattttaggcattatctgttaagcttttagtatgggatatgagcatttagtcttcttacaccatcacattggcttcctttcccctttcagcttcatagtaatttaaaaataaatcagtattctgtgtttacattattataactctgaaagattcatttactatcaagccaaatagtgtagtgtgatttaatctattttcttctaaagctttttgtttttcctggagctgacaattgcattattttttcatttgcttagttttctggtattaatcactaattctttccaagccttttgagaaactataaaaccctacaattcttgcttgaacccgggaggcggaggctgcagtgagccgagatcgcaccattgcaccccagcctgggcgacagagcaagaccccatctcaaaaaacaaacaaacaaaaaacccctacagttctgtttttcacatggtcaaatgtatcagctgcactattttttttttttgagacctaaaactagggattgcctaagcctttcctttttaaaaagtcaggtttatataggtataacttgcatacagtaaaattaaccttttttaggtgtaagagttctgagaggtttgatagaatatatcaaggtatagggccagcgccgatggctcacacctgtagtcccaacaatttgggaggccaaggcgggaggatcacttaggcccaggagtttgagaccagcttgggcaacatagtgagaccctgtctctacaaaaaaaaaaaaaaaaaaggtatcaaggtacaggaaatttccactacccaacaaaggtcactcacccttttgtagttaataacttctctgcaacctagatccagccaactactgataagatgtctgtccttgtattttaccttttccagaatgttacataaatggagtcatacagtaagtaggcttttgtgtctggcttcaagcctttactttttataaagaataacaatggtaataattatagctgacatttattaaaggctgagcggatactgtatactgtgctacaggcttttcgtgggttatctcatcactgtttcacatatgtaggtatacagttctttctttaaaatatgtgactgaaaaatattattgaacattatgctaaaatttgttacactgagaagactaagaaaaacagagctcatgttttctttcaactgatttcctttttacattgtacttgagtacctggaagctgcttgcttctttccgcagctaggatacaaactccctgacagttaagtgcttctttacttcccatccagtgccttgcacagggcttggtacatggtttggtccaaaatatttgttgaataaatttgcagatagcccacgtgtgtaggagagggagagaaggttcttgaaaaatggagattggaggaatctaggatggggagggagatatgggaagggcccagacagaggcaggagggttccaacttgttcctcttccctgcagcccagtgtttcccgggctctttgagttctgctcgcgttacacaggcgcatctctgcaaggagcaacccagctgaacaacaaggtgacatagtcccgagtcctgttcttcctttcctctggatccctggactcgggatttaaccctgatcctgggctcccagcttgaggggtgggcaggaaggactgtgacttaggtgtttgtctttcagatctgtgatattgccattaactgggctggtggtctgcaccatgccaagaagtttgaggtgagtgaggaggtgatgggaaagacagtggccatcctagggtaggtgtttaggatgatggtggggggcagctgggaggggaattgctcttctctttatgagaccactgtcttgccataggcctctggcttctgctatgtcaacgacattgtgattggcatcctggagctgctcaagtaagtagcccaggaggagatgggggcagttacgggattcttggctgaggaggtctctcagtctcaaccctgaccttgacctccctcctccctgattagcttctcccaagttcttgatgctttattcaggctgcctcttccactgctgcagattccctactgcctgctcacatttcagccttctctgcatatccctctcctgtccctgcctctagcctctaggctggagcccccagttgcctttagggaactggtgacattaagtttcaggtgaccagggcagaagcagactcttcacaattcgagacccggtgtttgagaggagtgggttggggggttcacttctagctcagaccctggctttggcttccctctaggtaccaccctcgggtgctctacattgacattgacatccaccatggtgacggggttcaagaagctttctacctcactgaccgggtcatgacggtgtccttccacaaatacggaaattacttcttccctggcacaggtatgggaatagggattactttcccctttgcacccttcagctctttactatgagtgcctccttctcagccttctagtctcatctcaggtgtcccctcctcagagaagcctttccttaccactccagttatcataatcacctccttccccattcctctgttacatcagcctcattgtttccctcagaacactcactgctatttgtgtttattgtggttttttgttttgttttgtttactgcctccctcctcctcatggctattccctaagaatataagcgtggtgggatatcgtaaatttcattagttccattcgttgctgcatccctactgcctagtacacagttggctcagagtggatcccccaaaactatttgcccaatgaatgcaagctgcaagagatttagtggctctagggagtttatggtgaagctacatagatggaatgagaggctcccagagtgcagattggggctgaaacagctgggttgtgggtgcttcccatgtgtggctaccaccacccacttccctacaggtgacatgtatgaagtcggggcagagagtggccgctactactgtctgaacgtgcccctgcgggatggcattgatgaccagagtaagtaccgaagtcttccctctgttccctaggccccttctttttctccttgaaataacctcttctgcctggtattgtctgctgttgggccagttgtccttaaggatgaatggccttcagagggaccatgaatctctggaaattgtatgcaacatatcatgtgtatgtgcatttttctgggaaaagtcattggctttcatcagtcactcatagcagtctgggatcccttccagaagtttcagaccagtgatttgattcttttgggtggcccctttcctgggctacatgctcgctcaaccccctttttccttttgttccctgtctccccatccccttggggtgccaggtgcccatctttggccctctcccaggttacaagcaccttttccagccggttatcaaccaggtagtggacttctaccaacccacgtgcattgtgctccaggtaatactgtcagttcctcctcaggagtgttctgcctgggcttggggaaagagagcaagggaagaggaggttctttaggttggtggtggaaggggtatctgtgatgttctgatcagttctgatcactgcactttcctggggttttgctttttgcagtgtggagctgactctctgggctgtgatcgattgggctgctttaacctcagcatccgagggcatgggtgagacttgctctccttcttctccccaaggtttttaagtggccttggacttcagtacgtgggtgggggtagttggggaatgggcctcacctcttcttggaaatcaaaaatagctacaaattgtacttgaactagaaatgtcatcttgaacagggttccctagatggtcattcattcacgatatatttttattaagcacctgttatgttccaggcatcataccacatcatggggatggaataaggagtctcccatggagtttacagtttaggaaacagacaaaaaataaataatcaaatgaaataaatagattcttataaattctgtgaaagaaaaaaagaaagctgagacacaggatacaatgggggacctacttgagatagcatggtttcggaaagtttttctgaggaagtaaaatttgagttgagacctggagactaagaaggagtgagtcataagaggagcagagagaagcctgacccaagcatggacaaaggcccacaaaaggctctgagggctgggcccagtggcacacacctataatcccaacacttccagaggccaaggtgggagaatcgcctgaggctaggagtttgaggccagcctgggcaacatagtgagagccatctctacagaaaataaaaaacaaaatcagctgggcatgatggtgcatgcctatagtcctagctactcaggaagctgaggcaggaggatcacttgagcctaggagtttgaggttacagtgaactatgattgtgccactggacttcagtctgttgaggtgaggtccgagaagctggccatggtgagattgtgcagagcctttaaaccctggtaaggagtttgaattatattccaaagatgatgggaaaccattgaaggattttaagcaggaaagtgacatgatccaatttgtgtttgaaagtgacaattctgactgctgaatagagaaaggtttgggtaggggggatggagatggaagtagaaagaccagttaggaagccatggtgttggttaggtgcccagactaaggtggagggggtggcaatggagagaagtagatgatctgagaggtgtgtgtgtgtgtgtgtgtatatatatatatatacacacacacacacacatatatatgtttttttttttcttttttgagatggagtcttgctctgtcacccaggctggagtgcagtggcacgatcttggctcagtgcaagctctgcctcctgggttcaagcatttctcctgcctcagcctcctgagtagctgggactactacaaaggcgtgagcaccgcgccgggcgtgagttatattttcaaggctagaattgacagaacttgggttgatgagaatagttgattagcaggcagggtgccagggagggtgttgagcagaacagaggggggactgtgctttattttaaaatttttattgagacacagcatataaagtatacccaaatcttaagggtataacataatgaatttcactatcaagataaagatttagaacatttatagttttcttgtgctcctttcaggcaatacctaaaggtatttaccttgtcttttgataacctcctccacatcttcctctggttccttttaacagggaatgcgttgaatatgtcaagagcttcaatatccctctactcgtgctgggtggtggtggttatactgtccgaaatgttgcccgctgctggtgagcactctcctgatttcctcccctgttgtccagtgtgagctagggtgtccctcagatatggccacatgggtccttcagcccacttggtcagcctgctcccctctgctggttggtttcaggacatatgagacatcgctgctggtagaagaggccattagtgaggagcttccctatagtggtaaggaccaccccacaacacccccataacaggaaggccattctcaccagattccagaatgacctggtttgaaggcacatgggaaattttacactctcagagctctgcagactaaacccctgggctcagagcagggaagagattgggcagctattatgtaggtgctctggatgggaaggaaaaagattgggaagtcttgttagctgcctttctcagtctgagccatactttctcctctcctccccaagaatacttcgagtactttgccccagacttcacacttcatccagatgtcagcacccgcatcgagaatcagaactcacgccaggtcagcagctcagaaaagctgagcacaaacttctcctgaaaggtggagcccaggagaggtcaaagatgtgggaagtaggaaaaaccaaagagaaggaagttctaagccatcacagtcactgttattgactaggaggcagtccagtttaaagtagaggcagttggggttggtggggagggagagctatcagttgggggacctgaactagaggtaccactgagatgaaaaccagtatggtaggggtaaaaggcagctaggagattccatgtcctgggaatctctggaaactgctcactctgtattcctcatttccaaccagtatctggaccagatccgccagacaatctttgaaaacctgaagatgctgaaccatgcacctagtgtccagattcatgacgtgcctgcagacctcctgacctatgacaggactgatgaggctgatgcagaggagaggggtcctgaggagaactatagcaggtctgggagcagggacttcagcctactttcaataggcttgctggggaggtttaaaagggaaaaagtaaatgggaaggtattagtttaattgcctctggcttacctcctttagtctgctacaatttcctcactcttttctttgttatttttaatgacaaaagtaacacgtatttattgcaaaattttaaaacagcaccaaaatatggtgttggcgttcacacaatcccagacctattccacaggagtaaccactgttaatagtttttattgttttggatagacctttttctatagattgcaaatatactattctgtatgtacatataaacaaacacatatacactcatttacagtttgtgtggtttttggtttttcgtaaatacaaatagggtcattctacgtatgctgctttacatcatatagctgttttcagctagctaatatagatctgcttcagtattttatcagctgtataataatttactatgtggatagattattttccatttttttggtattacaataataatgtggcaatgaacccccttacattatacatctttgcattcttgtttgagtgggttagatagtagaatggttgctgctaggtcaaaggctgtgtgcattaattttttttttttttttttttttgagacagggtctcattctgtcacccaggctggagtacagtggcatgattatagctcactgcaatcttgaactcctgggttcaagcgatcctcctgcctcagcccctcgagtagctggaatcataggtgtgcaccacgacacctggctaatttttttttttttttttttttttttttttttttttggtagagacggagtcttgccttgttgcccaggctggtctcaaactcctgggctcaaatgtcctcctgccccagccttccaaagtgctgggattataggcgtgagccactgagcctggcctaaaattttttatatttgctgccaaattgccgtccagaaagtctgtagcaccctatagtcttgccagcatttttctcagtctttccaggtcttgagctggacaggtcactgcctgcgtaatactctctaaggctctttgatttctttgctctgttaattttttcgggtgggataattgcattgtggttatgttttttttttttttttaaaagtctttatctttctgagatacatacaaaatatttgtagatggaatgaattaggggggaaaaaggataggatggaatttttttttaatcccaaaactttgctgaaaaatgaaagggaaagacaacagaaccaagaagtgcagaaacagatgcacttaatggggaacagatttccttacatgactgagggataaccacagctggacacttgtgggacacgctgtcttgctcccacgcagggttagaggtttgagccggctctgctgcagagcctgatgggcttctcagccccttctagaatctgcttctgtcttagaattcaggcctccgaatctctcctctggacctgggctttactgctctgactcttggggatctctgcaactctcttcctccaaggatatcccccgatcccttctgagtgaggaagtgtctgaacatctggaagtgtctggcttcagggcttccaggactattggaaattgcttttcattgtctggtttggtttggtaaaacctgtttttaagttcttccttttgggttttttatcaatagctccaggctggcatctggacctagtctctgcattataataataccaagccctgtcacagccagcagaagcctcaggcctcttcctgttcctaagccctacctctctgtcaggccacccactgagtttctgttcttctttgatgcctatagctccagcttgcatatgacttgcagagtagaaataggaagagttaccactttttgtaggtttgccaagcaccagacactactaagtgctatctattacaacatatatatgatcattctgttgccatcagacaactctgatggctcttattttcagattaacacgggaggaatctaaggctcagagagtctaagtaactttctttctttcttttttttgagacggagtttcgctctttttgcccaggctggagtgcaatggcatgatctcagctcaccacaacctctgcctcccgggttcaagcgattctcctgccttagcctcccaagtagctggattacaggcatgagcctccacgcctggctaattttttttgtatttttagaagagatggggtttctccatgttagtcaggctggtctcgaactcctgacctcaggtgatctgcctgcctcggcctcccaaagtgctaggattacaggctacaggtgtgagccaccgcccccggcgagacttaagtaactttctgaaggtcacatggctagttaaagatcagggctgagattcaacctgattctctgactccacacctttaaccctgtgcacttagaagtaactgagacattgctcaccatgcagataaggcctttcctggcttagtgcctcagcttctctttgatgactttctcaattctctgtgtcccagagaatactttttcttttctttcttttttttttttgagatggagtctcactctgttgccaggctggagtgcagtggctaatcccggctcactgcaacctccgcctcccaggttcaagcgattctcctgcctcagcctcctcagtagctgagattacaggcatgtgccaccacacccggctaactttagtatttttagtagagacggggtttcaccatgttggccaggatggtcttgatctcttgaccttgtgatccacctgccttggcctcccaaagtgctgggattacaggtgtgagctaccacgcccggcttttgagaatactttttcaaaaagaaagaaaccaatattgagtacctgttgggccctgttttgctttcacatccattctttcactatgggtttataataccacgtcactcttcttaaaattaaaactctcctttaccttgcacttagaagaaaatccaaaattttgactgtggcttaaaaaggtcctgcatgctagcccttacctacatccaggatctcatctctaactactctcctccatgcacagtgctcccggctgtcctggcctccttgttcttactggaatacatcagtctctttccatttcatgacctctgtagttggttttcttgcagcttggaatggccttcctgaagtctttgcctgcttagctcctcctcagactttaggtcttatgtcccaatagtcctgtctgaaatttcacccttttcctctcatcaccttcagtcctatcacttcattttattaattgtactctccatcatctgaaattattatatttatttactttgttagttactagtctcatttattaggtaagctttttgaggatagacaaccttgtccagcttgttactctactgtattgctaaggtttatgacagtgtctgtatagagtagttccttaatgtttatttgatacgtgaatgggtgaatgaatagcagtctctaccaacaagaggaggagtggttctcaacggggcctgagaaatggctttggaaaagggtgctgggagaagattagaacttagagtgagatcctgacctctctccccttgctttgcaggccagaggcacccaatgagttctatgatggagaccatgacaatgacaaggaaagcgatgtggagatttaagagtggcttgggatgctgtgtcccaaggaatttcttttcacctcttggttgggctggagggaaaaggagtggctcctagagtcctgggggtcaccccagggcttttgctgactctgggaaagagtctggagaccacatttggttctcgaaccatctacctgcttttcctctctctcccaaggcctgacaatggtacctattagggatgagatacagacaaggatagctatctgggacattattggcagtgggccctggaggccagtccctagccccccttgccccttatttcttccctgcttccctcgaacccagagatttttgagggatgaacgggtagacaaggactgagattgcctctgacttcctcctcccctgggttctgacttcttcctccccttgcttccagggaagatgaagagagagagatttggaaggggctctggctccctaacacctgaatcccagatgatgggaagtatgttttcaagtgtggggaggatatgaaaatgttctgttctcacttttggctttatgtccattttaccactgtttttatccaataaactaagtcggtattttttgtaccttt

SEQ ID NO: 1196 - DNA, 48513 bp, Homo sapiens
aagtttatgcgtgcttccggtccgcgagccctgagagctaacttggggtcttttcccaaggtggatgtagaagcgggctccggcgtcccactctcccttccatatgggcttagcgtctgggtcactgagaacgacgtctgaatagggccctgggtccttgccatggatgaatgtggttcccgcatccgccggcgggtgtctctccccaaaaggaaccgtccaagcttggggtgtatttttggcgctcccaccgcggccgagctcgtgcccggagatgaggggaaagaggaggaggaaatggtggctgagaacaggaggcggaaaaccgcgggcgtactgccggttgaggtacagccccttctactctcagattccccggaatgtctcgtccttggaggtggtgatacaaacccggacctcctacgtcacatgcccactgacagaggggtgggagaccaggtacggaggacttggaacttgaaactgcaaacttttggcatccttcccagatgcaaagagttgaccagttttatcgccttcgtttacttctctcgtcttcgttaccactgttaatcggcacttaggaggtattgattgccttgttatttacatttctatataaatatgaaatgtaaaccccgagacataaaagttgtgcacgcagcagttaagtggcatgactgagacacaaatctaggcttccagataactgcagctcctactgtacaaataaaatctgctgtttattgaagacccgttatgttaagctagttatattatctagattttacgacagtaatcaggccctgaaaagttgagatagtacagttcttgctccaaatcctgttgtcttaatcactttactatattgctgcctccaggtttgtgtgtcttctgtgtagcagaccactccaagtcagtattcagtttctcagtctcaattccaaattcctaggaactccttggagtgtctagtggtacaaccatgtttctgttagaggccagtcactgtagattgtagtctgggagggaagcgctgcagttatcagaaacttcgaatgcgctgacatttcagtagacgtctaccagtcttcctgctgttttagtacagctttaagaattacaatctggccgtgtgcagtggctcatgcctataatcccagtgctttaggaggcagagatgggaggatcacttaagcccagaagttcgcgttcaaaaccagcctaggcaacagagacccagtctctacaaaaaaaaaaaaaaatttttttttcttaattagccgggtgtggtggcctgcacctgtagtcctagctacttgggaggctgaggcaggaggatcgcttgagcccaggatgtcaagactgcagtgagctgtgatcgtgcagtggctggagccactgtgctccagcctgggtgacagagccagaccctgtctcaaaaattagaatctcagtatcatcgtaacactcctgaacctgctgtttaggcaagtaatttaacctctttgggcctccatttcttcagctgtaagatatctatttacatataggtctgtgatccatatgtgaccatataattatatacttggtacagccctaggctgaagtgttttttgggggttttgtttgtttgtttgttttggtttttttgagacagagtcccactctgttgcccaggttggagtgcaatggcgcgatctgggcttaccgcaacctgcgcttcccaggttcaagcaattctcctgcctgagcctccgagtagctgggattacaggagcatgccactatgcccggctaatttttgtattttctgtagacacggggtttgaccatgttggccaggctggtgaagcttttattcttaatgaaactggaattgaccataagcgtttttgttctctttgcagcctaatgacagtgaagtggacatgtttggtgactatgatagctttactgaaaactcctttatagctcaagttgacgacctggaacaaaaatatatgcaactccctgaacataagaaacatgctacagactttgccactgaaaatctttgctcggaaagtatcaaaaacaaactcagcattactaccataggcaaccttactgaattacaaactgataagcacacagagaaccagagtggatatgaaggtgtcactattgaacctggagctgatcttttgtatgatgtaccttcctcacaggctatatactttgaaaatttgcagaactcttcaaatgatttgggtgatcattctatgaaagaaagggattggaagtcatcctctcacaacactgtgaatgaggaactgccccataattgcatagagcaaccccagcaaaatgatgagtcctcttccaaagtcagaactagttcagatatgaacaggagaaaaagtattaaagatcatctaaaaaatgccatgactggaaatgcgaaggcccagacaccaatattttctagaagtaaacagctcaaagacactctcctatctgaggaaattaatgttgctaagaaaacagttgagtcatcatcaaatgaccttggtcctttttattcattacccagcaaagtgagagacctttatgcccaattcaagggaattgaaaaattatatggtaatgctttttgctggaataaaaaaatttttttcctatcattaccataatattagtgcaagtaaatagaagcaaatgctttcatggtccatactgtttctcattttgaaaacaaaagatcagtgatctctcagccccttccattcctacctgtcctgctaccactgaacctctttccttccctcacagtcacacttatcaaaccagttatcctttctgtctgtttccttacctgacataattcctctaattcctcatctataagaaagggataataagttgttagcaagtcagattctggttcaaagacatgccaaattcaatgttggtaatgattttcaataattatattggtagcttctaagtaagaactttagtaaattaccccactctaattctgggttctgtgctctcattctctcacttaagatctgatgactgagacgtctaaacacagtgttacttttaatgtttaccttacctgacttctcaataacttacctgatgctattgactacacccttcttgaaattcttgtttctggatgtccttacaaccactcctgttttttgaccccgattgtctagtagagatcctcagctttcttagttgtatttccttggctggctctgtcttctctaccaaaacctagctgttgtggtatgtctttgacactcacatgtcttgagtgaaagaagtcagttattagtaatactgttgattaaaccaaacatctttccccccacaccagcagccgcagctacctctccccacgggtgcatccctgccaccacccagatgctctgccttgtgctgcctttcccaaagctagacatctttaaagacagctgcaattaagttttaagtcagggatgtccaatcttttggcttccttgggccactttggaaaaagtattgtcttgagccacaataaaatacagtaacacgatagctgatgagccaagaaaaaaaattgcaaaaaaaaaaatctcataatgttttaagaaagtttacaaatttgtgttgggccacattcaaagccattctgggcctcatgagggccgtgggttggacaaacttgttttaagtgcaaagaagcaataatattaagaaggtatcttgtaatgtttttcaaaaatccagggtccttgcatatatttcagatatgtgtcattttagaccaagaagggacagttgctgccatactggagggtcagccccatcaaccttccacttcgtaagttttctggaactcctgttaggatcttatgaatgatatgaaaacttgggttcttgcagagaagacaatcaggttggagaagcagaactacaggaaacaaagtctaataaaagactctacaagaatccaaattgtgaggttcatgacttaagagctaatggtgtgtgttgccctggaagtagacgttaactttcttccctctgttcttccctctgtttttctgctagcaccttgctttttgtttagtctgccagaatgaatatcctgaggacaaggctctatctaactcatctttttgtttttgtttttgtttttttgtttttttttgagacggagtctcgcgtgttgcccaggctggagtgcagtggcgcatctcagctcactgcaagctccgcctcctgggttcgcgccattttcctgcatcagactccccagtagctgggactacaggcgcccgccaccacgcccggctaattttttttttgtatttttagtagagacaaggtttcaccgtgttagccaggatggtctcgatctcctgaccttgtgatccgcctgcctcagcctcccaaagtgctgggattacaggcgtgagccaccgagcccggcctaactcatctttttcttaactagcactgtgcctggtatactctggtaggttctcaactgctggggattgtcacttaaaaatgcaaccttagcactttgggcctagttcctcatctataaaaagggataatttttttttgcaagttagagtctgtgttaaggacatgccaaattagatgttggtaatgattgtcagtaattacattggtagcttctaagtaagaacttcagtaaataacaactttttaaatctttttacctctaaatctggcttaataacatgaccagattaaagcataaatgcatgtgctactttttattaagctaaagcggtggttctcaagtgtggttcctggactgcagcatcaacatcacctggaaatttgttgaagtgcatgttctcagacacttccctagacctactgcgtcagaacctctaggaatacgacctggcaatctgtgatcgtggctcactacagcgtcaacctcccaggctcaagcaatcctcccacttcagcctcccaagtcgtggggactataggcatgcgccaccatacccagctaatttttttatattttgtagagatagggtctcattttgttgcctaggctggtcctgaactcctgggcttaagcagtcctgctgtctcagcctcccaaagggttggaattacagatatgagccattgtacccggctagtttttttttttttttttgatgtgaagattgtattcataaatattagttattttgtcatgttatgcttaaaaatctgaattggataaaatgtggctatggttaagttatactttggcataaacatctaatttgataactcgggtgataccaatctgaagtatttttcaatatttattgaatattaaatttaagtatttttgaaatatttttaaagaaaatattcacagtcacttgtagtatttgggaatcacccaaaagcacaataagttaaagttacttgtaactgtcattcagatataactttcttttttttttttaatagagatgggctcatcttgaaatcctggtctcaagtgatcctcttgccttaggctcccaaagtgctgggattacagacatgatccaccactccggggcaatgatctgcttttttttttttttttttttttttttttttttaaacttaactgtatattgaacatacatagatccatctattcttcatttttaaactgcaaagaatctcattggttgattgtacaataattcattcggcctttacccccaccaccatggcactttgttacctacaaacaatgctgtgttttatatgctttggcttccgttctatagatgtagaatcccaaaagtaatactaccagatcaaaggcaatgtgcagttctattttatactaggttactttccacaaggattctagcagtttatgttctcacaaccgtacatgaaaatggctgtttttccccacattagtcagctctggattttgcatgtgtggggctttttttttttttgatagttatttgttttttattttaaaaatttattttgccaacccagtagagaacagctgagcatcttctcatgtatttattggccatttgcatttctgctgcttattggccatgtatttattggccatttgccgtctgctgtgaaatgtcttaaattttttgcccatttttctagtgataaaacactgaagcacatttttaaagacttctgatgatttttattgtcagattatcctacagagtaattaatactagttttcacacggtatcttggatctgatctattttcatgaatcccgccttgccaaattgtgggaatcctaggcgtgtcagttaataatcctagtcttttgtggtttaaagagttttaacagtttaaaatggttttggacccattcgaagttcaggtctccatgagagctagttaaagtttttattagtttgtgtaaaacctaatagatttgtttccctccttcccctgcttctctctgagatggcttttggctgaatgaggaagggaagcttatataatctccttgcagaacataagaggaagacattcgaattcacacaggtccttgtactgtccctttgttcctctgatatctcagatggcactccttgtccacgaggctgctacctgccctgctgtaatattggacccaagtctgcagctggtgaataaatgggctggttgcccaccttgctgcctaggcctgaactaggctctcactggctgtactacttgcacatttgggatttttgacatgtaacattggttataattaaatttatccttatgagaggattgctccacaggaagggatttgattttttttcttagaaaacttttgagtttcaaagtttggaaggggaaaataatgcctttttttttttaattccacagaatggcaacatacttgtttaacattgaattctgtgcaagaaagaaaaaatttaatatattccttgccaacaagtggtggaaaaaccctcgtggctgagattttaatgctgcaagaactgctttgctgtcggaaagatgttttaatgattcttccatatgtggcaattgtccaagaaaaggtgtgtgtgtgtgtatgttttaaaacaaatgttatttgctagtactttgacgttaagatctgtaaatgtgataactttgtattgttgagaagtacctctttttttttttttttgagatggagtcttgctctgtcacccaggttggagtgcagtggcaccatcttggctcactgcaacctccgcctcccaggttcaagcgattctcctgcctcagcctcctgagtagctgggattacaggcccatgccaccatacccagccaatttttgtgtttttagtagaggcggggtttcaccatattggccaggctggtctcaaactcctgatctccagtgatccacccgcctcagcctcccaaagtgctggtattacaggcatgagccactgcgcctggtgagaagtacctcttaatgatggagaattaatatttttagaatgtataaaagcagtatacactacctaaaatatcttcaaatactaattaccagttgttgaaagttttactttttctaaactggtggattaaacatcatcttaaatgttctattactatttaccctgctttttcttttttgagatgtagtctccctctgtcgcccaggctggagtgcagtggcacaatctctgctcactgcaacctccgcctcttgggttcaagtgattctcctgcctcagcttcccaagtagctaggattgcaggtgtgtgccaccatgcctggctaatttttgtatttttagtagagatgggttttcatcatgttggacaggctggtctcgaacttctgacctaaagtgatcctcccacctcggccccccaaagtgctgggattacaggtgtgagccactgtgcccggccttaccttgctttttcaagcagaaactattactaaaatgagttattctgatgcttttttttttttttttgagacagtcttgctctatcacccaggctggagtgcagtggcatgatctcagctcactgcaacccccacctcccagactcaagtaattctcatgccccacgaccccacccagcagccagaatcgcaagcacacgccaccacgcccggctaatttttttatttttggtagagatgatgtctcgccatgttggccaggctgatctcaaacgcctgtcctcaagtgatccacctgcctcagcctcctaaaatgctgagattacaggcatgagccaacacacccctgatgctttttggtatcaaaggcgccagttgaaatttattttcacatgtattttagaagttgcatttattttgcaaagatcgagacattacagcatttcttacgtatgtcttgcctgtgaccttgttcctgttgatgggtattaaacactactttagcttttttgaaccccatgagcacctaatggggggttttttacttgtgttttttggttttgtttatttatttatttttgagtcagggtcttgctctgtcgcccaggctggagtgcagtggcatgaccaaggcttactgcagcctcaattctctggactcaggcagtcctcccacctcagcttcccaagtagctgagactacaggcctgtgccaccacagccagcgaattttttattttttatagagatgaggtctcactgtgttgcccaggctggtctcaccttcctgggctcaagtgatcttcccgcctcagcctcccaaggtactgggattacaggcattggccacaatgcctggccaatttttctttattttaactaatattctagatttcaggtttgtcaagttttggtatagaactcggtttctttgttgaagaatatgctggaagcaaaggaagatttcctccaactaaaagaagggaaaagaaatcactctatattgccactattgaaaaaggacatagcttggtgaactccttgattgaaactggaagaattgacagtctgggtctggttgttgtagacgaggttggttaatacttttgtaatttgtcaatatttttattatactaaatatttattattctggttattgtgtggatctacttagtaccttagtacctctataaaaataaatttatttgaaaatatagacaatataggtgaagacattctatgcttgataatcttaaatttggttttgtgtcaagtgtttcttgaagtgtgaacacgtatgtgtgtagtatacaattttattggctgggcgtggtggctcatgcctgtaatcctagcactttgggaggccgaggcaggtgaatcacttgatgttaggagttcaagaccagcctggccaacaggtgaaaccctgtctctactaaaaatacaaaaattagccgggcgtggtggtgggcgcctgtaatcccagccactcgggaggctgaggcaggagaatcgctgtaacccaggaggtggaggttgcagtgagctaggatcacgccattgcactccagcctgggggtcaagagccaaactccgtttaaaaaaaaaatttttttagtagtacttatgaatcccagatttataaggattttgtaccaaaagctcattaacctaaataccagtgaaataatatacatgtattatagttgttatattcaaaatacttaaaagttataagcaactctttacaaacaaatttcatatgaatatatgcatgttttatatgagcactatatgaagatttacttctctgtcctttttaaaaaaaatctcgaagttgcacatgattggtgaaggaagccgtggagctacactggaaatgaccctagcaaaaatcctctacactagcagtaagtattttttcaaatgaggtcatgaattgatttataatcaagagacttataaaatacttaattctatcactagctacagtatgtaacctaaagcaagatacttaagctttttgcctttgttttaaaatttctaatgaatagaattttgaaggtaaatgaaattggtatttgaagaagtcctctattattatccgccacttactagctatgtgtgcccaggcacatccctcaacctctatgtttctttatctgtaaaacaaggataataatggtaccagcctgatgggattgttgtaaggatagtgtgagttaacacatgtattgcattcagcagtgcttagcacactgcattcagtaagggtttgctgctgctactgtggccatcatcatcatcaccataataatacatataacataaatattataataataatattgtaaagcgatacatttaaataggtcagtttaaggagctattttgcagcatcaggtagtctttaaagtttatgaaaaatttattctaaatgtcataacctactattgatatgctattgcaatatttaccttatatatggaaaaattaactataaaggtcaaatcttaaaaagtatttaaaaaatttcaacagcaataatatttaagcaggttatagcattttataattgttcattcaaaaaaatattgatcacctactgtgtgctaggcactattttaagtgctagggatacagcagtgaataaaatagtccctgctttcatcaagcctgtattttagggcatccctatttgaatattctctgaacagctaagcctaactaaggcttagtctgagccaaactcatttccttcaaagccgttcttcagcctgaattctcagccaccactctccagccagccaagccagggtcctacatattctatcagcaaccaaatcctatctggtttacctcataaatatattgttacttctgtctctcctatccctcattaccactaagtctttagttcagtacctcatcctttctacctggattgccacagaaatcaccaagttcttctgtgtacccactgcccttcatccaccaaatccatctttctttagcgcaagaagaatgatctttcccaaatgcaaatccaattagtttattttactgtttaccattctttaatagctcccctttgctttctgcataaatccctaatttcttagcacagcctttcttgatttgaccccatgcccacctcttcagctttgtagtctatccttatggaatgagaaggatactcccacttattcctctttcagtgagtttcttgaatgatcatttcaagacataggagcaatgaagaaacatttgcaaagaaggcctatttgggttttcattcaatagttaagtctatagaaagcagccattttgtattgcccaggatgtcatatggcttcataagcttcactccacctttatttaaaacaacatcaacaaaaactatagtcccaactactcgggaggttggggcaaggagaactgcttgaacccaggaggtggaggttgcagtgagccgagatcatgccactgcactccagcctgggcaacagagcaagactctgtctcaaaaaaataaataaataaataaaattaaaagttagcttgatagcaagatctcatagaggacttttcatgggccaagagttcgagacgcatttagccctctatcctactacctctacatctgtctatagccatacctgtggaacatatcatagctcttcgtaaaggggatccagatagacagttataagcagatttatactcatttattattgtttagaagccttaatatcctagttcttgccaagtttgaaactctgtaaacttctaagtagtaactttcaggatacctgaaaaatttcattcttcaaatgccagattaatactctggtaatatatttgtagttttctttttttaagaggtcaggtctcactgttgcccaagctgcagtgcagtgacacaatcatggctcactgcagccttgacttcctgggctcaagcgatcctcccacctcagcctcctaagtagctgggactacaggcgtgcactaccatgcccaggtaatttttaatttttttgtagagatgaggtcttactatgttgcccaggctagtgttgaagtcctgccctcaagcgatcttcccacctcagcctccgaaagtgttgagattacagatgtgagccaggcacccagctatttgtatttttcttacttacctctcccacccctttcccaaatcactcaggaagaattcagagcacaaaagacttgctaaaattactttatgatatattaaataacatattttccttaacactttggcttttgtttgtttgtgttttagaaacgactcaaattattggtatgagtgcaacattaaacaatgttgaagacctacaaaagtttcttcaagcagaatattataccagtcaatttagaccagtatgtacctaaggtttgcactgtattgatttgtttcgtattcatctaacttagaaatgaaagtagtaaacataggatttaaagaattctgtagagtagtgaaggggcatattttactcaccatgactatatgctaataagaggttgtgtatagagaatttaagagtttgtgtataggtcagggatcttgggttgggtcactaatgtatctatagcctggcccacaggctgtcaatgaacgttcattgaatgagttttcccaaacccccattttattttttcacttcttattctgtaaactaaatttttttatttggcaaaattttagtgagacatgttttgagttattggcacattaaaaaatatatcttaaaatttaaaatatttttaaatatttatatgttagtagttataatacttttttaataagttaaggcttcacatggatttacatataaactcctcaacagcagcattcccaaaatgcttgaagaaagtaaacaaatgtaatttgtggttatttgaaaatagcttgtaatgtatatatatttttgtgtgcactactagtgtgtatgttttgtgcctcaatagtttttcagtgtctaaataggttttcagaaaatatttttttaattgccaaattttaatttgaaatttgatgttttagctgggtgcagtggctcacacctgcaatgccaacactttaagaggccggggcatgagaattgcttgagtccaggagttcaagaccagcctgggcaacatggcgagacccctgtctctacaaaaaattaaaaaattagggcagccaggcgcggtggctcacacctgtaatcccagcactttgggaggccgaggtgggcagatcacgaggtcaagagatcgagaccatcctggccaacatggtgaaaccccgactctactaaaaaatacaaaaattagcagggcatggtgacgcacgcctgtagtcccagctactctggaggctgaggcaggagaatcgcttgaacccagtggggcgaaggttgcagcaagccgagattgcgccactgcactccagccttgcaagagagagaaaaaaaaaattagagcatattagcactcacatatagtcccagctacttgagagggtgagatgggaggatcacttaagcccagaaggttgaggatacagtaagctgtgtttgtgccgctacaccccagcctggactacagagtgagaccctgtctcaaaaaaaaaaaaaaaaaaaaaaaaattgatgtttttacatttgaaccagataggaacattttcaagagatattttttaacttaattgccacagtagacattgttattgttattataaaatgcaatgagctgtgtttacaaactgtttttgtcgacaaataaagaaaaatagtgtggtggtatttagaattaaaactgatgaataataagacagaaagttttggctggacacggtggctcatgcatgtaatcctagcactttgagaggctgtggcaagaggatcgcttgagcccaggagttcaagaccagcctcagcaacatagaggaaccccatctctataaaaattagcctggcgtggtagcgcatgcctgtcatcccagctactcaggaggctgaggtaggaggatagcatgagccctggaggttgaggctgcagtgggctgtgatcatgctactgcactccaagcctgggtgatagagtgagaccctgtctcaaaaaaaaaaaaaaaaaaaagacaaagttttagatcttgagacataaaacagatgataccttagtaaaagttaagaacaccaagactcacactttttgtgacaaatacagaagtgtgtggtttcttttttggatatgatgtttactgaattcaaacatatttcttcaaggatattgatctctattttgattttaagggaaaaagagaccaaaacagaagaagaagaaatggtaaagcaagaacttttaagttgaagcatgttttatgtatcttagaaaagctaaactcttttatagctgtcctttcttaacctattttacaatatttaaaacactggaaagatgaatttatatgtcgtattaattgcaaatgtccttttaattcaaggttgagttaaaagaatatctgaaaataaatgatacaatatatgaagttgacagcaaagctgagaatggcatgactttttcacgtcttcttaattataaggtaacattgataacatttaaattccaggttaccagactttgtgtctggggcacaacaagagtttccaatggattccgtagaatagtctagatttttcagagaaacagctgatgcttgacatttgttggacaccatgcagactgccagttcaagatagctcgtttccagtttcaacattagatcacaccatattcttttctatgacatcatatctttgtgaagttggggtttttacagttgctgtaagcaagtaccgtgtgaaaatcaatctggaacagaagagaatagctgtgtccagtcttatttcagattttgaaagacagtaccaagttgtgcacacatcccattagtgagctgttgtggttatttaagaatgaaataaaaatattttttcactcaactgatgtgtattatttattctaacagctactaaattgtgaggaagtacgtatttattaagttgtttggacctcactatttaattaacaaaactgtaaagtatttctttgggccctggggctgtgaacaaagaaaatttggaaaactctcctgtaaatgtttattcatacaacaacaacaacaaaagaataatttatggaccatgtagttcagatattggtgtataaaatgttaatgtctactatgtaaattttagtgttttatgacttgtatgaaggatattaaaaaggggaagaagggattatacagtagttttagaattctgtgaagatgtgttattctacagctatgtctttagtaaagttgaagaaatagattttaaataacttcacattttttcttcatgttctttgtgttcctcatgtgactacaaaaattgtcataattcagtagtatgattgaatctgtgtttttgaaaacttaatggttgtaaagggcatgtcttatttacacagtccgttaactattattaggatcaatctgtgtttctctctgtggacttttttgttctgctgtggtggagatgggcatgtagtgaggctattaataacattaactattttcacttctttaattttctttaattcacttgtttaattctaggtttttttttagactaactagacctaagaaaatcataataacctaaaagaaaagtgagattgaacattttgatgtttaatatagatttcatcttttcttttaaatgatcagatttattaaattagaagtttagaattatagatggtttatttacctttcaaatcacactggtaaaaaattgacagggtttcatgtttactaaccactttgttcctacatcttgttgttttgcagtattctgataccctaaaaaagatggatcctgatcacttggtagcattggtgacagaagttattcccaattattcctgcttagttttttgtcctagtaagaagaactgtgaaaatgtagcagaaatgatatgcaaatttttaagcaagtatgttaatattttttaaatagcctgttttatttttattaggaattacagactatgtattaattttattgggcaaacactaattatgccttgcaaaacatcatattaagttgttttagtatactgaaggccttgaccttgaagaaagaaattttaactgtgaaaaatcacatgtgaaatagccagagaaacattctaaggtggctgggcaccatggctcatgcctgtaatcccagcactttgggaggccgaggtgggtggatcacttgaggtcaggagtttgagacgagcctggccaacacggtgaaaccccatctctactaaaaatacaaaaaattagctgggtgtggtgccttgcacctataatcccagctactggggaggctgagacatgagaatctgttggacccgggaggcggaggttgcagttagctgagatcgcactactgcactccagcctgcgtgacacagcgagactccatcaaaaaaaaaaaagaagaccaggcacggtggctcatgcctgtaatcccagcactttgggaagccaaggtgtgcggatcatgaggtcaggagttcaagaccagcctggccaacatagtgaaatcctgtctctactgaaaataccaaattagctgggtgtggtggcgtgcacctgtagtcctagctactcgggaggctaaggcgggagaatcacttgaacctgggaggcagaggttgcagtgagctgagaccacaccattgcactccagcctgggtgacagagggagactcagtctcaaaaagaaaaggaaaaaaaaaagacaaaaccctaagactatatgtatgagaatgttaagtaatattaggtcagtgattcaaaaccttgggtgcatagtgaatcatcttggaggcttttaaaaattccaaagtccaggctacatcttagacaaatcagaatctctgggagtgacacccagatatcattttgtaaagctccccaggcaagtccaacatatagccaaggacaggaacaactggcttagtcagtcaaaggactaatcactgttaccactgtggaaatgaattgtatcttccattgcctttttttctcttttccttttttttttttttttttcctgagacagggtctcactctgtcacctatgctggaatgcagtagcacaaattcagctagctcactgcagcctctgtctcctgggctcaagtgatcctcctacctcagcctcccaagtagctgggactacaggcacacaccaccactcccaactaattttttgtaattttcatggagatagtatttcaccatgttgcccaggctggtttcgaactcctgagctcaagcaatccgccccccatagcctcccaaagtgctggaattacaggcgtgagccactgcgcctggcctgcctttgttttcttagtaaacttcacacttagttgtatggacatttggatataatttcctgagtaagaaatgtgttgtcttataattttgtagtatcttaatattggctctgtcgtattcatagagataagtatgaagttactttaactactaacagttcagttttttatacacctgtttgtcccatgtgtggttttatcattttctgagatttctttcagccccttagctaatgctgtatcactattcatagtctattaacctgaatgctaatctagtcaacctctacctcctctttcaatcctactatcatggattggtctaagatagacttaaatttattgaatagcaaaatataaaaatgtttggaataagatgaaggagttgctcattttggtaacagtctgcttttacaatgattttgattataaaagcttaaggaaattaaattatcattaaaaaaattctcagtaaatcattcattttcttagagtaattcaaggtaataagatggagacactggctaagtgatggaaacattgtaggatgtgaagtttctaaagtgcaagtgtttaggcagtgttttaccatggaagtatgatttaataatatgtatgtttccatcttcagaaaagaaaatttatgtctttaaaaaaactatcccctataaagatatatgttataaagaaaaaaacagttataacatccagagcaaaggtctaaacctggtgtccatggattcaaaggaagtacaggaatgaattttaggaaatccacgaaccctctgaaattatatgtaaagtgttgtatttatgtaaatagttatatttttccttttttttttttttttttttagacaaggctttgctctttcacccaggctggtaggttcatagctcattgcaacctcaaactcccgggttcaagcaatcatcccacctcatcctcccccatagcctggaactgcaggtgcatgcaccaccatgcccggctaatttttgttattttttgtagaggtggtcttgcttcactgcccaagctgatcttgaactcttgggctcaagcaatccttctgcctctacctcccaaagtgctgagattacaggcatgagccatcgcatttcgcctttccttagttttgataagattttcacagggttctgtaatccacaaaaagattgagagactgcctaatagttaatgaagtcagaatcaaaattctaagaacatttaatgtacttaactcaatggaaatagtacattaaagaatgtttacattagcatctactaaaatgaaaatggtagaaattttgtcactaaaagatcaagggctcatatttctaacagatctttttcatagggaatatctgaaacataaggagaaagaaaaatgtgaggtgattaagaacttgaagaatattggcaatggcaacctgtgtcctgttttaaagcgcactatcccatttggagttgcctatcaccacagtggcttaacaagtgatgaaaggaaactcttggaggaggcctactccacaggagtgctctgtctttttacctgcacatctaccctagcggcaggtgtcaacctaccagctcgaaggtaagagataagtaagtgttgaccaggctcagaacttttccatttctagcttgcgaggagttttgttgttttatgctttctcagtagtggatgagaatttatcaaatgttcttttagcatatgctgagttgattggttggtttattttctttaatattttaatgaatatgtaatgaaatatgtaatgaaaaataacgttaatagatttcttgatattagaattccatcctttctgctctttatatctggttttgatgttagggtctattaatctggttttgtagaaatagttggcaagtgttttaccttttttatgatatgaaagagtttatttaacatagagatttccttgaaatcttggagagctgatccataggcaatttgtgtctaatatatgtattttaaagcaggcccttgattacctttccagttattaccaaaggtgtaggcctgtgtaattgacttctcccctttataatttatgatcatggggtattttgctaataaatgatcaatttttataaactttccatgagtgtttaaaaaaatatgtattttcagttgaatatgcagttttgtacatctcagcgagatcacagaggttcattgtgttatcggcttctctattttcttactatatttgattccttggtctatcaatttcagagaagtgtgttagtctcccactttaattatgtagttatcagtttctcctttttgcatctctagaagttattactttttatatttcaaaactatttagatatacaaaggtttacttcaaatatcttattgccgaattataccttttatcaatacaataaatacttgtttttctcatttaataattttgctttgaataccaggactcattttttttttttgccacgtatgtacctttttccattcttttattttcaatttctgtctctcattaagttttccatttttcagacaattgaagaaaaaaatgaaagttatatatcctgtttctattattccagtggttactcttaaaattttaagttgtaaccaaacattttttattactttagaattaatcaataactgtcctctcctgaacataaaaagaggcttagcatgtccttagtatattctactctgccccatgaatgttgcaattacttagaattttagtgccagatttaaacattttctttcatcttatgtagtatttaaacttacctgtaaatcatacttcttttttgcttaccactgcctcttatatcccacatctttcttctctgatttttttttttttaattttgccttccttgagtaatcctttttagaataccgctttagggggtaaaacattttgactctttgcatagttgaagatatctgtattttggcctcacacttttacacttcactagcaaaagaattctagattcaatttttttcctttagggattttgtaaatattgttccatattttctagaggccaatgttgctcatttttgtctctgcatggattttctgtttttcttttccagaaacttttagacttttctctttaacctcccaattttgtcatggtgtataataatagttgtaattactacattcccctccctttcatgtagtaacaactttacatgcattgacttgatacagcttcacaataactctgtgaggaaggtcatattttattacacacctattatagaaggggaaactgaggcactaaataattaaataattttcccaactttaaaaagttacataactttttcccaactcattttccaacaaatgagttttaaagccagtgtttgaacccaggaagtttgattttacaatcccaacagtactacttttcattcatagggcttagcacttgggtggatgcttttaatctaagctttatgcctttcttctttgagtaattttttttctgttatttctttttcttcccattatctctgttccttgcttttataatttcacttaggcagggttgaggcctcttagattcagctttcgtatctcttttcttacacatttttcagaatgtggaagaatgtaagcacacgtttgtgccatgtaatttttttcaactttaccttccatatcaaaaaatcagtttttttgtaatcccagcactttgggaggcaaaggtaggaggattgcttgagcccaggagtttgagaccagtctggacaacatagcaagacctcatctctactaaaaaattaaaaacttagctgggcatggtggcatacacttgtgatcccagctgctcgagaggctgaggtgggaagattgcttgagcccaggacatcgaggctgcagttagctatgattgtaccactgcactccagcctgggcaacagtgagaccctgtctcaaaaaaaaaaatgagtttttaactgatatccattaactacattaactgtatccattaactattttcattcattattcagttcttcaattgaattttcttttttgtgagacagagtcttactctgttgcccagtggccaggctggagtgcagtggtgcggtctcggctcactgcaacctctgtctcctgggttcaagcgattctcctgcctcagcctcccaagtagctgggattacaggcgcccaccaccacacctggctaatttttatatttttagtagagtcggggtttcgccatgttggccaggctggtctcaaactcctgacctcaggtgatctgcccaccgtggcctcccgaagtgctagattgacaggtgtgagccaccacacctggcccttcaaattttttatgaatttttaaataaagttaatttttttttatttctaagaactctcttttgttgttctttccttataatagtctactccttttttttttttttttgagacagagtctcgctttgtctccaggttggagtgcagtggcatgatatctgctcactgcaacctctgcctcccgggttcaagtgattctcctgcctcagcctcccaagtagctgggattacaggcacacaacacaatgttttttagtttttgtgtttttagtagagacggggtttcaccatgttggccagggtggtcttaatctattgacctcgtgatcctcctgccttcgccttccaaagtgctgggatttacaggcatgagctaccacacacggccaatagtctactccttttttttttttttttttttttgagacggagtctcgctctgtcacccaggctggagtgcagtggcgcaatctccgctcactgcaagctccgcctcctgggttcacaccagtctcctgcctcagcctcctgagtagctgggactacaggcgcctgccaccacgaccagctaatttttttatttttagtagagacggggtttcactgtgttagccaggatggtctccatctcctgacctcgtgatccgcccccctcagcctctcaaagtgctgggattacaggcgtgagccaccacgccccgccaatagtctactcttatattgtggatataatactctttggaattttctgttaatgctaattaggatttttaaaagttctcttctgatccctatattatctggttttgtggtcacttattctgtatattcatgttatgtttcttttatgttattagttttcttcaagtatttggtaatcttttctgcatatgagatttataaataaagaggaagttgactagtataggtaaacaataggttttttcttccctttggataagaaagctgactaactgactatagacttctgtatatatgaacataattgaaattgctttttttttttaagagatggggtttcactctgttgcccaggctggagtgcagtgatgtaatcacgatttactgcagcctcaacctcctaggctcaagtgatcctcccaccttagcctcccaagtatctgggactacaggggcacactaccatgcccagccagttttttgttgttgttgttgttgtttttgtagagactgcatctcactatattgcccaagctggtctcaaactcctggactcaagcaaacctcccacatcagccctccaaagtgctgggattacaggcatgagccactgagcctggctgaaatcaccatttttgtaggtcaaaaacagttgacatctgcaattttatacagttcaaaataataaaaattcataaatagatatgtatatgttagtggtgtatggtcatattttttatttatggagtataaagtccaaacgctttggagactactgctacagattgatcataggcattgcagctgggcagacttgagttcaaatgatagctctggtaattactaattttttagtttaggataagtcagttaactgagttgtaattaattcctttataaaaatgaaataaaaaagtatattataactaagagttttgtaagaattatagataatatgtgtaaaaacctaagaaatcatagattcttggtaaacactagttacctattattttgtgttagtatgtcattaaatttaatatcacaaatatataatgaaattaagaattttttaaattggtgctgtttgctgtagagtatcatttttcattaattccacagagttattttaagagctccctatgttgctaaggaatttttaaagaggaatcaatataaacagatgattggcagagctggtcgtgctggaatagatactattggggagagtatcctcatattgcaagaaaaagacaaacaacaggtaatactcaatttggttggttggttgtttttgtctttttcttggttgttggtctagcccttttatgaaatcatcttttaaaaattaattattaattttctttaaatgatgctttctttcctatatgattaagaattagagtggtttgaaaatgtatgtatttcagacaatgaaaaaatatttttcctatttgtttttcttccatttttaatgaagataaatgttaaattcttttgtctttacttttttggtctccttctggctccacaagatttatgtaaagtataaaatatttatattaaataccatttatttttaataataacacaaggcatggttttgctttaacctttataggtattggagttaataactaaaccattggaaaactgttacagccatcttgttcaggaattcaccaagggaatccaaacattatttctctctttgattggtttgaaggtatttttcttaaattttttatcttattactgttatctgagacaatagaggttaaaaagttatgcaataactttatatatgcaactgtgtagattttatactaattttttatttaataattttttcttttaatttttttctttttaattttgttttctcatccccttcagtgattaatgtaaataatttttaaaagatcatggaatggttaggtgcagtagctcacacctgtgatcccacctcttagggaggctgagacaggaggatcgtttgagcccaggagttcaagaccagcctgggcaacatagcaagaccccatctcaaaaaaaaaaagatcactgaatcctaatgcttggcaagtggttggcacttaataaatacttgaattaatgaaattggcttttttttttcttagagatggggtcttgctatgttggttagattggtcttgaactcttgtcctcaacagtcctcccaccttagcctcccaaagtgctaggattataggcatgagccactgcgcctggcctgttttgtttgtttgtttgtttgttttttctttaatctgggacatggtgatgaaattaactttggaactgagcgtgggtgaacttccaagttggggcatcagtggagaatctggatttgagaagccagaagcagaggctggcccagtgggtttcaattactatgtcaaaaactttttcagggaggaatagaaagataacatgatggtagatagagggatcaagtaaaggttcccctgcccccctgcactcttccacccccagtgttaactctaatcatttaggtaggaaacagtacaaaaacaaagtacattaataatccaaaaaccaagtatcagttcttaaatatcttaaaagtataattttagcttaattgaatactatattaataatgatttttattaaagtgggaagaagcaatagaaaatgtctgtgctccattatatttttcttaccccttatattggtttaatatgaaattacgacttaaattttccagttgaaatagcatcagaattgtaagagagagaaatatacttattgattgactatattttagtataacatgctgatttcattgaaattggctaataaaaattattctaattcagagtcagctctacatctgaatactaaatggagggttaagtattccttatgattgccattgtaagttataaatagtgaataacagtgaaagaacaagaaatggagataggaatgagagagacaaaaataggtagagatcaactatttttaggtaacattttaggcaaaatattgtctgacgctgttttagtggaaacttgtattttttttttcagttctttttttaatttattttgttttttgttttttttttattatactttaagttctagggtacatgtgcacaatgtgcaggtttgttacatatgtatacatgtgccatgttggtgtgctgcacccagaaactgttgtattttcctttttttttttttaatgcaacttttagagctaaaggatgtttttacagttgggtggaatgcagtgcagggaagatccctaaaggaggctgagtgagaattagtgaaaattggttggggagtaaatagcacagttctggagatattgtgaaaaattatttaaagatctatccaaaggagttttggaatgaaaaatgagtacatgttttcataaaaagcatgaatataataactatcatccccctaaattttttgttaatttttaattgccattataaatttatatatgcaactgtgtagatttaatactaattttttatttaaatagctttgaggtatggaaatgagttatcttgattaatatgcattcaaggtgatgccttgaattaaggaaaatgctccaatgatatcctgaattgtttcagattgcaacgaatcttgatgacatctatcatttcatgaatggtacattttttggtgttcagcaaaaggttttattgaaagaaaaaagtctctgggaaataactgttgaatcacttagatacctgacagaaaaaggactcctacaaaaagacactatttataagtctgaagaagaggtccaatataattttcatattacaaagttgggacgtgcttcatttaagggtaagagtttacctaaatcttattgatcataggaaacacattggaaaaaatgaaaattaaattatactttctttaagctgggcacagtggctcacgcctgtaatcccaacactctgggaggccaaggggagcggatcacttgaggttgggagtttgagaccagcctggccaatatagtaaaaccctgtctctactaaaatacaaaaaaaattagccaggcatggtgatacatgcctgtagtcccagctactcgggaggctgaggcacaggaattgtttgaacctgggaggcagaggttgcagtgagtcgagatcacaccactgcactccaggctgggcaacagagccgagactccatctcaaaaataaaaaaataaaaaattatactttctttaagttgtatttataattttatattaattacattaatcttattttataagctgataactccttcaactttcaaaagttgaaaaatgttttgaattataagtactgcagaagtatatagagaataaggtaggcatccctccttcatgcttccctcctagcaaccatacaaatcttaatattctaccaagaataacaatttggtgtatatctttccagacctttactgtacatttcatttcagtgcataatatgtacatatgtacagttttaagtttttgtctttaaacaaataatcatttatattattctgaaactttttataaattaaaaaaattttttttctttttttaaatatggaggcaaaatctcgctatgtttgccagggtggtctcaaacttctcacctaaagtaatcctcctgcctcccaaagtgctgagattacaggcatgagacaacacatttggcctgcaacttgctttttttcctgaatataatgtcttagagattgtttcatgacagtgaataaagtgttgtgggggttgttttggttggtttgtttgtttgcttgtttttgacagggtcttgctctgctgccgaggccaaaatgcagtggcgcaatctcagctcgctgcaaccttcgtctcctgggctcaaatgattctcccacctcagccccgcaagtagctgggactacaggggcatgtcaccatgcctgactaatttttgtatttttagtggagatggggtttcacgatggtgcccaggctgaggcttttttttaatgaaaaataatacatgtctgttgttaaaaaaaaaaaacctaagaactcagaattatgttaaggaaagtgccatattcctgtcccatttcaggagctactactaccagtttgatatgtattcttccaaatatttttatgtgtgtatttatttttcaaatggaatgatcatttaaatatttttttccaaattacatttctcataagatatcatgaacatcttaacagatgagtctctttaaatctatctcatttttcttttaatactacagtcatctatagtatggatgtaccataatttatttaaccattcgatgttgatggacacttgcattcttttttatttttctctgttataaacaaggcgcatggacatctctatgtattttggggtacatatggaaatgtttctctggattagattccccaaaatagttggttcagaaggtatgtacttataaagtgttgatgagtactatcaaaatgacctccaaaatagttatatagtaagatgttataagagattttgaagactttttgctatatttaagcaatttctacacaatatttaaagccatctctttgcccctctggtaattgtgaaagattgaatatttgtatctttcttttaggaactatagatttagcttattgtgacattctgtacagagacttgaagaaaggtcttgaaggacttgtgcttgaaagccttcttcatctaatctacctaacaaccccctatgatctggtttcacagtgtaaccctgattggatgatatacttcaggcaggtgagaatataacgtttttcaacttaggctacttcgtttatgaattattacatgctgttttgttttgttttttagagatgaggctttgccatgttgcccaggctggtctcaaactcctaggctcaagcagtcttcccacattgtcctcccaaagtgctaggattacaagtgtaagccactgtacccggcctattatatgctttttatgaagtgattattcactttttttctctattaaaatatatttggaattggatatttttttctttcagtttttaaaaattataatctggcaacagcatttatggttcgtttaactttaatgttacttttctcttaaatataaacatatttgttattgaaaaaagtaaaggttaaaaaaaagaaaaaaagattatccgtggtcctatttccccacagaaagttactgttatgatcactgcatttgataatgcctagaatgcaaagaaaacagtgaaaaccatctctgatgatttagagtttaattacatgaaagctcggtcagagccaagtatgataatacattaaacccaatgacgttaataactgaaaaggaatatttattttacaacccatcacaaagtagaactgtccatacttattataaagccaagtggtaacatacagtatattatgattttactgtgaacaggctagctgtataaatgtatattagggctgcatgtggtggctcatgcctgtaatcccagcactttgggaggccaaggtgggaggatcacttgaggtctggagtttgagaccagcctgggcaacacggtgaaaccccgtctcttctaaaagaatacagaaattagttggtcatggtggcgcacaccagtagtcccagctactcaggaggctgaggcagtagaatcgcttgaacccaggaggcggaggttgcagtaagctgagatcatgccactgcactccagcctgggtgacagaatgagactgtctcaaaaaaaaaaacaaaaacagaaacaaaaacgtatattagacagaggtagtatacatcttttaatcacaggaaattagctttctttttaatgtcatatttttaaatcattactgtttttttttcttttctccatctcttctcaacttcctgagtttacattactcaggaagtaagttttttttaagtagcactatataatgcaattactctcaaacctttccttctccttcccctcagccatctggtattaaatatagtcatatagtccatggaaaccagtacttgtggctatgcctttaagtaattctaaagtgtgttatatccttgttatatcctaatgatgtaactttaaaacctgcaacatttacaaatatatttatcttgttttttgtatcctgaatcatgagaatgtgatatcaaaagaaatactggatttggttcacatgacagattttttgatgtttccatctatttgctctttttccatgtagtttagccaactcagtccagcagaacaaaatgtagctgccattcttggagtctctgaaagctttattgggaagaaagcatcaggccaagccatcggaaaggtaccacattctttttttcttcctaaataataagttcactcaacacttagttcactcactaagttcactcaacaaaattagtaccattatattgatcttttttggtttacattttttcctttaaattagtataacgttcattttactacttaaaacatacctgagcacccaaaatgtatgaatatttttaaacaacatttatttctgggtagtgtgatgacctttttttgggtagcatgaaatgttttcataatattacacaatcctgatataagttcaattcaaacgaggaaatacattttctagaaactatattaggctttctatttggtatcaaggattctaagataggacaggtctgggttttttgttactgcttttgtcatcctcaaagaactcctagtctagtacttatattacataaagcattttagaaggttaaaggggataagctaatactcgttggtgtgatatattttggtgttttaaaattcagtctgcaggcatgaagcaagttatcaaatgcatacactaactttaagagaaattgaagtaattctttcataaccataccttcgatttccttaagagaatgttattttcccccttgtaatacacttttttttttcattttaaattttatttggcaatccaatttacattgaaacctagttaccttccattttcccccacaccttttttttttttttttttgaggtgcagtctcactctgtcgcccaggctggaatgcagtggcatgatcttgggtcactgacacctccaccttccaggttcaagcaattctcctgcctcagcctcctgagtcactgggattacaggcgcctgccaccacgcctagctaatttttgtatttttaggagagacagggtttcaccatgttggccaggctggtctcaaactcctgacctcaggtgatccacccgcctcgttctcccaaagcattgggattacaggtggctctcaggttgggagccaccacacccaacctcctctataccttttaaatttacatagacagtacagatttcattttgtaaaatggaagatgatgtttacatacacttaaattgatggtgcagtgtcccatgcatcactgtgtcataaaatcaaaaatattgggcccggcacagtggctcatgcctgtaatcccagcactttgggaggccgaggtgggcgaccatgaggtcaggagttcaagaccagcctgaccaacatggtgaaaccctatctccactaaaaatacaaaaattagctatgtgtggtggtgggcacctgtaatcccagctactcaggaggctgaggcaggagactcacgtgatctgggaggcagaggttgcagtaagctgagatcacaccactgcactccagcttgggtgacagagcaagactctgtctcaaaaaaaaattccatgagcccagcacagtggcacacacctgtactcctagcttctcaggaagctgaggcaaaggatttgcttgtactcaggagtttcaggatagcatgggcaacatagtgagaccctgtctcaaaaataaaaataaaagtatctgtagtacttaagcattcatgttatcacaatttttagattgggtcttttactttggaaatggctatgctgtttagaccttcaaaatgctgaataaaaatatttcttaaaacaaaccttttatatcaaactctgaaatgtaaaataaaaacaatatcattaatttggaactaattatcaaataataataaacatgcaaaaatcttattagaataatatatctttttaagcttgaatccagaatttatttttgttacatttaatgtaatatagtcaacaaatatttgccaaattgatacatatttaaaatagtatggacatgaacttatcttaattacaaatggattaattactagtttaatgttttggaggtataattttttaaaactctggagaacatatttaaatacttaaaatctaattgatttctccacattgaaaaagaggccccccacctgaccttttttgaacattcttgatttcttgcaaaagattttttttttttttgatacagagtctcgctcttgtcgcccaggctccaggctgcagtgcaatggcacgatctcagctcactgcaacctccgcctcccaagttcaagtgattttcctgccttagcctcccaagtagctgggattgcaggtgcccgccatcatatacagctaatttttgtatttttagtagagatggagtttcaccatgttggccaggctgatcttaaactcctgacctcaggtgatacgcctacctcaacctccaaaagtgctgggattacaagcgtgagccaccgtgccctgccacaaaagatcttgacattggcataaagcattgtattttgccatataataattatatcatttttcttggcttaggaaatacattctaagaaaaaacctacattgactcaatttatagttagtactgaagatgcactaaaattgggaaattaaatagctctcttttcctacttgatgttcagctgtcatactttttcagcttaatgcttttaaaaaagtgatccagtatcaacatgcagaatatgtaactcatacatccttcaatttgtcaccgtaagttctcatttcattcttttactatggtggaggatataattttatattttattttattttttattattttacagttttttttaaaatagagacaggttttcaccatgttgcccaagctggtcttgaactcctgaacttaagagatcctcctgcctcagccttccaaagtgctgggattacaggtgtgagctaccactcccaacctctattttattttttatacctactttttcttttttaagttcatctttttgccctcaattttaagaattgattagtttctaagctagctatgaaatcctttatgcacaaatgtggtcatcaggcaccacaggccaaagcaggtatacagaatcgaaatcatcaactacaggaagcatttttcaatctctttcaggtgttttagcttggaccatgtggaaatcataggatctaatatttactcttagtttataatatagacaagcttattaacatatttatctaaagtacatttgtctaatttataataataatcacatacgtacacaatttacaaataccaactaactgtaaaagtctctctcaccaattccttcctttcctgtattcattttctacaaccgccataacaaattaccacaaatgggtggcttaaaacaacagaaatttattctcccacagttcaggagaccaaaagtccaaaatcaaggtattagcaatgttgattccttcaggagcctctgaggaaaaagccatccgtgcctctttcctagcttctgatggttactggcagtccttggtgttccttggcttatagatgcatccctccaatctcagcctccatcttcacattgctgccttctctgtgtctctctgtgtcttctcctcttataaggacactaatcattgaatttagagcctactgtaaatccagggtgatttcacctagagatccttaactgattgtatctgcaaatatcttgtttccaagtaagatcacattcacaggtaccaggggttaggatttgtacatttctttttgtggagtgatggagagggggtacaattccttccctgtagaaggaagtttaatttagattggaaataatttggtttatcttttaacttttatttatttttatttttatttttttgagacagggtctcactctgtctcccaggctgagtgcagtggtgctatctcggctccctgcaacctctgtctcctgggctcaagtgatccctcagcctcccaagtagccaggactacaggtgcgcgccaccacacccggccacgttttttgtttgtttttttgtggagacggagttttgccacgttgtccaggctgatctcaaactcctgggctcttgtgatccatctgccacagcctcccaaagtgctgggattacaggcatgagccactctgcctggccttatctttttattgtagttggaaaaatgataataaattttaattaatctgaagtacatctgttagaaattagttttgtttctatggaattattctatccttgctattctgtaatacaacttcagttttccttttgtccaattttaataacatacatttttagcaggtctagtaaacgaatttatttgattgtgtctttctagaaggtggacaagaacgttgtcaacaggctatatctgtcttttgttctttataccttgctcaaagagaccaacatttggactgtatctgaaaaatttaatatgcctcgaggatatatacaaaatcttctcactggaactgcctcattctcatcttgtgtgttacatttctgtgaggtaatttcattgaatatatgatatgtactttgtgcatcttctggttttaactgttactaaactaataagccagttagtcagtatgtcagcattttctccttgttgacatattctgttattacagagcactaaaaaactatttaaaatgtacgtttgtttttatctgtttatgaaactactattatgtacttatggtaacaatacaaaaattcctgagtcaactaaaacacataatgaaaagtgtctttttgacccaactcttaaagccaccattaatagtttcaggtattcagaattaactgttaaaaacaacctattgatgtagattccatgtgaatgtctttcacctgagtaataaaaatgtcaggtgtttggttagaaagttacctatatccaacagctaccatgtgactatttagtaccatattctctttttaaaaaaatttaattttgactggatgccatggctcccgcctgtaatcctagcactttgggaggctgaggcaggtggatcacttgagcccaggagttcgagatcagctgcttgagcaatgtgggaaaactccatctctacaaaaaataagaaaaattagccaggcgtggtggcacacgcctgtggtcccagctacttgggtctcactctgacgcccaggctggagtgtagtggtgtaatccaggctcactgcagctttgacctccagagctcaggcagtccttctgcctcagcctcctgagtagctgggatcacagacatgtgccaccacacctggctaattttttttgtttttttgagatggagtctcaggctggagtacagtggcgcaatcttagctaactgcaacccccgcctcccgagttcatgcaattctcctgcctcaacctctagagtagctgggattatagtcacacaacaccactcccagttaacttatgtatttttagtagagatagggtttcaccatattggccaggctgatctcgaactccggacctcaagtgatccacctgcctgggcttcgcaaagtgttgggattacaggcatgagccacagcgcccaaccaattttttaaattttttttgtgcaaagggtgggcgggggtggggggtctcactatgatgcccagcctggtcttgaacttcaggctgaagcgatcctccaggttgcccttccaaagtgctgggattacaggcatgagccgccacgcctggcccatattctcttgattgccactgtaatttagtatatttgcttccagtgtcaggcagctatttaaagcttttacatcaaatgtgtattttatagaacaatttaagaaggaaaccttatactggtcatatgcatttgtgatggatttaagactttattaaaataagctttcagaattcctttaaatagcacaataaagcttaccaggcttttacatccagatactttttttatgtgtttataatataagccatttttgctgcatttagatttcttcttattgggtggcataataatcctttccatatttgtttccaagtcaattttctaaaacttttttcccatgaattgttttctaaatttaaaatttacttcattttccctttcttaaaccttcatattctgtatatgtatatggcaattaattctatcatatgtgctaatgaaaggagtaaataattcaaaaatacttggctttcaattgaatgataattattttaacaaatttagctttctaaatatcttttacttgtgctgatttttaaatgttggtttataccccctgagcacatgctagttaaacagaagacaaaaattatgggtaataagaagaagctagcctttaaaatgtattttcttaagtcttctatatttgttgttttgtatatttaaagatgctttccctaatattttttccctttgttttcattgcgactatgaggacttgagccttatagaattgtttaagtaaaaaactctatgaagcatcaagaaaaacagcaataatttgatgactaatcctaagaaaaatctagctgacaatttgtactctaattaatttacttcatttatatatatcataattatataattacatataatataaatatataattatatgatatatattacatgtatataatttttcaaattattatcaatagaggcagggatcttgctgtgttgcccaggctggcctcaaactcctggactcaagcagtcctcccaccttggcctcccagagtgctgggattacaggcatgagccaccacacctggtctactttcaatatttcaaggcaggggtgttcaatcttttggcttccctgggccacattggaagaagaatcgtcttgagccacacataaaatacactaacaatagcttatgagctagaaaaaaaaaaaaaaaaaaatctcatggtgttgtaagaaagtttaccaatttgttttgggtgacattcaaagccatcctgggccgcatgtggcctgtgggccacaggttggacaagcttgttttaaggtattttttattttaaaaagttataaatggtatgaaatggtacattaattgtgttagttaagatgcttttaactacaagttacagaaaaacccatcaaggtttaaacaataagaaaaaataattattttatataacaggcatgccagaactaaggcagcttcaggattgattgattcaatagttctgttcaaggttttcttctttttactctgccatcttcattacgttgatttctttcttagtagtcacaagatggctagctaatgctgttccattcatcatgtacattcacagtgatatccaaaggctagaaagggaactttaaaataaaataaactactataatagaatattgcaaatatctatgacaaaatattatattgaattcccatttacccttctagctttaacagttattgactcatggcttccagtatttttattattgtattgttgcattgaacatcatgttacatttgaatatttccatatttaatattcatcttccagataaattccagatgtaggaattgtttttagtcacttgggaaagaaaaactatgcattttcttccaggtattttgattaaaatgaccagaactctttttattgacttatttttcaattttcaatcttttcctcatcctaaaaccagttcctcaaattcctcagggtcctccccatgtttcttcacatctgttttgcttagaatcatctttcatctctggcttaactcaagttccagaacttatgtaaggaacattctctctgagccccctatcacacaaaccaaactttgaaataacttacaaaatttaaattttatatatttctttgtgttctacaggagcttgaggagttttgggtttacagagcccttttggtagaacttaccaagaagctgacttactgtgtaaaggcagaattaatccctctcatggaagttactggagttttagaggtcagtagcttgttggtttcccaattgaaattatgttgaattaatacagaagccaggttttattattttctgaagtcttaatacagaggaagtgatagcaagagccttaattgctcatttgtcatgggaatcttttatttaaaacaaatagctgttatggccttccagaaatccgctgttactagatggcatacctgatgaaaaatctcagttgtgaaaaaaaaaacataacaggaagggtgggagtgactgtctccaagtatgttgtgctaccggttgtccttaacacttcttccttcctccactcctttgaagaattaccttctgtcagtttggactcagtgcttgtttaagataatggtgattcagtggcagaaagggtcatttgtattttttctaagagagtaagaagaaagggttcgcaactggttttccagctttctattttcagccaaccctcaacttcagtttattctctgttattcagttcttgagtcagaggagttctgcttaggacacacgcacacacacagagagagacaccagtggtcccctgagtagatggtgagaacactgaaagatattggacttggcctgatgatgtggctcatgctgcaatcacagcactttgggaggccaaggtgggtggatcaattgaggtcaggagttcaaaaccaacctggcccacatggtgaaaccccatctttactaaaaatacaaaaattagccaagtatggtgtcgtgcgcctgtaatcccagctacttgggaggctgaggcaagaaaattttgtgaacgtgagtggtgcaggttgccataagccaagatcgcaccattgcactccagcctgggcaacagagcaagactctttctcaaaaaaaaaaaaaagaaaagaaaagaaaaagaagaaagaaagaaagatactggactagaacattttacttgaggatatgagatgatgccaccaacctaagtgggtttcttttcttgattgcagcacacatcagttgactcaagctgcatagaactatagttaccttgtagtcagtttggaaccacccaaatgcatttttaaaaattcctcagtattctcatgtcttgtctcttcatatttactttattttatcccagtctcttacatgcagtttttgttcttttcagtaaagtgcttaattttcttttttctaatcccaaactattatcctactgatttttgtaacacttttcagggtcgagcaaaacagttatacagtgcaggttacaaaagtctaatgcacttagctaatgcaaatcctgaagtgctcgtaaggacaattgatcatttatcaagacgccaagccaagcaaattgtttcatcagcaaaggtaagcaaacaaaccattttttaaccttaataatcttgcgtagtgttatttccttgtattatagacatcagaacaaaaacatttcacattgcataactgtttatttctatagatacaaaagtacatactcttatttgtgagtaaaaataatgcatctgttgtgacacaagccttgcaaaacaaaaaaaggacctgctaaaaaataaagaaaatttcagtggtggctcatgcctgtaatcccagctctttggaaggtcaagatggggaggatggcttgaaatcaggagtttgagaccagcctgggcaacataatgagactctgtttctgcaaaaaaatttaaaaactaactgggtgtggtggtttgtgctgtagttctagctactccggagactgaggcaagaggatcgcttgagcccaggagttcaaggctgcactgagctaggatgacagattgagaccctgtccccccgccccaaaaaaaatgccaggcatggtgcctcatgcctgtaatcccagcactttgggaggccgaggcaggtggattacctgaggtcaggagttcgagaccagcctggccaacatggtgaaaccccatctccactaaaaatacaaaaatttagccagacttggtggcacacgcctataatcccagctactcgggaggctgaggcaggagaattgcttgagcccaggagacggagatggcagtgagccgagatcataccactgcactccagcctggctgacagagcgagattctgtctcaaaaaaaaaaaaaaaaatggctgggttcggtggctcacacctataatcccagcactttgggaggccaaggcaggtggatcacttgaagccaggaatttgagaccagcctggccaacatggtaaaaccctgtctctactaaaagtataaaaattagccaggcgtggtggcccacacctgtaggcccacacctgtaatcccagctactcaggaagctgaggcatgagaatcacttgaacccaggaggtggaggttgtagtgagccaagattatgccactgcactccaacctgggtgacagagtgagagtctgtcttaaaaaaaaaaaaaagacaatttcaagggttcattgaagtataaagaaccctggaagtcactgagctctgtctcccaaagttctcttcacaggaatcctttcctcagcatcccagcatctggtctctccacctttgagcaccagcactgacaaggagcctgcatcatcaaaaattaggttgtctatttttgtacactcttagtgttacaaaaattatcctgatatactgaggctaaattttgccttcttaaaatttctaccattgcatcagagtactacctctggaactggactctttttttgtttgtatgctgtttttcacatattcaaaaacagctcttattgcccccaagggtttctcttttctgttgcttttatctgtattaaataatcaagttttaggccattcactgtcctagttaccctttgctagatgcaacccagtttgccattgccttctgctccctgtgggtaaagccattccacagcaatttgagattgtttccttcttgatctcaactgtggttctaagtctgaaattgcttggcttctttgaagcttcattgttttactattttcatatataaatcagaattagctttccatcattttttaatggtgctcacattgcttacattaccttaattgttctttacaacaaacctatgaggtggacaaagtcagtgttacccccaatttatagatgaaaccactaagattgaccttgtcccgttaaattaggagttcttggggttggtagggatgaagttatagtcatttcctttgctatagcacctaaaaaaaaaaggttcattaaactttcacacacttgtttcagcatttactagtgatgtttgcctaactccattatttccatgatgcttatcaagaggtgattttctaacttcattatcccttctggatttatttactgatgttttactgtgaggaaaagcttttcctttatttattcatttatcagtatgtgctcataggttcaaacatattcaatgggttataacccattaataacattacttattttggtgctcaaatggcctcagatttggccagtggaagcccctgaaaactggtttgtgtggctttttgacctgtcatcatcattcttgaagtattttcttactttctggctgtgtctgtcagcatctaatcattaggaggcagaaaccacacagtaatttgaacaggcgtctaaggggtcaacagaactttaaagaattcaggaaggaatacatttgagagacggtccacccccaccccacagcacccctgtggatgggatccggacttcattgccactggatgctgggaagtttgttgtggtgctacagccaaggctaataagcagaaactgcccacggagtgctgacaaaactgcaaggaagctgcctacaatgtactgttgaacttgcccagaagtcagctctagggcccatggaactagggcactagctaggaccaccctagctgatgtatgtctatgtatttttctatacttatgtgtaaattactgaaggccatgagctcatactgataaccctaattctgatttttccacgtacatacgctacataacagagtctaactccaaaatttagtggcttaaaacagccatcttattttgctcatgtttttgtagattaggaattctggaggggtgcagctgggtgcttctcacttgggtctcaggcaactgtagtcagaagttgactggagctatagtcataaggcccagcagagctggatgacccaggtgactcactcacatgaccaacagctgataattggaggcaactggggcttttcagcttttgactggagcaactacatatggcctttccatgtggcttcagtctttatggcatagaaactaggttttgagagggaatgtccagaaaatgagcattttaagatatccaggcagaaaatgcaagaagtcttctgagccaacctcagaagttatacagtgtcatttccgctgcatactgttggttactagaaaaccgttaagacctagattgaaaggaaaggggatcagaccacctcttcatgagaagagtgtcaaataatttgtggtcatctttaaaatctgccctctggtcacaaattgtttctgttcctcccacatgcaaaatatattaacccccaaaaggcttttccattatagtttctattaggaaaaactcaaagtcttttttgttgttgttgttcccccactcaacactcaacaaacacaacacagacagaagatttctgtgaccaaatgtgagggatttctccccaaaaaaacaagcaatcatttctgtagcagacatcagctgggtgtcctgacactatctagctggagtctgggcttctaaaacttcttaccaattcaagttggggttccctcaacctcttctctgggttcagtcagctcacgaaactcaggaaaacatgcgtataataaaggatatcacaaagatacagatgaagagattcataggtcaaggtatgggggaagtggcacagagctttcatgccctccctgggcacagcaccctccatgtgttcagctgtctggaagctctgtgaatcctgtactcttagacctcttatggaaactttattgggttggcatgattgacaatcatgtagaaatgtgactggacagaaagggtatgatttattaataatactaacagattgagtggggaaacccagcaagacccgtctgttcagattcttctggcctctctgtgcagcattcctttcttcagagtatggggcaggacactctgggatgagggtctttttacttgtttttggagacagggtcttgctctgttgcccaggctggagtgcaatggcacaatcatagatcactgcagccttcccctcccaggctcaagcagttctcccatctcagcctcatgagtagctaggaatagagacaggtgccacgcctggctaatgtttttaatttttaatagagacaaggttttgctatgttgcccaggctggtcttgaactccgggcctcaagcaatccttccatcttggcttcccaaagtgttgggattacaacatgagccactgcacccagcctggaatgagggttttaagacccaatgatcagattagagttctgccttaggcaggcaaaaggagggcagaagaaggtcagagagagaaattctgttttctgaggtctaaagtgccccatcattgtaagaagggctgtgggagttatgagccaggaaccgtggatgaagaccaatatatgtctatcataatatcacagcatcagactcagatccagtattctaaatcaagtccgagtgtgagtgatacaccttcagtacagtttcacaagttacagttcttcttaatctgaagaccagtgaactaaagagacactacataaaacagtgaaactagaaataggataaccatagtatactctcattcataaagaaggaaaatgggtagtgcacagcagcagttctgaaatccagccagtcatatgtggccagttccttaattatgtcccagttcttctctctgggaatggtttttcttggctttgggttctctcatttgagtcattctcccttttccataagcaataaacccatgtttgctgctaggtagctttctcaatgtgcttcctatatgtagttcaagaatattgaagttcaagagttcaggctcaggtgtagtggctcacacctgtaatcccagcactttgagagaccagagtgggagaatcacttaaggccaggagtttgaggtcagcctgggcaacatagcaagaccctgttcctacaaaagaaatttttttttttaattagccaggcatggtgatgtgtgcctgtggtactcatgaggctgcaatgggaggatcatttgagcctgggagatgaaggctgcaatcagctatgatcatgccactgcactccaacctgggcaacaaagcgagaccttatctctattttatttttaatttaattaaattaattaattttatttatttatttatttattttgagacagggtctgactctgtcacccaggctggagtgcagtagcatgatcttggcttgctgcagccttaacctcccaggctcaagcaatcctcctacttcagcctcccaagtaactgcgaccacaggcgggcaccactatgcctaactaaattacctttttaaatttatttttcaccatgctgcccaggctggtctccaactcctgagctcaagtgatccaccctcctcagcctcccaaaatgctgggattacgagtgagccaccatgcctgggggagaccctatctctaaatttaaaaaaaaaaaagttcaaaggcacttgatgttttgtattgtctgtctctttttattcaatctagtataatatcttttaaaacactgcagtttcttatttgtctatttataatctctatgttgcttgactttcttttttttttttttttttttgagacaaggtctccctctcactccaactggaatgcagtggcacaatcatgcctcactgcaaccttagcctcccaagctcaggtgatcctcccacttcagcctcccaagtagctgggaccacaggcatgcaccaccacacccagctaatttatgtaattttttttttttttttagagatggggtttctccatgttgcccggtttggtctcgaactcctgggctcaagcaatctgcccaccttggcctcccaaagtgctggggttacaagtgtgagccaccttgcctatcctagcttggctttcttacagtgtggatgctaggatctgagggggaggattcacatgaccttggaatgatctcatttcaagaccccaaggcctttcttaaactgagacctgtcatgtggcatcatttcttctgcattctattagttataagtgaatcacaaaggctagcacagattcaagaggagaattagatcccgtctctcaatgaaggtgtcaaagaatttccaatcatctttaatttgccacactaatcccatacaggacttgctatatagtcttcctctttttcatatttgtacttcctttctccaataatgagaaacctcatccctgtgtttattaatatatttctgttttcctcaatcttagaatgcactgaaagtaactgcagaattgttaaattataccactccaaaaaaaacaaacattcagtatttatttacagcactttttgtcttcagtctgagagtatataattaaaataatgtgttaaaatgttacttggtttggggtttaaaaaaatctgcttcagtgtggctgttatacatttgaaacacaaattctactggtattccattttatttcctctccttccctcacagatatttttttagggggagtggggaggaactaggtctctgtcacccaggctagagtgcagtagcaccatcatagctcactgcagccttgaactcccaggctcaggtgatcccaccttagcctcctgagtggctgggactataggtatgggccaccattcctggctaattttttgttgttgttgtagaggcttggtctcactgcattgcccaggctggtctctaacttctggcctcaagcaatcctcctgcctcaacctcccaaagtgctgggattataggtctgagccaccatgcccggcctatctcgtttttattctctttattgttttcctgctttttaaattttttcagtggccctaattaggttttttatttaaatctgtttttctatggacacccagttatttagttatagttattagtttttatttctaatatgattttgcctttttcttttatttcattcctgagctcagtcaacttttgtatcatttcttccagtttttgtccatgtcggttcttagttttttaacttcttatttagagagcatttctactcctcctcatatctccagatttttatttgagaatatttaattttgtttggagtgttgtgttacagtttttctgcttcatggtttgctttcaggaagggaaatttttatgagatgaagagtttgggttcttattggttttcttttctctttttttttttgagacagagtatcgctctcttgcccaggctggagtgcagtggtgcaatcttggctcactgcaagctccgcctcccaggttcacgccattctcctgcctcagcctcctaagtagctcggactacaggcgccggccaccttgcctggctaaatttttttttgtatttttagtagagatggggtttcactgtgttagccaggatggtctcgatctcctgacctcatggtctgcccaccttggcctctcaaagtgctgggattacaggcatgagctaccatgcccagccttgttttctttttatatagtagttttgtatagatgagaactgcttgtgcctctgcatatcttggacaacacagtcatttggaatgatttatgagatcccagttcaagagtgttctcttctgtcagagtagcaaagtatttttctttaatggatgacttggggtgggagaggaatgcaagtttgtttgtttgtttgtttaatttccttttgccctacaagattgtaaattttgtccttttttcctcttcctctcatggctgagcttccaaaaggcacctcccttttcacccattctctcccctaaaagcattgcctttcgaagactgcctcctagagtcccacatgcattttaaatatcttcctataaacaatgctttaatcaaccaacattcttttttcagtatttttatatttgggtaggctttttctctctggaggtgatcttatttcattttagaccctctatttccctcttatcttgttcatgtgttttttttttctcaaccccatctggatctctgcaaacacttgggtgggagctcaagaaactggttttggctgagtgtagtggctcacactataatcccagcactttgggaggccaaggcaggaggatcgtttgagcccaagagtttgagaacagcctggacaacatagggagatccagtctctacaaaaaaagctttttaaattttttctaattaaaaaaaaaaaaagaggctgggcatggtggctcacacctgtaatcccagcactttgggaggctgaggcaggcagatgatgaggtcaagcagtggagaccatcctggccaacatggtgaaaccccatctctactaaaaatacaaaaattagctgggtgtggtggtgcatgcctgtagtcccagctactcagaaggctgaggccttctgaatcacttgaacctgggaggcggaggttgcagtgagctgagatcacgccaccgtgctccagccaggcgacagaacaagactccgtctaaaaaagaaaaaaaggcgggtgggggggagcggaatttattcttccacaaattggtgggcttttttaaacaagtaatttgaggttcttgatattctctgtattatagtaatactaacacaagggttttgtgtagtttacttattattcttattgatctatatagcttattatttggtaaaaattcattgacatctttcatatgccatgtttggaaatactttttttgctcattatgttgcttttgaaattaacagttttaagtttaggaacttgaataaaacttttatttgaaatactggtagctttttaaagcatactaaattttgaggaataataaaatgcatatatataaaggataacatttttcaggagctaattaaatttttgcaaaattgtcttagattttatagattaaaagttaatttttaagtggctgagtcttcaataaaacaaatctttgggagaattaaagctcctttatttttggtatactaaaaggcagtgatcagctaaaatggttttaactaaatgcctcatcttcattgactataatcgtttattcttaagtggccatttttcaatctcattatagttttaatgtctagatttctgatgtgtaaggattcaggtgttcaatggacagtggtaaaattgttggcaattctctagcaatgcatattttggcctcacgtcttaattttttaatgtagatgctgttgcatgaaaaagcagaagccctgcaagaagaggtagaagagttactaagattgccttctgatttccctggtgctgtggcttcttccactgacaaagcatgaagctatctgatgagaattttcatatatgaattatttattgtacatgtgtgttattaaagataacttatactttataaatgaaaaaatacatttcagttatacattaagaa

SEQ ID NO: 1197 - DNA, 47058 bp, Homo sapiens
aggggggcggggcggcagagctcggcggctgggactggaggacagcggtggcggaggcgactagcggcggcgggagcggcgccgagaggccgtgcgggacgcgggcgccaggaccggccgaacgcagaggtaacgcaggaccgaacaggcggccggggagtgggcgcgggctcgctgggccccgaaggcgagtggcggaggccgctcgcccggggcgccgacgccgctcccagagaggagggggcggggcgcccgggtccccggaggtggcgccttttgtctgccttacccggccgctccgccccgctcccttcctctctcctgcgacctagccccctgcccttttggtggactcctcctcaggggccctccggcgcgcgcgctcccgcccttgttttgtttggatttgggggaggagggggagctcttctctggccgtgcgaccctgcgtcccagcgcgcctgcgtcggcgtcctctgcccgccccgattggctgagggctgcgcatgctccgaggcccgccgcggtccggcgtccgcccgcgccctcccctcaccccactccctcagcggttttcggagccggttcgaaagatgccggcggcggtgactggctgcggcgggcccgccccccgggttctccgcccccgccgccgccattacggagctcccagtggtgagtgtgcggagcgccgaggctcgcgttccgccgctgcttccgtcgccggggcgggcgccgcggtgtccctgccgagcgtgagccccgaactgtcaccgcgccgagccccagcctcatccgtcggtgtccgcggtccgagctttccccgcctcgctggcggcccgcgctctcccccgccgtgcgcgttcgccgctgtggcctgtagctacctcgcctcgctgctttgtctccgctgctcttgccgtccttcccgcggccttctgcgggcggggctgtcggctgtcgctttgctgctccgcgacggcggccttgagtctcgctcccccggtgggaaacgtagaactggttactcgccaccttaggcggtggggtttgaatgagagcggtgcctcggtaggtcgtcagaaagttacagtcgcccatctgagcgtttgtaagagatggaggcaggagtggtgaggtgagagccccagatctgagggttggtactgcattaacagctgtgaccggggacagccacttaacctttttgagaaagagttgtctcccgtacggagaccggaccgggtgaactgtgctgccgcatccgcgtgcacgttctctctgttgtttattgtgcttcctgactttgcattgcattaaaaagtgagaatccaattcgaaataacgtctaaaaatcgcctggggctttttgagcacgctgtcttgtcttagagtgaaattagaggtgactagtgtcatttttgaaaggtgctctaattttgtttaacctgacataggcaaaaaacttgttagctttttgatttttcattgctcttctcaaaagtttagtgtaatttgtttcaaaatagaagtaacattttaaagtttgctgggttggttggttttggctttgtttttaagcttgcttggaagattgtagggctggaagttagtggagaacgtatactgaactcttcatttccggatgaaagttttaactccttacccagttagattgtgattttattgagatgagacactgtagtgtccttagtatctatgcccaaaacagacactgagtatatgtttgcttatataacttacatttgaaaatgaaaaacaagtggtgtcagcagtcaaattacaggcatgctttttgtgacatgactcgttaaatctgagtgtagtgaatgacttaagattgggaacaatgtgaggtgttcagcgcatcactaatgacatgtattacatatattttatggtaaaatgtgaaattatagtgctttccctaaaatgcatattatcaaggatatcagtaaactgaaatacgttgttaaactcctcacttttctacagccttctcttaatgtagaggaaataaattaaaactgaaatttggggctttttatttctacaatacttttttttattgcttgcattcaaataatttaaagccgtgcatggtggctcacacctgtaatcctaacactttgggaggccaaagaggaggatcgcttgaatccaggagttagagaccagcttgggcaaccctgtctctacagaaaatacaaaaactatccggctgtggtggcgcatacctgaagtcccagctactcaggtggctgaggtgggaggagatcgcttgagcccaggaggtcgaggctacagtgatccctggtcatgccactgtactccagactgagactctgtctcaaaataaacaaccgatttaatttaagcatttcccttgacaaaaagcaaatatttgttattgttgtaacattaagtttaagcaagctgatgttcataagaggaccatgtaaaccacaagtaaactcagactgtttatttttggcacatataaaaaccaagatgaaaaacatgaataggccgggcacggtggctcacgcctgtaatcccagccctttgggaggctgaggtgggcggatcacgaggtcaggagatcgagaccatcctggctaacacggtgaaaccccgtctctactgaaaatacaaaaaattagctgggtgtcgtggcggacgcctgtagtcccagctactcaggaggctgaggcaggagaatggcgtgaaccgggaggggaggttgcagtgagccgagatcgcgccaccgcactccagcctgggcgacagagcaagactcggtctcaaaaaaaaaaaaaaaaaaaagggaaaacacaaataagttttatttgttcatcctttagtttaacaaatattaattgagcatctattctgtgcctggtatgttcttaggcatcaggtatgcagcaaatgaaccaggtagataagatccctgccaggaacaagtgtggcagcctcaaaatttgatcattcagagtgcaatagtaaaaagtttagttaataggtacactgggtcagatgcagtggcttacacctgtaatcccaacacgttgagaggccgaggcagatggatcgcttgagcccaggagtttgtgaccagcctgggcaacatggcaaaaccctgttgatacaaaaaagagaaaaattagccgggcatggcggtgcgtgcctgtagtcccagctactagggagactaaggtgggagagtcgcttgagcctgggaggttgaggctgcagtgagctgtgatactacaacctgagcatcagagtgagaccgtgtcttaaaacaaacaaacaaaaaacataggtacagtgatgttaaggcagtgtgaattaacgttgcatatacttagctctgtaatgaacagtgagtttattaaatagccaattaacccaactattctaaagcaggtactacagattgaagctttgaagttctatgactttgacttttattaaggaaatgcagagctgaggctaacatctctttttttttttttttttttttttttgagacagagtctcacactgttacccaggctggagtgcagtggcatgatctcggctcactgcaacttcggattcccgggttcaagtgattctcctgcctgagcctcccgagtagctgggactaacccaactattctaaagaaagtactacagattgaacctttgaagttctacagcttttactaaggaaatgcagagctctaacatctctattttttttgttttttttttaaattgttgttgtttgttttttgagatggagtctcactcttcacccaggcttggagtgcagtggcatgatctcaggtcactgcaacctccgcctcccaggttcaagtgattcttctccctcagcctcctgagtagctgagactacaggtgtacaccacagcgcctggctaacttttgtgtttttagtagagatggggtttcaccatgttggccaggctggtctcggactcctgacctcaggtgatccctgcctcagcctaccaaagtgctgggattacaggcatgagccactgtacccagccctaacgtctcttaatatttatcccaaataactgggttttaagtgttcttcacacataatgaatgtagtcataagtactaccagatgtctttgttcattcaacttttattattattattattattattgagccaaggtcttactctgtcacccagactggagtgccgtggtgcaattctagctcactgtagcctggaactcctggacactggcagtcctcccatctcagtcttccaagtagctgggactacgggcatgtgccacagtgaccagctaattttttatcttttgtgtgtgtgggttttttctttctttttttttttttttttttcttttttttgagaaggagtcttgctctgtcgcccaggctggagtgcagtggcacaatctcggctcactgcaatctccgcctcccaggttcaagtgattcttctgcctcagcctcccaagtatctgggattacaggcgcgcaccaccacacccggctaatttttgtatttttagtagagacggggtttcaccatactggccaggctggtctcgaactcctgaccttgtgatctatccgcctcggcctcccaaagtgctgagatacaggcgtgagccaccatgcctggcccttttgtgtttttttttaaattattatttttttttcttgaggcaggctctgctctgtcacctaggctggaatgcagtggctcgatttcaggttactgcatccaaaaccttctgggctcaagcagtcctcccagtctcagcttcccaagtagctgggactacaggcgcatgccaccattcccagctgatttttaattttttttttttagagacaacgtctgtattgcccaggctggtcttgaactcctgggctcgagtgaacctcctaccttagcctcccaaagtgctgggattacaggtgtgagccaccacacctggcctgtttttaaattttaatttatttacttttggtaaagaccaagtctaatgttgactaggctagttttgaatttctagcttcaagggatcctcccacctctgcctcccaaagtgctggggttgcaggcatgagctactacaccaaatgggaaagtatttttttaaagatgcctatgaacggagactcctgaaggttgttgacttcacggtagcattttcagcctagctagtgttatcgtgggttaagaaagataaattcattagcaatataactttactaaggataacctgattgtgatattgttttatttccatatcatatttgcatgtaaaaataccagcagatttgcataaggctttttatcattaagaaaaatgggccgggtgcggtgggtcacgcctgccatcccagcactttgggaggctgaggcgggcagatcatctgagatcaggagctcgagaccagcctgaccaacatggtgaaaccccatctctactaaaaatacaaaattagctgggcatggtggcgcatgcctgtaatcccagctactcaggaaggtgaggcaggagaatcgcttgaaccaaggaggcggaggttgcagcgagctgagatcgtgccaccgcactccagcctgggcaacagagcaagactccgtctcaaaaaaagaaaaaaaaaatttaatattaatggatattctggttccctaagtatgagtgtgttacactgcactgaattctttcagctgactgaaagatttccttgcagctgactgacaattgacaagtctggtattgttcttggtgttcccataaaaatattttcccgataagtgtgaatgcatcctctttgtttcaatcttccggatttatcctagttgttgtaggttgggactgttacttgccaagttgaaagctcttcaattcttagacaaggttagaccttaatgtagaagttgcatgactgtcattccctactcattgttaatagttcattagcacagagatctagatacttaagtggtcttttttttttatattgaggaatttttgtataaaatgtcattgagtctcagatgagatttttggggaagagggggtgttagtgatcaggtaaacttgggtgactgcatgggtttttatctttgaatatttaattatattcttctgtactagttttccttacattaaaaatatgacagtcttagaagcatacttttattctcctaggtgatggtctaaatttgcttctgtgggtctggaagctattagaatgtcatgttattcagcagtatttttccccttgtgttttcccttaatagaaggaaaaaaaaagtactttaatagagatagagtttaagattacagttaattttcctgactctttcgagaacagtaacaacaaaagccttctcttggtaaactgatctttgactaactgttccttagtctctttattctatccttctaagttcctgatggtggcaggaggggatggggttaggttccttaggagcttccttgcccttgttgtctttgttcatgtggaaggtgcaacagctgccgtggcttatgcattcgtcttagttgctgctttatgtagtctatattttggtagttttatctttctgagtaaccaaatcatctgtcacttacctataaattttatagttatattttttccctttggatgtgtattaaatttagacgttttagtttagttttgtttctgttaatcttcacaccaggtcttttctgtgctttaggttgattcttcaccacactgaaaccattaggaaaaatccttgtggttaacagcagaggcttcagagtgtaacctgtactcgggcctagaaattatttaaaatggcgactgatacgtctcaaggtgaactcgtccatcctaaggcactcccacttatagtaggagctcagctgatccacgcggacaagttaggtgaggtaggggctgacacattcttgaagctcactcttggatcaatccctgacttcaggccctgctgggtccttcttggtacatgttccttcccttactttggggagtctaggttgtgaatttgaaacaaaatcagattcttttcatcttccctttcccctcaaattcctgagaaaacctccaaccttctaaatttatagcaaatcaactataattatgtgtttccatttgaaattcaagctaaaataacatactttaaaaagtgtatcttaaaaatcatatttcacttcaaaaaaaacttgttaaaagtaatttgcatcagatcctggagtcgacttgaagaattctcctacatctgacacccagttaggccctttgagaaagagagaaaagagaattttttaatgcatgtttgattatggccatctcttttcttagaaggtagaagatagcaccatgccgattcgtcgaactgtgaattctacccgggaaactcctcccaaaagcaagcttgctgaaggggaggaagaaaagccaggtaaagtaaaatggtgacacagcttaaaacatcaaaagttatactgcaatttggagtgtcccataaattcctttgaacttaattgtttttttttttttttcatggctaagtgttttggggaaacatttagagagaatcagtagctattggtatgtcattgccagaccatgagggcaaagtaaggtttcatcttctctataaaggtttttggaaggtgaaaatgttatgttggaattaaaaacaaaaatgtttggggatgacaggaatggccagagagtagcattctggacataaagtgtcatggggatcagtgcagtgtgggagaatggaaaacgtgggcctttagaatagacagtggaaggttcatccagaaatcatctggaggccttcagagaagcaaatggtgatctgttgatctataacaggtattggtagagagaagattggccagtcagtggtgggagcataacaaatggaaagaaacatagacccatcaacatggagtactaatgctcctttatggcatgtataaccacctcttctccttttcccgtctttatttttcttctcatgatctttttggtttttttccttatcttttcccttttttcctttctctcttgccttttatctcaggtttttcagggataagcacactgtgctgcctctgttgtggctgttagaatcaattatttgctgaccagcatgtattaggaatagagggccgggcacagtggctcacacctgtaatcccagcactttgggaggccaaggagggcagatcacctgaggtcaggagttcgagaccagcctggccatcatggtgaaaccccatctctactaaaattataaacattatctgggcatggtggtgcatgcctgtaatccctgctactcaggaggctgaggcacaagaattgcttgagcccaggaggcagaggttgcagtgagctgagatcacgccattgtattccagcctgggcaacagagggaaactgtctccaaaaaaaagaaaaaaaaaaaaaagaggagtagaaaatacatgcatccttggtgcatcagggcagacatcaataaccagtcaatatactcttttctggctgagcctggattttttctctaaatccttagatgaatgctataagcaatttgggcaccctggcctaaggcagttaagaaacacgggaatccaaatatttaaaaaagtaaacgggtgctggtaagttgaagataggttatcttgtccagcactgggataagccacttggtggtccatcttaatccatgtttaacagccagctgaagccactaaatcactaataacatcagttttcagaatatatgccagagggttcagatgtaaagtattagaaaactcaaccagaagtttatgaagaaacagtgtcacttcacaagttgtatgtttgtttaatcttctctctatcccattttgtacacagtattttgtacatagaaattagacttcacttattttaaattttgtaaactctatgttttacacagaaacacagtagtttaatgagttggaaacagtcttatacataatacatattcaatatctgttgagtgactgaactttattaagccataactcttgagcagttattcttgagaagagaaaataatgtaaatttataagtcttactaccgtaaaacccctgaatgattcttagcttttcatcttttttagaataagacaaagtgtaaataaacatgactaactaatagtaaattcttgcccatgcagccatttaggtcaaattgttgggttgaggggcagtaaaagatatatcatgatgaaaaatacattttattgtggaaaacctaaatgtagttattatctttatccccagataccattgttatagtgaagttctatccataatactttgtcatcctaagcatatgggaaacaattctagaagcagagaattccaaaggaggatggaaatcactcgcttagtataagtgttagaattgtacttatgtgatttggttttaagaaagaagtggcattttaaaattctctttatagctgggcgcggtggctcacgcctgtaatcccagaattttgggaggctgaggcgggtggatcacgaggtcaggagatcgagaccatcctggctaacacaatgaaaccctgtcactactaaaaatacaaaaaatcagctgggcatggcggcacgcacctgtagtcccagctactagggaggctgaggcaggagaatcgcttgaacctggggaggtggaagttgcagtgagccaagattgcgccacagcactctagcctgggagacagagcgagactccgtctcaaaaaaaaaataaataaataaataaaattctctttatgggaaggccacaaagaagtcctcgtcattattgcaataattagttcacataatttaaatgatcaaattcttcaagcatatactttggcttgaagtatatgcttgccactggagtcctttttctttcatgttttttttattttttttatttttatttttttttggagttctctgaagtccctgcataaccagtgcctggggttctgtgttttatagtagctactcagagacatgctgtgaaggaaaggcacaaatagcagcagacctccatgttcccctcatatttctactcttgcttcagtcattcctcttggagaatacatgagtttttaaattacttattctctgagatttgcctgttgaattataaaatggctagtttcttaattatgagtctcatgaatattgcaaagtagaataattaaacaattggggatgaaatgagttttcctttctatgtaatttcctggtctatttttctaataatagataaataaccacctgaccaggaaacttgagtgacataaagaatgtaagaaaactgcattagtggtcattcattttcattttagaattcatttgttaattggagactttggctggtccgtttaataagataagcttttaccttttattgactcagattggaatacatctgcttatgcaattctgctcacctgattttttagaaccagacataagttcagaggaatctgtctccactgtagaagaacaagagaatgaaactccacctgctacttcgagtgaggcagagcagccaaagggggaacctgagaatgaagagaaggaagaaaataagtcttctgaggaaaccaaaaaggagtaaggagttatgtcttcttgctatttatatttgaagaatgtgtaaaaggactttagattagattgttttaaagtgttataacattggtttatgctaggtatttgctatttggatttaatttttagaattaccatttgaaataggtttattatatagttgtttgacctgttagaatatgctgtagttagcagaacacaatggtttgaataatccaaaagtctttgtcattggctttggaatgtgtttttgagcttgtaatttattgtgggagtatctgatattttaagcattggcaagacttcaataagaaatgaaacataactataaaaatctgacctagaagacatttcactattttattcctacttctgtgccaggagtgggttgtttttgtgtgcttatgttagaaggcattgatttgtatcaagccattggtagtgtgacctaaaagtctatatatgtttgatgaaatattcagttgaagaattggctttgagaatctgaaagtaaaatttgctattgatgtgtatctatataaagtgatggcagttactttttaatttttaatttttttttttttttttttgcaggagagctgatagtattcattccactcttttcataattggtcagaacagttagaaattgcttttaactatagtcatgcattgcttaacaatgggtatacattctgagagatacatctttaggcgatttcatcatcgtgccaacatcataaagtgtacttacacaaacctacgtggtacagcctactacatacctaggctttatgggatagtctgttgcttctaggctacaaacctgtacagcatgttactgtactaaatactgtaggcagttataacacaacggtaagtatttgtgtatttaaacatagaaaaggtacagtaaaaatataatataaaagataaaaaatggtatacctgtgtaggacacctaccatgaatggaccttaaaggattggaagttgtttgggtgagtgagtgagtggtaagtgaatgcaaaggcctaggactactgtgtgcaacttttaaaactaaaaagtttttatttttagcaacttttaaaactaaaaagtttttatttttaaaaacttttaaaactttaccaaaaacaaagacacaagccggacgcaatggtgcacagctgtagccctagctacttaggaagctgaggtggggggattgcttgagtcctgaaatttgaatctagattgggcaacgttgtgagacctcatatttataaaaaaacaaaactaagacacatacacacaccttaacctaggcctgcacaaggtcagggtcatcaatatcactgtcttccacctccagatcttgtcccactcaaggccttcaggggcagcaacacacatggacctgtcatttcctatgataacagtgctgtcttttggaataccttctgaaggacctgcttgaggctgttttacagttaactttttttttgtaggtagaaaacatatactctaatgataaaaagtatagtatagtaaacacataaactagtagcatagctgtttattatcaggtattatgtataattgtaatgtgctttttttttttttttgagatggagtcttactctgtcacccaggttggagtgtggagtgcagtggcgcgatctgggctcactgcaacctccacctcccaggttcaagcgattctcctgcctcaacctgccaagtagctgggactacaggcgtgcacctccacacctagctaatttttgtattttcaggagagacgggggtttcaccatgttggccaggatggtctcaatcttttgaccttgtgatccgcccaccttggcctcccaaagtgctgggattacaggcatgagtcaccgcgcccagccaatatgctatatttttgtatgactggcagcactgtaggtttgtttacaccaatgtcaccacaaacaagtgagtaacgtgctgcgctgtgatattaccacagctatcatgttaaccaggtaataggaggttttcagttccattataatcttaagggaccaccattgtatatgtggtctgttgaccaaatattgttacacagcacatgaccataaaagaataacttagtaataactataccttctagctataatcttcagggtattctttatctgagtttcataagtatagctaaggtctgtggaatttatagcaactatcgtgtgtgggtgtgggtgtgtttgtgtgtgtgtgtgtgtgtttaatggagatggcgtctcactatgttggctaggttgggcttgaactcctggcctcaagctgtcctccctcctcagcctcctaaattgctgggattacaggcatgagccactgcacccagcctatcgtctgttgttaaatgttctaatgcacctattaggtgcacagagtactgttatatactcagaataaaatttacataatgctttaaatctcacaaaattgttttgataaacatactcttataattcttgcaacaccttgggaaatagttggttctatattactgttttatagctgaggagaaagactcacatcatttactaagatcatatagctagctagtaaatgtttgagtgaaaatacaaacaaaggttttctgactttaagagcttgagttttttccactataccatattgcatctgttgtaattgttaactaatgtgcattttaaaattctcatttgtcttatgtactgagcccttataccagtgctaatttatgtgactcctttctcctgcagctaagagaaaaatacctttttaattcatttatagtacccagtttttaaagaagatttattttgtaaaattttgcttatggtacatgtcatcttagcctgtaaataaattaaagcattaatttttatccctccctggtcttttcctccttctgactttatacgtctttctagagagcttatcttctataataacaattctttgttttaaagtgagaaagatcagtctaaagaaaaggagaagaaagtgaaaaaaacaattccttcctgggctaccctttctgccagccagctagccagggcccagaaacaaacaccgatggcttcttccccacgtcccaagatggatgcaatcttaactgaggccattaaggcaagtttttatttcaagcaattcatcttagatttattatgttcatttttttcttatttgaaaatggcatatatctgtctagacatcataaatcttgttctgcttcctaaaggagttttaaagagaggaaagtcattataagttcatgtttttctaatataatcacatttggtgaacactgttaatttttttaaaaaaattatatttaatatagcaaatattttaactttagaatttttaaatgcagtttatcgattaagtacagtttttatttgaaggctgaaaatgttaattcattgaacaaacatttaaggactaccttcctctgttgggcgcccctgctagtggtgaattaactaaggctagcaaagtccttgcccttataaatctaattgtgactcagtaactgaaaaatattgagaatttttgtttaaaaaatatctctaggttcatttctaaagctaagtgatcttggtagtggttatctttcacacctgaaccctgttaataaacactgctttattacctagacattccaaaatgcttacaaaaattatcctccttacatagatttatgatttcattgactttcattagatgtagttttcctattttaatttttaaaggttatcttctaatttgacattgcctttattgtataagtcttttcatttaattttgccttgtttagttcatatgatcagatgataagaggagttagaacagacccatctttcagggaccctgttgttaggatctgaggcaggactggggagacagggatacagatgattttaaccagaaaaggggggatgtgtacgaaaaggagcagcctggttgtcattctcagaatatgagaagatagcactaacacataaactggaaaaagggtttgccttcagacttctccctttactccttcaagacttcttatgctctcacctcattaagaaaactttattggtctagattacctcactgtagtgaaatctctgttctttgtatagcctttcttcaaggatttcacttgatgaccactcagcctgggtttgaaggagcagcatcatagtgaggatggaaaaagggctgaaactttaaaatagtgaaataaaaaattaaaacaatatcaatttggcttaaagaatggtttgaatataattgtgcatatttatggagatgattgattttatatagataatgtgtattccatgcaatatgacaaattattgtttcagaccatggataccattttctgtattgaacaggaatcatgatgtctactaccatctcactgtcggattggtggagcaaaagattatttgtttcagcattagtgttcttttctgcttgattttctttgctctgtgttttcttttaagatcaggagtaaacctcagtaggtcattaatagttcagagacatagacttgaattacatgacccatattaatacaacttgtttcgtgttgtgcaatcttttctggaccatctacctgtgagttatttttctttgttgtcaaaatgtataaaaacattcaacgaagttcttatccaatgagaatgaataagtgctacattgatttaatagacactgtggcagtacaaaattgatggactagctcattagataaatgacagatgctacttttgtgtgtttcaaaatttaaagtatttgatttcaagtcagtgaccagttggaaaacaaaattttaagcatttgaaaaaaattaagtatttgctgcctttgtgacataatgagctacttaattcttccaggtgcattagtcaaatggagtataagtaaaataggatggaaatggaagagggcacattaaattcaaatagaacaccttcactattacccaaaactctccttcagcactttgccatctgtaaacccatttttatgccacttattcagattatctttgattcttctttctgctgacattcatacagagccttcagggaaatgtcctggcatgctcattccttaagctcgtgccttaaaatgggacagatctgtgatcctgtaagtgataggtttgttctgcttttctcattttgatgccaaagattcatcttctaaatacagaatggaattaaaatggaaagaggttcttcattatacatagaatgttgttcgtgttcagtatggtctcttaggctgttttgaacaatttaaaattgtagtagaaatatttagtaattctgttacttctctgtagtcattatgaactgaagtcttctgaagttcattcttccctaccgtttttgtcatctatcatcaaattcacttccaaaataatttattttgaaaatatatgtcaggctctatctaataaaaaaaaacaactagtttaataaatcttttctaggcatgcttccagaagagtggtgcatcagtggttgctattcgaaaatacatcatccataagtatccttctctggagctggagagaaggggttatctccttaaacaagcactgaaaagagaattaaatagaggagtcatcaaacaggtattacacaattgttagtagtaagatcatttcattgtgtattagctttaagtctacagttagtaacatttaggctttttgtgccttttttgttaaaaataagtttcatgatgatgaaattccttaagtttaacctagttgaattatctgaggctaggtttcgaaaatgctggtgccattaagatagtgtaacttttttctagcttactttgctcttaattggatattttttggggggctgcttgtgcttgaaatcatgtagcactgaacatgaaaaagaggtaaggaatcctactactgaaacagcaaaaatgaggctagggatggtggcctacacctgtagtcccagcaccttgggaggcttagttgggaggatcacttgagcccaggagttcgagaccagcctgggcaacatagcaagaccccttctctacaaaaaatacaaaatcagcagggtttggtgacacatgcctctagtcccaggtacttggaaggcagaggcaggaggaccgcttgagcctgggaggttgaggctattgtgagttacgatctcaccactccagcctcggtgagagtgagaccctgtctgaaaacaaaaaggaataacagaaataataattgcccttgtcttaggtttgtttcctttaaagcctaacttacatgatagacttgttactattaatttttagcttcataaatgtgctcaccttaactgattagtatctaaactattaaagcctgttaagagtatcagagaaacccgagtgaaatgtgactagtactagaacaaatgttgatttcaggcataaatctactttatcttgcatagtgcatggaaacttagaaccatagaaatctaaagctagaataaactttatattatgttaccctcttcagaggtccagagtgatgaaataactgctaaggtcttacggtagtggcaaaaattttaaaaacctagttcaccccattcctagagtcttgttaagttttttctataccccctgcctgtttgatcagaacagaattctgtgccactcaggcatttcagctctgcttagggacttccaactagtacttaattgcacagatacgtcttgtctcctatgtgccagttgcctggaggtctgttagtgaataaaacagattgctgctctgtggagctaggagtccagctttctcaaaatgtaaaactgatatttaaatggcctttaaaattatcactgacggccaggcacagtggctcatacctgtacgctgaggtgggagggttgcttcaggccaggagtttgagaccagcctgggcaacatagcaaggtgaggccctgtctctacaaaaaaattatttctttattctattttattttactttttgagacaggatctcactctggcccaggctggggtgcagaggtgcaatgtcagctcaccgcactctctacctgctgggctccagccgtcttcccacctcagcctcccgagtacctgggactataggtgtgcaccagcacacccagctaatttttgtattctttgtagagacaaggttttgccatgttgcccaggctggtctcaagctcctgggcccaagtgattcacccacctcagcctcccaaagtgctgggattacagacgtgagccaccatgcccagcctttacaaaaaacttaaaaattagccaaatgtaggggtgcatgcctctagtcccaactcatgaggctgaggcaggaggatcgcttgagttgagctatgagctaacatagcaatgagctatgattgtgccactgcactccagcatgggtgacagagtgagaccctgtctctaaaataaaacaaaattatcgttgactaaaaagtcttacctagttaatataattattagagccaaggacctgttgtgtaacatgtcagcaaagcttatgagatggcttcatgttttagtttatgacctgctctagcctacatagcctgaccacccttggtttgatgcctaaacaactcttagtaggctaaaagcattccagcttgattgctgcattgatagcagtgtaggtaaaactaagctgtggaggactttagttattgtgaatcaactttttttttgagatggagtctcgctctgttacacaatggcatggtctcagctcactacaccctctgcctcccgtgttcaagcaattctcctgccttagtctcctgagtagctgggattacaggcgcccgctaccacacccagctaatttttgtatttttagtggagatggggttttaccacattggccaggctggtttcaaactcttgacctcaagtgatctgcccacctcggccttccaaaatgctgggattataggaatgaaccaccgtgcctggcctattgtgaatcaactttaaaattttatgaaagtgctttgtgaactggaaatatgtggtaaaacttaacataccattgtgtgcagtggctaaaaaattgtttgtttgttttttgagacggagtatcgctctgtcacccaggttggagtggagtggagcgatctcagctcactgcaagctctgcctcctgggttcacgccattctcctgcctcagcctcccgaatagctgggactacaggcacccgccaccacgcccggctaattttttgtatttttagtagagacggggtttcactgtgttagccaggatggtgtcgatctcctgacctcgtgattcgcccgcctcggcctcccaaagtgctgggattacaggcatgagccaccgcgcccagccaaaaaattgttggataacccttcccataaggaataatgtatcattggtaaactgtgggaagttacgtggtctgagactaattaggctctaaactttttccaaggtgcttttaagacagtgagggcttttcttatttccctaagagattgtgtcccttccttttttgggacatttttgttttgattttttatttcattttgaaagtttttaataaactgtttaacgtggtatcacagtagcattcttcccaaaattttgtagatgagaaaacaaaagctcagagggttaactgggttgtccagtattactcagcatcagctagatggtatataaaggagctttcatctgaagtcttttgactctgcattgactgtttttttttttttctctgaagaagtaaacaccactttacattagctcttgcattaccatggcctgtaatttccttagcctactgtaaagttatgaatactagaataacaaaaattaatttactttaggttaaaggaaaaggtgcttctggaagttttgttgtggttcagaaatcaagaaaaacacctcagaaatccagaaacagaaaggtaagacatctataccacagtttgagtgctgtggagctgttactgctactaaaaatagcaacattcattgagtgtttgctgtgtgcctggcactatgcaaggttcagcctttctgctaaggcctagggaagttataaataatttgttcctctagtgagtagaatagccaaggtgcagatccaagcagtccaacctggttaagcctgtgctcttaagtgccttatattaaattatgggcagctatataaattacactgttttttgttttgagatggagtcttgctctgttgcccatgctgtagtgcagtgacatgatctcagctagctgcaacctccgcctcctggattcaagcaattctcctgcctcagcctcctgagtagctgggattacaggcactcgccacagtgcctgactaattttttttgttagtagagacagggttttaccgtgttggccaggctggtcttgaactcttgacctcagtgatctgcccgcctctgcctcccaaagtgctgggatttacagggtgagccattgctcccagctgaattatactgctttttgtgaaatatcttttaaactagaggaggtataagagtcctctgtttttttgtttgtttgtttgtttgttttcttttctaagatagaatcttgctctattgcccgggctggagtgcagtggcacgatcttggctcactgcaacctctgcttcccggattcaagtgcttgtcctgcctcagcctccccagtagctgggactgctacaggcatgtgccaccgttcccagctaatgtttgtatttttagtagagatggagtttcactatgttggccaggctggcctccacctcctgacctcaggtgatctgcctgcctccgcctcccaacgtgctgggatgatagatgtgaaccacaccatgcccagcctaaaagtacatttttaccaaatactagacccaaaaacaatacccagatccaatttttcttcctgtttttgtaaatactaacattcttcttcccaacacatataatttcatttgtgtaaagtatttctacaataataaagtgaaatgtcttgtactcatttatatcagaaattgaaataatatttttctacaccttttttttttgttttacaactctgaagctttttatccttttttcatagacttttcaaacactttcaaaatgaactttatgcatttttttctggtgctgtacttcataaattaggacctttaaaatctacactcctttttacttttatgtgtgttttttgtgtgtgtgttttgagacggagtttcgctcttgttgctcaggctggagtgcaataatgcaatctcggatctctgcaacctccgccttccgggttcaagtgattctcctgcctcagcctcctgagtaaatgagattgcaggtgcatgccaccatgcctggctaattatgtatttttattagagacagagttttaccatgttggtcaggctggtctcaaacttgagacctcaggttatcagcccacctcagccccccaaagtgctgggattacagacgtgagccaccacacctggctcctttttcttgttttgttgtgttttttttgtttttttttttttttgagacggagtctcgttctgtcacccaggctggagtgcggtggctccatcttgcatcactgcaatctccacctcccgggttcaagcagttcttgtgcctcagccttccaagtatctgggattacaggctacgacgtctggctaatttttgtatttttagtagagaggaggttttgcaatgttggccaggctggtctttaactcctgacctcaggtgatctgcccacctcggcctcccaaagtgctgggattacaggtgtgagccaccacacccagcttttatatgtatttttaatgctgtccattgaaaattttatatcaaagaaattgccataaaattgacaaatttggtaatcaactgaggaaagcccttgagttgtatgtagaaacatttacgttctataatgatcataatttttgataattacttttcagaataggagctctgcagtggatccagaaccacaagtaaaattggaggatgtcctcccactggcctttactcgcctttgtgaacctaaagaagcttcctacagtctcatcaggaaatatgtgtctcagtattatcctaagcttagagtggacatcaggtatgagccattggcctggcctttaaaacatgatgtgttacttcctttagctcccttttcatgggaaaagagatagattaaatactgaggaaggattactttcagctaaaaataaatcttttttattggttttatttttttgccccattatgtttttattttcatatctccatgtataattttttttttttttttttttttagttttttgagacagatttgttcttgtcacccaggctggagtgcagtggcaccatctcaactcactgcagcctctgcctcccgggttcaaaggattctcctgcctccgcctcccgggtagctgcgcctacaggcacccgccacgacacccagctaatttttgtatttttagtagagccaaggtttcatcatgttggccaggctggtctcgaactcttgaactcaagtgatccacctgcctcggcctcccaaagtgctaggattacaggcgtgagccgctgtggccagcctttttttttttgagatgaagtcttgctcttgttacccaggctggagtgcaatagcgcagtctcagctcactgcagcctctaactcccgggttcaagcgattttcctgccacagcctccgaatagctgggattacaggccccggttaccgtgcctggcctagttttgttttttgtgtggtttttttttttttttttccaaacccaaatcttatctttctttgtaagatcctggtagagtaactcttttaaatgttgtcagctgttaagatatgtagtattgaactgtgtatcttctcagatatgaaatatcttaacagttgacaacattaaaagagttactctaccaggtttaaaagaaaaaaaacaaaaaaaaaactaggctggctgtggtggtgggcatgtgcagtctcagctactcaggaggctgaggcaggagaatcgcttgaacccaggaggtggagttcgcagtgagccgagattgcgccattgcactccagcctgggcaccaagagcaaaactccgtctcaaaaaaaaaaccataagagtaaaaaggagtgtagactttaagggtcctaatttattcttagcctttaataactaaataatgaagtacagcaccagaaagtaatacataaagttcattttgaaaatgtttgaaaagtctgtgaaaaaaaggatagaaagcttcagggttgtaagaaaaaaaagtgtagaaaatactatttcaatttctgatataaatgagtacaagacatttcattttattatagaaatactttacacaaatgaaattatatgtgttgggaagaagaatgttagtatttacaaaaacaggaagaaaaattgcatctgggtatagtttttgagtctagtattgggttaaaatgtacttttaggctgggcacggtggctcacgcctgtaatcctagcactccagcctgggtgacagagtgagactcagtctcaaaaaacatatatatgatagatatatgcatacatatgtacatacatatacatcatatatatatttcatgagaattcaggcttcaataacacctgtacatagaaatagcataatgtttccatcatttaaacatgcagcataaaattctgagataattttgttagtaattgatacgtaaaatttgccatttaacgtcttgacagatcatttagattgtcacatttgctcagttgtagattcatgcagatatatcaatttgtttaaatttgtaattcacagactctgagagtgtttgtgtgagatgacttctagaaaattatgtttaatccagatttctgtctacagaagactaccatattgaatgcacattgtcccgatacagtgtagtaccagtatttacttgcattactgaggcatgcaattagaagtgctgaggtttcagtccagaagccacattttcagaaaatcagtagtggtcatcagaatgccaaattaaagagctagtgaaatagtgcaaaagaaaagggaattatagaagcagaaagttctaaattaatgtgctgatattttcatgcttcttatatgctgagtatagtggtagtaggcagacacaattgtggatcaaaaatgcgttatatgatgcatttaaagatggaaacatatttcactattctttaacaaagaataaagtttatttggctcatggtactgcaggctgtacaagaagcatagtgcaggcgtctgcttctagtgagggcttcaggaaacttacaatcatggtggaaggaggagctatcgtatcacatggcaaaaaagggagcaagagaggagggaaaggtgccacactcttaaccagatctcacactcttaaaacaaccagttgttttaaacaacccgctcattacggccaggaaggcacgaagccattcacgaagccatccctataactcagacacctcccactaggccccacctgcaacactggggatcatatttcacttttatctcctttgtgtgaccccaaaatatctgagacaggtctcagtcaatttagaaagtttattttgccaaggttaagattgtgcccgtgacacagcctcaggaggttctgaaaacttgtgcccagggtggtctgggcacagcttggttttacacattttagggaaacatgagacattaatatatgtaaggtgtatgttggtttggtctggaaaggtgggacaactcaaatcagggagggggcttctaggtcataggtaaataaaagacaaagaatttcattatttttgagtttctgattagctttttcaaaggaggcaatcagatatgcatttatctcagcagatgaatgacttgaagttctgtctgtcgtttgtctgcaaggattttccttgtgattaggggattcgtgattagggtttgtgattaggggatcccaagatttattttcttttcacagcctttattctctgctttttggtgagtggagaccatatcttcccccatttttttttcttgtagttctactctacttacataaggtagtgtgttgctaccagtgtgcctttgctgcacttcttttgaaacatattgtcatgaccttaggctgaaacaaaatttacctgataatggatgggttgtcaacccaaaggtgctaatgaacctgaagaccttttctcatggcctttttaatggtaattttttccattgaaacttttttctcttatgtgaaaccatattgattttctctaattcttgattataatggagtcctttcatatacacatttaacttgaaaattcagccattcttgcttggccaaacaaaagaggaagaaaaatacagtttcaccaaagtgtaagttgtctatactggtatctacaatgtctccccttccactttctccactttagtcagactttatccccaccactttacctgaatattttctgtcagtctccacgttggaaatttcagtggtcaattcatagtccttaccagctgccctctcaatggcatttgacacagttgatgactcctacctgcttgaaacattttcttcacttgccttccaggacaccacactttcctgatttttctgtaacctttttacccttcgtttctcaatctcctaaggatttctgctttacctcttaatagaaaggagccctcagggttataccttaggcctctcatcttttatgtccacattcacttggtgattcctttcacttgcaaaactgtaaataccagctataaactattaattcacaaatgtatgaatctagcccatacctcccttctaacttcagattcgtgtatacggatgcctgttcagcatcagcacttggatgtctgatttaaatgttgaaaacatttaatgatccccactctgctccctctccccccaaaaatccctgcatttcccacattatcttcatttcagttcatgacaatattatccttccatgtgctgaaaccaaaaaccctgactttgtgctggtctcttctctttatcagacacctttatctaatctataagcaattatttttgctctgtctttaaaatatatcagtaaacaggctgggtactgtggctcatgcctgtaatcccagcactttgggaggcaggtggatcacatgaggtcaggagttcgagaccagcctggccaacatggtgaaaccccatctctactaaaaatacaaaaaaattagccatgcatggtggcacgtgcctgtagttccagctactcaagaggccaaggcaagagaatcacttaaacctgggaggcatagtctgcagtgagccaagatcacaccactgcactccagcctgggcgacagagtgaggctccgtctccaaataaataaataaaataaaatatatcagtaaacagactacttgtcatcacctgcactaccattctcttccaggccaccatcatctctcacctgtattagagcaataacttcttaactgcttttttcatgctccctttcagtatgttcttaccatcatagtgagagtgagacttttttaaaaatgtaagttctatcactttttaaaatttatttatttatttatttgagaaggaatcttgttctgttgcccaggctggagtgcagtggcatgatctcggctcactgcaacctccgcctcctcggttcaagcgattttcctgtctcagcctcccgagtagctgggattacaggctgtgccaccacacccgggtaatttttgtatttttagtagagacagagtttcaccatgttggccaggctggtctcaaattcctggcctccagtgatctgaccgccttggcctaccaaaggattacagacgtgagccactgtgcccagcctgtcacttttttttttttccaagctggggtcttgctctgttgcccagactggagtatagtggcaagatcgtggctcatggcaacctcgaactcctaggctcaaacgatcctcccactgtggcctcaaaagtagctgggactgcaggaatgtgtcaccacacacagctagtagtttttaaattgttaatagagacagaatctccctacattgcccagactggtctttaactcctggcctcaagtgatcctcctgcttcggccacccaggtgttgggattacaggtgtgagccactgtgtccagtgtcatgtcgcctttctactcaaacattcagtgtcttcccaatcccgtcacagttaaaaaatcagtctgtagggctgggtgtggtggctcacgtctgtaatcccagcactttgggagtctgaggcgggtggatcacaaggtcaagagttggagaccttcctggccaacatggtgaaaccccatctctactaagcatacaaaaattagccgggcatggtggcacatgcctgtaatcccagctactcaggaggctgaggcaggagaattgcttgaacccaggaggcagaggttgcagtgagccgagattgtgccactgcactccagcctgggcgacagagcaagactctgtctcggggcaaaaaaaaaaaaaaaaaaaaatcggtctttaaaatggcccacaaggcactacactcacttgtatctctgacctaagctactcctcttcactctctcactggtctcagagcctttgtgttgcattccctttacctgaatgtatttttccccataagccactttgccagttcctttacttccttaagtttttagtctgatgtcatcaccaaaggcctgccttgactatttttattattcttgttacttgggcatataaacaagagaaatgtatttctcacagttgtgcagactcgaagtctgagatcagggtgccagcatggttgggttctgtgagggcctcttctgggtgtcagagtgccttcttctcattgtatcctcacatgacagaaggagcccttaatactttcttaaatgttttattttggaaattttcaaacatatacaaagaaggatagagaacattaaccatcatacttaaatcattcttttttttgtttggagacagagttttgctcttgttgcccaggctggagtgcaatggcacgatcttggctcaccgcaacctccgtctcctgggttcaagcaattcttctgcctcatcagcctcccaagtagctgggattacaggcatgcgccaccacacctgactaattttgtatttttagtacaaatggggtttctccatgttggtcaagctggtgtcaaactcccaacctcaggtgatctgccggcctcggccccccagagttctgggattacaggtgtgagccacctcgcccggccacttaaatcattcttaacaaaattaataatttcttagtattatctagtacccagtccatgttcaaatgtccttaattgtctccagaatgatattttacagttgtttttcctaacatggcccacacgttgtatttggttgataatgaccaaccaaaacctctctcccagccaggtgctgcggttcacatgtgtaatcccagcactttgggaggccgaagcgggaggatcgcttgaacctacaagttcgagaccaggctgggcaacatagtggaaccccctctgtacaaaaaaaaaataacaaaaattagctggtgtagtggcatgtgcctatagtcccaactactcgggaggctgaagcagcggaagggttgcttgagcctgggagatcaaggctacagtgagccatggtcataccactgcactccatccagagtgacacagtgagatcctctctcagaaaaaaaaaaaaaaaaggccaggtgtggtggctcacacctgtaatcccagcactttgggaggctgaggcgggcagatcatgaggtcggaagatcaagaccatccttgctaacacagtgaaaccccgtctttactaaaagtacaaaaaattagccgggcgtggtggcacgcgcctgtagtcccagctacttaggaggctgaggcaggagaatcacttgaacctgagggggcggaggttgcagtgacctgagatcgcgccactgcactccagcctgggtgacagagggagaatgcgtctcaaaaaaaaaaaggagtgtttaacccatagggtttaagtctcttagtatgtgcgaagcacttcttagaatagtccttggtacctagtaaatgttcaactaatgttattcttactagtctcagttccagcttctcatagtatgaccattacagcatgctaaataggattctaatatttaaagacataatttttttgttttgttttttattttttatttttgagacagagtcttgctccgttgcctaggttggattgcaatggcatggtctcagctcactgcaacctccgcctcccgggttcaaatgattctcctgcttcagcctcctgagtagctgggactacagttgcctgacaccacgccccgttaatttttttgtatttttagtagagctgaggtttcactatgttggccaggctggtctcgaactcctgatctcgtgatccacccgcctcggcctcccaaagtattgggattacaagcgtgagccaccgcgcctggccaagacattggtttttaatataacatgcaagtcaccttcttaatttgataacagtgatttttttgcaaccctagaagaagaactgggcatattgggtatatagagactcagagttggccttgaagaaggtgtctttggaaattttctaggtctgtcatacagcgttagaagtcaaatgttaaaatctaatcttcagccaggcgtggtgcctcatacctgtaatcccagcactttgggaggccgagtcaggcagatcacctgaggtcgggagttcgagaccagcctgaccaatatggagaaaccccgtctctactaaaaatgcaaaattagccgggtgtggtggcgcatgcctgttatcccagctactcgggaggctgaggcaggagaattgcttgaacctgggaagtgaaggttgcagtgagccaatatcgtgccattgcactccagcctgggcaacaagggcaaaactccacctcaaaaaaaaaaaaaaaataataataataatagtaatcagaactctagatctgggaataaccctgtatctatttctttacatttttctttcattaatgtatttatcactattttttttttgtttttctttgcaggcctcagctgttgaagaacgctctgcagagagcagtagagaggggccagttagaacagataactggcaaaggtgcttcggggacattccaggttagagatcagaggcctggttgtggagaagtgcttcttaaagtttttggtttcaggacctccttatactgtaaaaatttattgaggacctcaaagaacttttgtttatgtgggttatatctgtcaacatttactatgttagaaattaacattgaggtctgggtgcggtggctcacacctgtaatcccagcactttgggaggctaaggcaggtggatcacctgcggttgggagttcgagaccagcctggtgaaaccctgtcgtctccactaaaaatacaaaaatgagctgggcgtgggggcacatgcctgtggtcccaactacttgggaggctgaggcaggagaatcacttgaacgcgggaggtggaggttgcattgagccaagattgcaccactgtgctctaggctaggtgacagagcgagatgccatctcaaacaaacaaaaaaacacaaagaaattaacactgaggaaaaatttaaatatttattgatttactttaaaatactagtagaaaacccattacatattaacataaatgacatattttttagtgaaaaatagctgtcctccccctgccacctcccggccttttttttgagacagtgtttctctctgtttcccaggctggagtgcagtggcacaatcacagctcactgtagcctctatctcccaggttcaaggggtcctccagcgtcagcctcccaaagtgctgggattgtaggtgtgagcctataatccgtcttccccaattttttttttttaatgagaagtcgtcaggcactgtttacatttttgcaaacatctttaacatctagcataacagaagacagctagtatctgttccagtttattttgggttacttatttgaagaaaatctaaccttacacagaaatacaattagaaaaggatggaatattttaagataactttgagatagttgtagaaattattctttgatactacaccaaaactcaacaaatcgttatttttttaacagctttattgaggttgatttgcataccttatacaatttaatttatataattacagtttataactcagtgattttcagtaactttatagaattgtacaactatcacagtccaattttcggacatttctgtcacccaaaaaagatcccttgtagccatttgcagtcactccctattccaccagcagcctcaggcaacctctagtctgttctgtctctctgcagatttgcattttgttcacatttcatatggatagaatctagaatcatgtactatatgatcttttgtgtctggcttcttttggcatgatgtttttgaattttatccacgttgcagcatgtaccagtgctttcattcttttttattgtccaatagtatttcattctatggatgtcacattttgtttatccattcatgagatgatgatggacatttggattatttctacttttcagctaattatgaataatactgcctatgaacatttatgttcaagtctgcgtggatatgtttttaggacttgctgggccatatggtaaatttatgttctaagaaactggcagtgtttataagggctcaagtcgttttgttttgttttgagatagggtctcactctgtcacccaggctagagtgcagtggtgtgatcttggctcactgcaacctccacctccctggctcaagcaatcctcccatcttagcctccctaatagctgggattataggcgtgcaccaccaccatgcctgattaatttttgtattttttgtagaaatggggtttcgccgtgttgcccaggctactcttgaactcctgggttcagtgaagtagtctgcctgcctcagcttcccaaagtgttggaattacaggtgtgatccaccacacctgaccagggctcgagtttctccatatcctcctcaacgtttgttactcttttttattatagccatactagtggatatagggtatctcgttgtagttttgattggcatttccctaataattactgatgttgagcatctcttgtgcttaaggccatttgtttattgtctgtagtgaaatgtttattcaaatcttttgcccatttttaaaagggggttggttattcgttaacaagaattcattactctagacataaagtctcatcagattttttctcctattctgtgactttctcagtagtatcttttgaagcgtttactttttgatgaagtcctatttatcatttttaaaaattgcttttgcagttttatggttatctaagaaacattgcctaattaaaggtaatgaaaatttactcgtacgttttaagagttttataattttggctcctacatttaggtctgtgatctatattgttttgtttatagtgagaggtaagggtataatttatctttttgcatgtgggtgtgtgattattccagcaccttttattgaaaagactgtcccttccctattgaattgccgtagcatcttatgaaaatcaattgaccataaatataagggtttatttccggattctgagttctcttttgttctgtaggtgtatccttcatgctaatactgcactgtcttactgactgtagctttatagtgaattttgaaatttggaattataagccctctaactttttcaggaatgttttgactatgccgggtcctgtacagttccatacaaattgtccatttctgccaaaaaaaaaaaaccaaaaaaacagctggagttttggtaggaattgccttgaacctatagatcaatttggggagactcactgtcaacaacgttgagttttccaatccatgacacagaggtctctttatttaatttctctcagcagtgttttgtagttgttcggtgtacgagtcttgaattttttttgttaaatttattgccaagtattttattctttttccatgctgtcttgaatggtggaagtgttttctaattttcgttttcaggttgttaacgctaacctgtagaaatacaatcgatttgtccattgctcttgtatccttcgcccttgctgaactcaccagttgtagtagtttctttgtgaattccttacagttttctacatacaggatctgttatctgcaaataaagagcattttacttctttgtttctagtctggatgtcttttacttcttctgattgcctgattgctctagattaacctccattacagtgttgagtagaagtggtaacagcagacatcttcgccttgttccacatcctggagagaaagcattcagtccttcacaagttagctataggtttttcatagatgcctattgtcaggttgagcaagttcccttctatatatactactagtttcctgggagtttttatcatgaatggctattggatttgtcaagtggtttttcagtgtctgttgagatgattgtgtggtttgtgtcctttgttcgtgtggtctgttaacattatttgttttgtggtaaattctttaaagtttagttgccatgtgaaacctgaaaccctaatcagtgaatttcttggactgtgttaccttaaaattcattgaactttgaataggtattttaatccttcataattttgtagcacgatacattggtcatttgaaaaatagtggcacagagttacatagattttccaaatgttggcatttcattatatacgacaacaaaaattacaatcattggtgttggccactgatcttataagaacagtatttaagtattgggaagataacagactcacagtgatggacacaagtttttcaggatttaaattttctcttgaaaggttgaattttatcattggcaacaaatactattatttttttacatgacaggctcttttagttcatttgcaagatactgtctacctcataaccaagtctgaataatgataggttagctgtcagttatttctttaagtaaaaaagtattacaggtcaggcgcggtggctcatgcctgtaatcccagcactttggggaggccgaggtgggcgaatcacgaggtcaggagatccagaccatcctggctaacatggtgaaacccaatctctagtaaaaatacaagaaattagccgggcatggtggcacatgcctgcaatcccagctactcgggaggctgaggcaggagaatcccttgaacccaggaggcagaggttgcagtaagccaagatcacgccactgcactccagcctgggtgacagaatgagactccgtctcaaaaaaaaaaaacgtgttccaagaaaaatgcagctaattcagctcataactttaacaattacacaagtgcttttcctggataccatcatgtctacatatgtagcagatacggattatgtggttcttcctgtttcatcccataaaatattctaaagacattcaaaagttgagatttaataaaataatttttagtactttatcaagggcattctaagtgaattcgtgctcttttttttaaaccataagtacatagcagtaaagaagacaataaccacatttttgtgtctctgcctttatctgtggtaagctgacagcagttttacccaccattgcttctgcaccatcagtgcaaatgtcaaaatagtgaaaaggccaggtgcagtggctcacacctgtaatcctagcaatttgggatgctgaggcgggtggtttacctggtcaggagtttgaggccagcctggccaacatggtgaaaccccatctctactgaaaatacaaaaattagccaggtgtggtgggcgcctgtagtcccagctactcgggaggtagacgcaggagaatcgctggaatccgggaggcggaggttgcagtgagccgagaccgcgccattacactccagcctgggcaacacagcgaaactctgtctccaaaaaaaaaaagacagtgaaaaagcaaatcgcatcttaggtttttgtttgtttgttttttgagatggagtcttgttgcagtgagtacagtggcttgatctcggcttactgcaacctccacctcccgggttcaagcgattctcctgccccagccttgcccaagtagctgggattacaggcatgcaccaccatgcccggctaatttttgtatttttagtagagatggggtttcaccatgttggccaggctggtcttgagctcctgacctcagctgatccacccgcctcagcctcccaaagtgctgggattacaggcatgagccactgcgtctggcatatcttagttttattatgcaaatagttttgaccttgcagatcctctgaaagggtctcaggaacccagacaattgtaaccagaccattctttaagaaccactaaacagttttgtagagcatttctggttttctccttttccctttttgcatattatttgctaacctttgttaccacacctttcattttcaaagtatgctatgtaattttcttttgtatgatacttttttttttttttagtttattatttatttttagagacagagtcttggtctgtcactcaggctggagtatagtgatgtaatcatagctcactaatagcctcaacttcctgggcttaagccatcctcccccctcaccctttcatgtaggtaggctacaggcatgccgccattcatagctagtttttttatttttagtagagagagagtctcactatgttgccgaggttggtcttgaactcttggcctcaagcagtcctcccccattagcctcccaaagtactgggattacagatatgaactaccgtgctccctgataccctaaatatttatcaaaatttttcactgctattttcctcataggattaaaagggctatttattattttttataactacagctgacccttgaacaacataggggttaaaggtgcagatcccccgtgcagtaaaaaaaaaaaatcataaaaaactttagattcccagaaaacttgactattaatagcctactgttgaccggaagccttacaaacagttaatacacattttgtatgttgtatgtattatataatgtactcttataataaagcaagctagagaaaagaaaatgttattgagaaaatcttaagaaagaggaaataatggccggccacagtgggtcacacctataatcccagcacgtcaggaggccgaggcaggcagatctcctgaggtctggagttcgagactagcctggccaacatggtgaaaccgtgtctctactaaaaataaaaaattagcgagacctggtggtgggcgcctgtaatcccagctactcgggaagttgaggcaggagaattgcttaaacccaggagaccgaggttgcagtgagctgaaaccacgtcattgcaatccagcctgggcaacagagcgagactctgtctcaaaaaaaaaaaaaaaaaaagagagaaaatatatttattgttcattaagtggaagtggatgatcgtacatgtctttatccttgtcatctttgagttgagtaggctgaggaggacaaggaggtgttggtcttgctgtcttggggtggcgggcagaggcagaagaaaatccacatataagtggaccagcacagataaaattgtgttgtgttcaagggtcagctatacttcatttttcagattcagaaaagtgaagtattctcaaataaaataatctttttttttttaaatttattttatttatttatttttttagacagaatcttactctgtcgccgaggctggagttcagtggcatgatttcggcacactgcaaccccgcgtcttgggttcaagtgactctcctgcctcagcctcccaagtagctgagaccacaggcacctgccacacctggctattttgtgtgtgtgtgtgtgtgtgtgtgtgtgtgtgtgtgtgtgtgtgtgtgtgtgtgtgtttttagtagagacaggtttcgccatgttggccaggctggtctcgaactcctggccttaagtgatctgcctgcctctgcctcccaaagtgctggggctataggtgtgagcacccagccaaaagaatcttaatttttagggacataactggttaacctgcttattgggtacagttgtcagtatctttgggttaggttggctattattttagggtggatggagggtagatggaaggagaaaatatccataggagggttgggacttctcagttagattgaatacctgttgaatgggaagagaaagtccctaagctgacaatttattgtaaaacatatctgtgctaatgcaggaactccgacccacctggtgcagaggagtcttgtcttgacctgctttgggagagtgttgtcttgatgcttttctcttcctccttggaaaacagctgaagaaatcaggggagaaacccctgcttggtggaagcctgatggaatatgcaatcttgtctgccattgctgccatgaatgagccgaagacctgctctaccactgctctgaagaagtatgtcctagagaatcacccaggaaccaattctaactatcaaagtaagactcggttgtgtatatttaactgggattaggagaattttcttttgaaaaaaccgtggagggccaggcactgtggctcacgcctgtaatcccagcactttgggaggctgaggcgggtggatcacgaggtcgggagtttgagaccagtctggccaacatagtgaaaccccatctctactacaaatacaaaaaaattagcagggtgtagtggtgtgcatctgtagtcccagctactcgggaggctgaggcaggagaaacgcatgaacccaggaggtggaggttgcagtgagccgagattgcaccattgtactccaatccggacaatagttgcgagactatgtatcaaaaaaaaagaaaagaaaagaaaagaaaaaaaaatcatagagatcatgctattaatgtcaaagtattaactactgactgaaaaccaagagggaacagctttacaaatttcatatttacaaaaagaaaaacaaataatcaaaactgaattcttaatttaaagcatctgcttataagaagttgcttttactgtaaagatttttctgatatttattgtaatttagataaatctctaggttcaaagcaactctaaattatagtgtattttttcctacttttgaatgttcaccaaaaacatctaattttactttgaaacaaagccaggattttagagtacttactacttatattatttcttattaacctaagccccacaacagacaatactttatttcagtaaagtatatttactctaggaggtggtgatttgagatgagacaccctgccttatcagcattatcgtgtggattggtgagactgggtgacttctcaatgaactattagaagaggcacaatgttgtagggtgagggatatggaaattaagtaacagaagaagacaatccagaatatattattgtaattaaaaggtaattttgaagtctttttttttttttagacggagtctcgctgtgttgcccaggctggggggcgcagtggtgcgatcttggctcactgcaagctccgcctcccctgggttcacgccattctcctacctccaccccctgagtagctgggactacaggcacctgccaccacccctggctaatttttttgtttttgtattatttgtttttagtagagacagggtttcaccgtattagccaagatgatctcaatctccttacctcgtgatctgccggcctcggcctcccaaagtgctgggattacaggcgtgagccgccacgcccggcctatttctatatgccagatgttttaagagaagatgaatttggttaacaagcctttcagtttcactgatatttgcagctgttttttggatactgaatcaccataaaatatattttggatatgtctctgtaagaaagatgagaatgaaggacttcaggaaccatgatattgttttgttactgtttactgatttatgaataattagttctgttcatctttataagagattctcctagatgattatcaatacctataggtacacaatagatgtttaagtgaatggaaataattaaatacttagttttaggtctgctgtttatgtgctaccttagagcaagtcacttaactactttgagctcaagtcacttaaccactctgggctttttttttttccctgtgaaataaggtatttgactcaatggtctctaatgtgtcttttcattataactcttgccaggtatggtggctcatgcctggagtcccagcagtctgggaagccaaggtgggagtattgcttgagcccaggagtttgagaccagcctgggcaacatagtgagactttgtctctatattttgcaaaattttaaaatatagatatatgtatgtatgtatgtatataatttaactcttgccaaacttatgggcaataagtaaatgtttaattaaatacctttgaacacataggattcacttagtgtatgtcaattaccgtatgtgacaggatattaaattgatgggcatctgtttgtggttgagggaattatctaatctgaataactagataactttcatttctgaattttttttttcagtgcatttgctgaaaaaaaccctgcagaaatgcgaaaagaatgggtggatggaacagatctctgggaaagggttcagtggcaccttccagctctgttttccctattatcccaggtaagtacttagcctataatagatcactgtaaatttatagtctaagttacacactcagtttaatttattttacccttattactgttttagtgaactggaaatacagtcgtcctttgttacatataggggattggttacagaactgcccgcatacccaaatgcgcatgtactcagccctgtggaatccatgtatctgaaaagtctgtcctctttgtatgcaggcttcgcatcctgtggatgttgtatttctgatctgtgtctggttgaaaaaaaaaagtccacatataaagtgggctaatgcgttgccaacctgtgttgttcaagggacaactgtatttgaaaataaagatgacttttaaggcagtattattttggagtaaaaggttttgtataaaaatagtgattttagccaggcataagattatttgagatcctcggatggtcattttgatgttcattccttctttatcaagtaaatgataatgacagattcttagaggattatgtataagtttttgtttttgttttttgagacagggtctcactctatcgcccaggctggagcagtggtataatctcggctcactgcaatctccgcctcctgggctcaagtgatcctcccacctcaatatcccacgtagctgggactacaggtgcgcgccaccacacccagctaatttttgtgttttttgtagagatgggggtcttaccatattatctaggctggccttgaactcctggctcaagcagtcctctcgcctcagcctcccaaagtgatgggattatatgcataagttttaattgtccaataccaagtggggagaacattgactgttttcaagaatcttaactctacctccatactgtagagacaggaacacttatctgaaaatttgtttcttgcaaataccttatttattctttgaaacaaaaaaatatattgatcacctcctgtggtccaagcattgtttcatgcactgggtttaaagccttttgatttccagtaaagtacataacatataccactaagaccctgttttagcaagactattgtgtaactttcttatattattatttctgtacaaacataagtgttacttggcttaatacatattatataaatttttcgaacattaaacattaaatttaattcccaaagtcacacacacacaaaatgttacattctgccaggtgtggtgggatgcacctgtagtcctaactacttgggaaggtgaggtgggaggatcccttgagcctaggagtttgattccagcctgggcagcatagcaagaccctgtgtctgaaaaaggcaagaaacacacacacacacacacacacacacacacacacacacacatatatgtatgtatgttatcatttaaggatatgttaatcaaaggaatcaaggttcataccaccaaggacaaaaaagagtttaggagatccttgccgaatacctttgaagctttgaacagatttaggcctttgaggtctttttttttaagacttggaggtcttttgccagtattatgaggctgaagtgtgtattccatgcagactgttcattgctgtgtactcattggctaatacagtgccagatacatattaggagtttaagtaattgtttactaaataaatgactatggattaattttattaaatagtgggtatagaattaggtatggtgcaggacttttatagatttggcataactttatatgtatgttcaaaatacggtaaattgtaacctgatacgtgtaacctagcttgacatttttgggaagggtgggaagaagtgggatatgtccaggtaagagcatctaggttcacattatttttcttgttttatatgggacttgtgttttaatctaatttttccccgtatagcccaggagttctgtttccgaagaaagagccagatgattctagagatgaggatgaagatgaagatgagtcatcagaagaagactctgaggatgaagagccgccacctaagagaaggtgtggacatgtgaaaaccccttgtggggaggacactaaatacctcagagctgaaaaatagtgctataggaggggctaaagctaaaaagcatttcagaaactcaggatccttctcaagttctttatataaatttggattgatcttctcctttgaaaatcaagggctccagacttttagggcaagcctgtgtgtatccatagtttagttattcaaagaaaaataattacatatttccctaggaacaacgtcatgaaattgtgtctagacttcatgaattggttgaatttttatacaattttagtaaaatctctagtaaaaaattgtcacattcctattcttaacgtaagtgaccacttcatatgccgtttctctttagaaagcatctggttgtcccaacaaaacgaatctcttaagtactaaatgacggcctttgctctttggttctcacaggttgcagaagaaaaccccagccaagtccccagggaaggccgcatctgtgaagcagagagggtccaaacctgcacctaaagtctcagctgcccagcgggggaaagctaggcccttgcctaagaaagcacctcctaaggccaaaacgcctgccaagaagaccagaccctcatccacagtcatcaagaaacctagtggtggctcctcaaagaagcctgcaaccagtgcaagaaaggaagtaaaattgccgggcaagggcaaatccaccatgaagaagtctttcagagtgaaaaagtaaattttataggaaaaaagggtatcatgatgaaattcaaaatcttattttctaaggtcagtgtgcatttgtttagttttgatgcttttcaaattacattattttcctcccctatgaacattgtggggagggactctaaataaaccagtttaggcatttgctagctttaggtgcttttattggtgcctgcccttttccttgttcattttaatttctgcaataatcctggactttcctaaactatgtaatgtatacttgtcctttttctctgcctcccccaaccccctgttgtttttatggtcagctttgccttttttttttcttccaattttatctaaacagttgcagagatttttatatttgtagaaagcatcaagaacggtatgccagtcaggtcctggaagtaaaatggaggcacaatatagcactgactgagttgtaaagcctcctgcctggagacttcagttatagctgtaataattaatcttatttataaaagccactccactaaccttttctctccaactgtaaacacagagacagctttgggaataagccaaaaacagggtgatctcattagattttgaagatatatgactcctttgggctacatttcatattgatcaatttctaggtatttttcactggcccaaagtattgcattcccttaacagcaagcacaagttctctatatcacttgttttttgttgttgttgttgttgtcgtcgttgttttgagacggagtcttgctcaggtgccccggagtgcagtggtgcaatctcagctcactgcaacctccacctcctgggttcaagcaattctcctgcttcagcctcccgagtagctgggattacaggtgtgtaccaccacgcctggcaatttttttgtatttttagtagagatggggtttcgccgtgttggtcaggctggtctcgaactcctgacctcaggtgatccgcctgcctcggcctcccaaagtgctgggattacaggagtgagccactgtgcctggcctatcccacttggtttttgactgaaggggaagtgtagaaatatattgatttgtgatttctggtgtcacctgtgttaccaaaaatcaaaacaaatcttttttattttttattattattattatttttgagacagagtctcgctctgtcgcccagtgtggagtgcagtggtgtgatcttggctcactgcaaactccgcctcccaggttcaagcgattctcccacctcagcctcctgagttgggtcctacaggcgcacacgaccacgcccagctaattttttgtatttttagtagagttggggtttcaccatgttagccaggatggtctcgatctcctgacctcgtgatccactcacctcagcctcccaaaatcctggggttacagatgtgagctaccactcacggcccaaatcttcttgatcatatgtttaaatatattttttaatatttggagcatgagttgtcacttcttgtttgccttttttataaggaaatgttggagagttacatcattgctaatgtagaaatgttaagtggaaaaatatacagtttggtaaaataaactagattctacatttatttgtgggtttttttcccctcctttctttccacagcacttttgatatcaagcaagtggcttcctttttgagatattaaaaaaaaaaagaaaaggaaaaaagtaaatgaagcccaactacctaaccctttcttatttgtatttgttttagtattgtgaagttgtgttaaatagtactagctagaaatacaaatttctggttatcatttctcttccctgtggcacttgacattttaattgtcttaaagtttttgaagtacatcttctggccccttgagtactgccagaggcaaaagatgtttgtttcttattcattccacttttgtctcctgggatcccttctgtagcctaaagtatggctgggaaatggacttgagaagattggcttgaattagatcataatcatgtgtgatcccatcatgaattcattggaatttgtgttgcatgtaaggcaatctttcctgttgtaaatcttccttttttaatgtacatatattttgaaaaatatgaataaacatgaaattttaaaagctgctgaaccgtagcttatatttaaaggttttgagtatagtatatcctcagaagtagctaagtgtcgccctcactttaagtcttttctactccttgaaatgaacaccatcattttcctttttaaatacaagctccagttcatgtgttttggaattcttatagagggtaaacgatgtttccagatacattgaatgctaattacttaatgaatcaaaggtttaaaaaatcattttgtattttattaaagactgcttccaagatcatagagtacaatcatgttcaataaatgttcaatattcagataagtccttggactagaaaaaattacagtactgcaaaagataacagataaatcctagacatcaaattctagaagtaattgtagtaattactcctgtgctctctagcaagtaatgattcttaatagtatggatgttaggtacctgtgctcagaattctgtactcttctggaatcaaaagttgggagattttggttggtttctttgctttatgatactgcttttaaagagacttactgaataatcacctggtggctgtattgcacaccaggcacttaagcacaggctgagaagtttagatcatttaaagtttcttccaactctaacgttctgttaactataaggacagtttgtttcagtgtgatgtaaagggaaaagacaggaaggtcatcgcactcttccacgaacatccacaactgtcaaagacatacgccttacttacattgagataaaagaatgtttgatttttcccttccaggcattccaaaggagcagaacacatttataatttttacttccatgttcagaaaggggaacaacaaaccccagaggtaatcccagaaatctctagcatggatcaatagcttcagtactctgttggtggcttagtgacctcatttacagtgtttcatacactctgaaactacctacaagctacctttgataaatgagtctcagaaagtgctgggagagagattgttggcttcttaacctacaaaatgaggaaggaaagatactattgttgagaaatgtggagacctttccttagcactatgacagaagcattcattgcacatggattctgactatgcatccacatggacttaattaaaggaaacctggtcctgtataaatcttaggaaacaggtgtatgttttaatcatgtcttttgggtataattaacaggaaaatgacatgaaaacaaaactaaacaatctgctaacaccttttgacatttgttttttcatcattgctgtttttccaaattttgttagcccttgtcaaggtttgctaaccaattcttaattaatacttactttaaagagcctgtgaaattattctctctcaggctgtgaccctcttgccatcttgatacgtcatgagaacgaaactcaccagccatgttcattaaatactgcatttaactaagagaaactttaaaaatttgggattatagttaaggtctcctatctttggaacctgattaatttatctttctttggattaagcaaaaattctaattttagctatgaaagaaaagaaattctattcttaattggaaaagaccattaaactgtttccccagaggttctggttgacattactttctagcatgtagattttgcttttgcattttcatggtggaacagatggtcactcacttctgcagagccaaagccaaggaagcagaactgttgaagttttggcttaggaaccacttgacaaagatttgtttagaagccattacagatggttaaacagtacccctaatcagctgcattattttcttaagaaattaatctctaccgtctttataactatattcttttacttattatttttttgagatggagtttgctgtgtcactaaggctgcagcgcagtggtgtgatcttggctcactgcagctttgaactcgtgtgctcaagcagttctccccacctcagcctcccaagtagccaggactacaggcaagctaataaatgcctggctaatttatcttttctagagatggggcctcactgtgttgcccaggctggtcttgaactcgtggcctcacgtgatcttcccacctgggctttccaaagtgccaggattacaggcgtgagtcgccatacctggccctattctttcttctgttcttttccacaagactgttaacttcagtggcttttttcctgttggaaaactttctacctttgatgatttaattttatcagctttttaactgttttaactgttcttaattctgtcttgtcaaccactggtatgtcaaaggaggcctcaaaaggctgaagcgattttcctcaaaaattacaactcttttttttcctgatattgtatataatgtataattaacactgttcactattaaatctttgcttagcaaaagagaa

SEQ ID NO: 1198 - DNA, 30750 bp, Homo sapiens
ggtcctacccggaagcgcgcccgggctcctgcaggcggggcgctgtgcgcgccgcgatccggtacgtgggcctccgggctgtcccctctgggggcggcgatcctccctccggagccccccttcaaccctcccggaagtgaggtagggtccctaggggtcccggagcgggcccactcctagcctcacccactccgggcgtgtggccgtgggccggtcgcttcctcgctcggggccaaagttcctcagccgtgaagaggggtggatgtcacaagtcaagcctccttcccagggtggccgtgaggttcgggggtggggggaggtggggatttggggtgaaactggacagaaactggcgtgctaggcaaacgggagccccgcggcggcgaactgctgactcgctctctccagagactcaggggcagggccgggctccgaaggtgtgggaccccagaaggagctgctgaagacgggaccaagggccacagggaggtttgctggggtccagatggtgaaagtgggcgctgggggtcgccccaggttggccccccgccatctggagctcctttcgtcagtgagtcccctccgagttccctttctagggcaagatagcgaggtgaagcggaagtctcagtgtgacaccggcgaggttctcttcccagcagcctttgggaagcatccccctgtttcgggaatatggcattcgggccaatcatgtgggtgatggagcccgtctcagggttcggctgctaaaggccgaactcgtaacagcagtctctgtggcgggtagtcacttgcctcttactggctcacagtgcttgacttcctaattaagttttctgttgttcctgccctctattcaaatatgaatgattccggaaccagattgattaatcctgttatttgaagaagggaagctgggaaataggaataatgatccccacacctatgtaagaacgcagtttgctaaggttactttgcagcttgcctggtcactcccatgatctaaccctgtagggaggtagagtaggggatgttgctctgtttctccgcaggagtttgaggctcagagaggtttatgggacttggcaaagccaaaactagaacctggtcccagatgcctttcctgttagtttccttccattcatcgtatcatcccaggatccccactcccttcaccgggactgcatcctcaccacctgggatgtgctatgctgtctcccgtcagtcactcctagcaagctccctggggctgcttggggagctctgagtgacccgcagaagtgagagcacttcatgggaacaaaggaggaaggaacaaaagtgggcacctgctctgtgcaaagggctgtgctggccgggttcctattctccattatgggaggtgaggggcaggatcccagatatgttcttagcagactgcctcagggcctggagagaccagggaccacgcagcccttctccagcttgtcctttctcaacgggcagcagtcaagaccagggcatctgcctgccctcatattctctctgttttaagcatttgcaggaccagggatgctgtgctgctctcccatgagccagtcaccgagtcggtctgctgcagccctttctgaacctctggccgtctggatgctccactgtgcttgccaaggtagatgatcttgccccacctggggaggacagggaggcaggcagcatccaccctggggctttgggaggcagatggaatgaggtaggcagtggactgagtgctactgggctctgcacacctgctcatcccctccccagccctgcatcctgaggccacccccatcctgatgcctcatctctccttcacccctcgaatccaggcaggtcatcacagcctgctgcatctttaaagctcctcccagcccccaccaaggggtgagcactcattacctgacacccgcacctagatgaccgccttcatgaccttgacctgcccatctccagccagccggtcacttctccgctcacaaccacagcctccattccatagcccactgctccctaacccatacactctggtcagctttgtcacatgtacctgggagtcccagagcagcctcttcaggtccacccgcctctcccagcaacctccttttcacacctgttgcactctcagtgtctgccttggcattgagtaattctgtgggaataggctgcattccttcttcactgtgctgttatgtctcctggcatttgccataaataccttgggaccagttgcaccaagttagtttgggaggaattcagtaaggaccactaagctggacatggggatgacggaacacaagacctggagatgctgtgatcctcccaagaaaactggaaatccacttgtgtgagagttacagcagagcttcctaatcattgtcatggcttagcgcacataccacatgattatatctgcgtgacaccctgaggcacataagaggatttgaaaccactgcctgaggcctcttagctgcagcagccagcctggagcactgtcctcaccagcctggtcaggctgccccaagttttagaagatcgagggtttgccgcacgcagagggccatggcacacagtgtgggaagctgtattaaagatcttccagtgggtgaatagttaagacatttcttacataatcaagcacagagtgtgtggtgtgtgtgtgtgtggcgggggggtggggaaggagatttgggagggctgaagacactggtggctgtggccctagaagctgcagcctactaggtacaggggctttaggcagcctctgttctcaccatgaacagggagagcagcatttgaatgaaacttctgtggtgctgaagtaaattcaggggctttgaggctcatcttctggagctgttttttgtttgtttgtttgtttgtttgtttgttttttcagacagagtctcgctctgtcacccaggctggagtgcagtggtgtaatctcggctcactgcaacctctgcctcccgggttcaagcaattctcctgcctcagcagttatcccgagtagctgggataacaggcacttgccaccatgcctggctaatttttgtatttttagtagagacggggtttcaccatgttggccaggctggtctcgaactcctgacttcaggtgatccaccccccttggcctcccaaagtgctgggattacaggcgtgagccaccgcgcccagccctggaactgtttttatctgagggagagatatctctggactgcccagagatggaggtgcaccagtgccctccgatccacaccaggcactaactggctgccgtgagcatggcctccctgggcattcggctccatgtctaggccaagacctgggtcccttcctgtgccagtctggttccagtaggccccgtggtgggtctgttgctgtgctgagagggaccagataccacagaggaaagggccccagccttggcatcaaacaggtctgggtccagatcccagctttgccacttcaggctgtgcctgtgtcctgctctctaaaatgggggtacctgaagagttctactttgtccagttgtgagggtgcaacaaaaatggaagtcccttgtgatgcctggtgtgcagaaggggctcactgaatgtttgctgaggttggggtcctcttcgttactcagactgagctcatagatgttggggctggaggctgaccttgaccttgcctttccctggcagatgaagtgcgtcttggtggccactgagggcgcagaggtcctcttctactggacagatcaggagtttgaagagagtctccggctgaagttcgggcagtcagagaatgaggaagaagaggtgagtgcagggtaggcagtcccaggaggggtggataggaaggaaccatacaaaactcccagcaggcagagaggcaggaaaacctgtgttcaccctgtcctgggcagcatgagcagggtgctgggtggggtccagcatccttcacacctagacccttatcctcaaggttggcctcttgatgctctgagctcggtgaccccacccccacaccccaccagtcctctctggactaaatgagggcaagaagaagtcgaattttatcacgtaacagaagaacttggagccatcagtttctgtaacctaaaaagtttaacaaggctgggcgcggtggctcacgcctgtaatcacaacactttgggaagccaaggtgggccagttgcttgagctcagggatttgagaccagcctgggcagcatggcgaaaccctgtctctacaaaaaaaatacaaaaattagccaggtgtggtggtgcgtgcctatagtcccagctacttgggaggttgaggtgggaggatcacttgagtccaggtggtagaggctgcagtgagccgagactgtgcccatgcattccaacctgggcgacagagcaaaaaaaaaaaaaaaaagtttaacgtaagctgaacacgttaattttttaatagctgtattaaggtatgattaacataccataaattgcacatatttaaagtgcataatttgataagctttgatatgtatatacctatgattctatcacaatcaataaaaggaatatatctaccacctcaaacatttgtaatcccttctttcccatccccatcgcataggaactgctgatctgctttctgtcatgatagattagtttgtatcatatggccttatataaatggagtcatacagtatgtgcttggatttagtttggttttggtttgactgctttcactcagcataattattttgtgattcatctgtgttgtggcatgtatcaatcgttcattccttgtcattgagtagtaatctattgtatcaggatgccaccatttgttcattcatttacttgttgatggacatctgtgttattttcagtttttgactattacaaataaagcaactatgaacatgcacgtacaagtctatgtatacatggatgctttcatgtccaaggacagatacttaggatagactggctaggtcatgtaggtgtatgtgtaactttttaataaactgccaaacttttccaaagtggttgtgtaatttttgattccacctgtagtgtttgagagttcagttcctccatatcctcaccaacactatagtccgtctttttaattttagccattctaatagatgttcactagaatctcactgtgttttaaatttcatttccttaatgactaatgcttttgagcatcttttcatgtgcttatttgccatatcttttgcccagtttttatttgagttgattgtttcttcttcttattcttactgagttttgagagcttctaatatattttggatggaatcctttatcagatacatgttttacaaatattttctttcagtttgtggcttgtgtttgtattctcaatggtatctttcaaagagcagaagtattagaactcgagtttatccattttgcatttatggattatgcttttagtgttatatctaagaaatctttgcccaacttacaaagagttttctctacatattcttttgaaagttttatagttttaggttttatatcaggtctgatgatctactttgaatttttgtgtgtggtatgagctatggattgaagataattttttttttgcatgtggacatccagttcaacagtttaacattacaactcagaaatacttgtcattttcacttacataatttccactctacattttaaaggagtaatttattttgaaaatgttttccagattaattttgggttaaaaatatttttactggggatgcagtggaaggtgttcttacatttctgcagcatgggctgattgcctctctgtccctttctgctctaaggggtctcatcatccagccaatgagtgagctgactccacctcagggagtccatttaccatcaacatcactcgtgttctcatcacagtctttaggcaaacacaagatatcagagatcatagacattcaagtggttttatttaagctaactgttaggcttttttattttttaacagtcaatacatataatatttaaattaagaatttttaaatatttcagtttttaaactactgttacaactatgtcaacttaagaagcaaactatttggtggcctttctcttcctctttattgaaaacctggcaaaggaacgaactcctgaattttcagttcctaaaaatgagtagtgtaaaggaaaggtggtctttaaagttttttttttttgttaatgtgcaacacattcttttctcatcatataaataatgagttaattgtaggaaatttggaaatacaaagagatagtttttaaatgacctataattccatgacccagagctattagctttttaatatactttctttgggtctttattttttctatataattgggattataccacatttacagttttactgcctgtttttttttccacttgccattatatcaagatatttcttctatttttttaaatagtctcagaagcataattcttaatggaaacattgtactccagtacatgaatcagtgtatcatcctttatttaaccattttcctcatatggacataaatattgctcctaatttgctatatcactcttgctttaagaaacatttgtgcttaaattttatctcatgtcagataaattcctaggataaatttaggataaattcctaaaaataaaaatgttgagtcaaaagccattcaaagatattgtactactttataattccgccaagtaatatatgagtatgctcctttatatacaccaaatatttttatctcccctgtattagtccattttcttaccactataaagaaatgcccaagactgggtactctgtaaaggaaagaagtttaattgactcacagttcagaaggctgtggaggcctcaggaaacttacaatcatgtcaaaaggcaaaggggaagcaagacaccttcttcacaaggcagcaggaaggagaagtgctgagtgaaggggaaagagcctcttataaaaccattagatctcatgagaactcactgtcacaagaacagcatgggggaaactgctcccatgattcaattacctccacctggtttctccgttgacatatgaggattgtggggattatggggattacaattcaagatgagatttggatggggacacaaagcctaatcatatcattctgccccaggaccctcccaaatctcatgtcccttttacatttcaaaaccaatcatgccttcccaacagttccccaaagtcataattcattccagcattaaccaaaaagtccaagactgaagtctcacctgagacaaggcaagtcccttccacctatgaccctgtaaaataaaaaacaagttacttccaagacacaatgggggtataggcattgggtaaatgttcccattccaaatgggagaaattggaactatggggctacaggacccatgcaagtccaaaatccagtggggcagtcaaatcttaaagctttgaaatgatctcctttgactctatccacgtccaggtcacactgatacaagaggtgggctcccaaggccttgggcagccctacccctgtgcttctgcagggcacagtcctcttcccagctgttttcacaggctggtgttgagtgtctgcggcttttccaggtgcatggtgcaagctgtcggtggatctaccattctgggggctagaggatgatggccctattcttacagctccactaggcaatgccccagtggggactctgtgtggaggtgtctgaccccacattcccttaatcactctagcagaggttctccatgagggctctgcccctgtagcaaatttctgcctggacatcctgccatttccatacatcctctgaaatctaggtggaggttcccaaacctcagtttttgatttatgtgcacccgtgggcccaataccacatgtaggtcaccaaagcttggggcttgcactgtctgaaacaacagccagagctatatgttggcaccttttagccatggctaggacgcagggcaccatgtccccagagtgcacaaagcagcaaggccctgggcccaacccctgaaacagttttttcttcctaggcctccaggcctgtggcgagagggcctgctgtgaagacctctgacaggccctggagacatttttcccattgtcttggtgattaacgtttggctcttcattatttatgcaaatttctgcagccagggcttgaatttctcctcagaaaatgggcttttcttttctattgcatcatcaggctgcacattttccaaacttttatgttctgcttcccttttaaacataagtcccaattccaaaccatctattagtgaatgcataaaactgagtgctttttagagcacccaagtcactccctgaatgctttgctacctagaaatttcttccaccccaaatcatctctctcaagttcaaagttgcacagatctctagggcaggggcaaaatgctgccggtctctttgctaaagcataacaagagtcacctttgttccagttccaaataagttcctcatctccatctgagactacctcagcctggacttcattgtccatatcactatcagaattttgttcaaaagcattcaatgagtctctgggaagttccaaactttcccacatcttcctgttttcttctgagccctccatactgttccaacctctgcctgttacccagtttcaaagtcactttcacatttttgggtatctttatagtagcacctcactctctgtggtaccaatttactgtgtcagtccgttttcgtaccactataaagaactgcctgagactgggtaatttataaagaaaaaaggtttaattgactcacagttcagcatggctggggagaactcaggaaacttacagtcgtggtggaaggcaaaggggaaacaaggcaccttcttcgcaaggcagcaggaagaagtgtcaagaaaagtggggaagagccccttataaaaccatcagatctggtgaggactcactcattttcatgagaacaagttgagaacagcctgggggaaccacccccatgattcagttatctccaccaggtctcccttgacacgtggggattatggggattacaagtcaagatgagatttgatggggacacaaagcttaaccatgtcatcccctcaccaaaaaaaagttctattcctgcagaaaaagctatagtcatgccctgcttaatgatggtgatacattctgttaataacaaactcatcattaggtgatttccttgtcatgtgaacatcatagtgtgtgcttacacaaacctagatggtgtagccaactacacacctaggctgtacagtatggcctgttgctcctaggctgcaaacctacagcatgtgactgtactgaatactgcaggcagttgtaacacaatggaaatgtttgtgtatctgaatgaacatagagaaggtatagcaaaaataaagcagtataatcttatggggccactatcatgcgtggtctgttgctgaccaaaacattgctcttcagtatgtgactatactgcttttacgatgagtttctatcaacatctagattcataagtgacttctctattaataaaatttgttcaagaaaatcatggtatatgaataattcagcaaatatttgaattcttgcctgtttatggaattctcgcctatctgtggggtattcattaaccaaatattaattgggaacctaccatgtgccagtctctcggggtaaagcagtaaacgtagcaacatgatccttgctttcatggaacttagagtctaaagaaggacattgtacagtgaaccagatggcaaataagtaccatgagttcagatagtgacaaatagtctggagaagttaaatggggtatgggatggggagtgacagaggtggagggcggtagcctgaggtggccagaaaaaaaaaaatctgagctggaaccagaatgataagtaggagccactgtgaaagctggacagactaactgtgggagctgggtacagtccttggttcccgaatgttggcaggaaaacctactccatagtgctgtgtcccacttgtacttcaatgctgcaccttcccgctggccagttgcctgtctttcttttcaaggcaaggtcttactcagcttcttgtagacttccccagctccaagttaggactgtgccttccccatatttcattcacgtctcctgaaatcttcttgggaagtctgctgttttcttcctttctttttattccactacggagaatttgagttgtaactgttccactggctttatcccattttattcacacatttgcaacaaacttgtccagttcctttttgtttttgtttatttgttttgttccttcttttggagagctgagagaatggatggaggaagagcttatcaaagtcaatgcaggcttgttatggaaaataggaaaagtacagaaacatacttaaaaatagagggaaaaaaatcactcctaattcctctatccagaagtaactttaatagtgttggctttctcagtattttatcaatacttcgttttttctatgcattcacattcttgttttatttttagctacaacattgtatcagaggaattttccatgtcattgaaacactctaatattttaagtggctatagacccttccataattttgatgtgctgctatttatttaactatttccctgatactagatgttaacattttttttccagttgtttgctattataaattaggcagtagtgaacatctttgtgcatgtatctttgtcccaatctctgatcattttccttaggacaaattttccaaagtagacttattgcaaaaaacagcatagactttggtacatgctacaaacttccttccagctccccgttcagtgctccccacattccactgttgtaatgaggcccaattccttaatgtttccttctagattcagagcctaaacagcaccattacccagctggccctccccattcttcctaaccaccacccgaagtgttggggacagtctctttttgctcccctccctaccaggacagtgataccctcccaggagggtctaacactatggaacccttgatatcaaggcctgatcttgtcccttccttagttcttggtgtctggcccactctaagctgtgaaattttcccccatttttgcagctccctgccctggaggaccagctcagcaccctcctagccccggtcatcatctcctccatgacgatgctggagaagctctcggacacctacacctgcttctccacggaaaatggcaacttcctgtatgtccttcacctggtgagtctatagctctggggcccatgttcctcttccctcagcttgatggggagtccacaggcctctcttatttggaactttagactcctttagaaggcagaaacggcatcttatcaaacccgcctgggacccgagcctcccctggcttgtctgcagagaccagggcaggtgaagggagtgcccttggggctggctgacactggcctgcctgtgcctgcagtttggagaatgcctgttcattgccatcaatggtgaccacaccgagagcgagggggacctgcggcggaagctgtatgtgctcaagtacctgtttgaagtgcactttgggctggtgactgtggacggtcatcttatccgaaaggagtgagtcttcaaagctggtcccctctgtcctttgccgagcaccctcgctgggccaggcagcgtgtgcccagcccctgtgaagctgccatttttcacatactgcccccagctgggtccctaggtcagagaaacagctcaagtgaaccttggagaccatctggtctgaccctctgactttatatctggtgaaacagagcagagaatggaactcacttgcctggggtcatctagctggttggtggccacatccaaactggatatttgagctcaggactctcagtccagtgctctttccatcctcccaacatcatcacccgtcattacaaatctggtctgagctagtcctctctggcttctcaagcttcagactctctctccagaaaaacacaaacccatgcacattcatacagtctcgtgaaggttttctcaggagacagaccttaaaacctgtctctgggcccacagtaaagaacttggggaaagagaatcatggttcagagtatacactgaggtgggagggaccccagaaaaggcttgtagttgaaatgtagacctagaaaagagaagttcgtagtatcaccaccccctgattctctaagatggattgggaagctgcggagtgtgaagctctgggactttagttttgtggcgatatgagcaactacccatattgaggcatttctcaaatgcacaaacattgtttcatgagtcattttagcccagataggtcatggtgtcagtggcaaatgctgcaggtggcagatgcctgttacatgaatcacagtggccagtgcagacgttgccagcatccgagatggctgcgaccctgagtagggccctgatgatggaccagatctttctgtgttcagtggcctctgtgtgagaagcttaagcatcaccctggctctctctagctggctttgtatgacatgtgtttgtgtgacagaggctgaggagtgaggtgatttgctcagctgcctgccttccggctccgtgcctatcccaccccactccacagttagagctcggccggaaacctggccccctttcccagctgtgtgggcaggtcatatgggctcaccaagctctgatgctgagctgagactgtggtcctttggttgggtgtgggggagaccagctttcttgtgatctctcccgccctctctggctctgcccccaggctgcggcccccagacctggcgcagcgtgtccagctgtgggagcacttccagagcctgctgtggacctacagccgcctgcgggagcaggagcagtgcttcgccgtggaggtgactactgggcgcgggagtcctcaggacttgaagctgtcaggtcagagggggcgtccacctttaagaccatgttttaaccctaatgaatgaaggcacaagcagcccctgaaactcgtgtattcagagagagttgttctttctggccatatggagggttgggtaccctgatgggctttcccatggtaaaacagctcgatcctggataacacatacttttaatgcaatttttgggttcactgtaaattacaggaatctttgaagacagttccttcaaccctcccctccttttcccacaaaattatattgagctggaactggaggggaaagcagtggagaaaaacacagcgctaaaggcaagattccctgagtgcaaatgataccagcactacagccagtaaatagccttaggccagcagcagcataggagagctgagcctgcaactctaggttaagcccagccccaaaaagttaaagtggctactggtccttttataaagccctagtaaataaaaaactaaaaaattaaaaataaaaactaaagtggctgctggtcagtagcactccttgccttcctaaagaggtaaaccaaattctctttcaagcagtggttttcatactccagtgtgtgtcagaatcctctgtagggcttgttaaatacaggttactgggcctcactttcagcttttctcatttagcgagtctgggatgggggctctagaacttgcatttcttttttttttttttttttgagatggagtctcgctctgttgcccaggctggagtgcagtggagcaatcttggctcactgtgacctctgcttcccgggttcaagcaattctcctgcctcagcctcctgagtagctgggattacaggcacgtgccaccacgcctggctaatttttgtatttttagtagagacggggtttcactatgttggtcaggctggtctcgaactcctgacctcatgatctgcccactcggcctcccaaagtgctgggattacaggcatgagccacagtgcccggccctagaacttccatttctaaaaaattcccaggtgctgtttattgtgcttgtccaggaaccacactttgaaaaccactgctagagcaggaaaggtaaagatcaaacaaacgtgaactcacaactgaagaaaatcagatatggaagaaaataagccaccacgagtgagagtcaggaaaatcaatcaccaacagatttagatcccaaggcacttgatacattggaactattaggtatagaatataaaataactatgaaatatttaaaaatatgaaatgtagaatcacaaaatgagataagaagaaactctaaattgaccaggcaaatttgaaaaagaacacgtacagatattttagaaaagaaaacatagttgttaaaatgaaaaactcaagggatgtgttaaatagcagatgagacatagctagagggagaattaatgagctggaaaatagatctgaaggaattcattctcatacccccactcattcactcttccaataaacatatagtacctattatatgctaagaggtgtgccaggccatgggaataaagagatgaataaagacatattcactgcccttgaggggaaatcagccatgtatatactaaaagatataataaagaatcctggtgccatattaggtttttcatcaaaagctatggtggcacaagagatggagtggtaaactctttctgggacattaggaaagacttcttttaggaggtgacctaatgccattagcataaaatccaaactcttcccaagcctaccaggccctgtgtgatctatcgctgcctatttcactctagcttcatcttatgcctctcttgtccacgcttactgagtgctagtcacatgaaacttctttaagtttcaggaaaactctatatttagatctgtccaatatgatagtcattagctgcatgtggctgttgaacatttgaaatataactagtgcaaattgagttatgctatgcatgtgaaatatataccagattttggtaacttagcacaaaaaagaatgtaaaacattccattaataaggcttttatatcatatggtgataatattttggatatattcagtaaaatgaaatatatcattaaaattaatgtcaactgtttctttttacttttttaatgtggtcactggaaacatttaaattatgcatagggcctttcttttatttctgttggacagcaccattgcaaactctgtccccatctcatggcctctgaatatgcagtctccttgacttgcagtgttctctctctccctctttctctggtgggccatctggttgtttagatattagtttaaaggtgacctaattcagggacatttctttggacaccctacccaaggaggtctctgctatttctctctagcctagtgctgtgtattttgtacttggtgcttacttacaaatggcacttactttatttccttgtgtattgccttgcctcatccactggagtctagtgaccagacagtaagcctcaggaaggctgggacctggtgggtcttagtccccctgtttccaagtatctggtgcagagtccaagctcactgtggacagagtgaatgtccccactagcccagggcttggagtggggcaaggttgttggtgatatggcttcctctcccttcctgccctggctaggccctggagcgactgattcacccccagctctgtgagctgtgcatagaggcgctggagcggcacgtcatccaggctgtcaacaccagccccgagcggggaggcgaggaggccctgcatgccttcctgctcgtgcactccaagctgctggcattctactctaggtgagctcaaggtctggcatgtggtggctaaaggctccctggccttctcactcccctatggcctctgcctgaaaagcaccacctgcccagccaagaatcacctcctccatgaagcctgaaaccttcccagatttgattctccaacctttttcagctcacccatttctctgtatcattccttcctggaacactgtcttagagtctcaatctagaacttccttttatgttgttcttggtccctggtgctttcccactgctaaatcattttcttttctttgttctatacaaccaagttttattttgaaatttgacgagttaattaattgtatttgtgccttgcccatctccagaagtacattgctccttgagggcaggggccaggctccacactcctttaacctgcctgccccgtctcctgctgggcatgtgctgatgggtggccatgctcctgtgtctgcagccacagtgccagctccctgcgcccggccgacctgcttgccctcatcctcctggttcaggacctctaccccagcgagagcacagcagaggacgacattcaggtctcagggcagctttctgggcagagggaggccattagggaggtagttcagaaaacctgcctgaagatggtgggcaggctccccctggggactccatgttttctaagtcacaattctgggtgtgtggttgggcgtgacttctttcccactgctttcagatgtaaggggaattctggagtgcacatggtccagtgggttaaaagtgcagatttttcaagtcagccatggttcgaaacccagcttcaacacctggctgtgtgagctgagcccgtacttgcacccccagagcctcagtgcccttatctgtgcaatgggaataacaaagcatctacttctcaggggtatttggagggacaaaaggggtggttcccacagaacctggcactgcctggggcatagtgaatgcttagtgagtgtcagccaccaccatcgctgttgacctcatcaccaggggtagtggtgggttggataccattgtgttggaatttctcgaatttccacagaacagaccgcctagaatcgaatccctgggaagtctgaggaccacacacccaggactgcacccggaacgggtggaggggtggaggggtggaggcttctctgtgaagcgctgggaggcagaaggggtggagggagccaggtcagataggagctaaccagcctctcccctgccctgcacagccttccccgcggagggcccggagcagccagaacatccccgtgcagcaggcctggagccctcactccacgggcccaactggggggagctctgcagagacggtgtgtgctgtgcacttcgtggagtcaggggcaggaggggatcggcctctgcaggcgaccaggcctttcccatccctcctgggagagcagggacagggttgagccagctgggagagcctctcaacctgagccaccttctccattccaggagacagacagcttctccctccctgaggagtacttcacaccagctccttcccctggcgatcagagctcaggtgaggaccggaggaaagcaggaggaaacaatagctagctgcgagcgacaggcagcccaggacatctgtcttaggctccagtggacccccgtgcctcctaaggcttgagtgcaggtacccgtgttcctagagcacaggacgctgtctgcggctccccatcttccctgccagctccagcctgaactcaaggattgttaagaccactccactgatccctaaagctgttgatgacaagttgattcatttaaaacttctgtacatgcattctcagactcatcttttttgtaattaaaattaaaaattaagttaaatttagtaataatcatctaatttctatacattctaaaatatattcagcatctgtagtttatactttgtttctccaaagtatgtgggtaaacaataaaaaaaaactataaatattcaaaatggttgaggtgtggtggctcacgcctgtaatcccagcactttgggaggccgaggcgggtagatcacctgaggtcaggagtttgagactagcctggccaacatggcgaaaccccatgtctactaaaaatacaaaaattagccaggtctggtggcaggcgcctgtaatcccagctactcgggaggctgaggcaggagaatcgcttgaacccgggaggtggaggttgcagtgagccaagatcatgccactgcactccagcctgggcgacagagcaagactctgtctcaaaaaaaaaaacaaaacaaaactacaaatattcaaaatgttaacaaaaaatggacaaccttgcttagagaagtagataaaccaaaatccagactgttgtggtcactatgaataaacattacatttatttctgaagttcttaggtaaaaaaaaaaaaaaaaaagggtcctgtggtccctccacatcatctgatggaagaaagaaggccagggtttcaggaggagaaacctactggggactaggatttgaaaggaatttattatgtggctgcttttaacccaaccctggcacattggaatcaccaggcagcttcagccagcccaattaagttacagtctgtgggcctgggacccaggtgtgaatacttctaggaaattttcccaggtgagttcagtgtgcctcgggtgcaaaccactgctgtgcacagatttaggttacagcatgctttgccccctggctgcatattgaactcacctggggatctttaacaattattgaagctgagcctgtacccggagatgctgactcagttggtctgagctatgccctgggcgtcaggattttgtaaaagtccccaaatgattttcgtgtgtagccaaggttgacaaccactgggttagatgcttttaactttaggtctggctagaagcctaggaccccctgagactgtgtgtgaactcactgatgcctgtgcattcctggggtgagggttcctagctatcttcagattccctgagctcttgatgagcctgagacctgttgagaagcagagttctgggtaatctccgaagttcctcttaccactcccttcctcattcatcaccatcttcctcccagtccctctctcttgatagtggttttttatgccttaaaactgtaaaaaataatgctgttccaccgtgcagagaactcacaacttacaaatggtttgggttgcactcatccatttgtaaatcaggtgtttaagatgtaggaacacacttcccccaaagaaacatgattataaatgagggttgtttgcaatgaaatataagaggtaacagtattattacagacacataatatttcagatatgtggtgggttcagtaggtttttgtgcgttatattaggaaggaaatccacctcaattcccagcacacagcaggtgctcagtaagagcttgccggttgaataaatgaatgggcaaacgtggactgtgtgtgctgactcctgaggggcgggttgaggcctgaaggaatacaggggacagaacaaggaggggattgggggcaagggaggggggaggaagatgcccctctaccccctgaccaccattaccaaacatgtcctcaggagcttgattctcagcagctggctctgggggcagcttctctgccaggcccaggccgccttagccctggtactgcagagttcaccttgtgcctgccaacttaggatgaaggggtgttgccccagccacattagcacccctgcgtggagctggcagccaagggctgaggttgtggggggcacctgggccccctaccccatgctgttgagccattgcttacatctcatggtacttacatcgttatgttattacctgtggcctgcaggtagcaccatctggctggaggggggcaccccccccatggatgcccttcaggtgagtttctcctgtgcctgcctgggcgccagctgatctgagatgccgcagtgagtattgggggctctgagggtttcgcctccagggtgactctacccgtgccagccctcctcctgcccaccccagggctggtcagtgcaggtgcctgtcctggtgccagagctcagcccagaggcagggtccaggaatgggctgtgaggggtggcgaacttgcccctcccctcccccaggtgctgtccctcagctccattgttcttgggagtgaaagtccaatagaattttttttttaagtgagcatgtatatttattgtagaaaaatcgggaaatacaaaagtaaactataaaaaagggaataaaaattactcttaatcccgtcctcaaaatgagattaacatcttggggtgtttccttctagtctttttttcctatgactttacacacacacacacacacacacacacacacacactacatatgtacacatgtgtatttttaaaatcagatttggatactaacgtgtttcattatacttttttatttaaacatttttccatttcctaagcactcccacagtgtggtttgtaatgattggtagtccatcacatgcatatgttatttatctagcaaatccccaggaaaatcgcgtcatgtgtccagtgtttgctgttaggtatgacactgaagaggaatttttgtggcatctctcatgatttccttaattctataattttttgcactaaaggctttcttgcttagatccctctgtaaggctggagccttgcccatttggtcactttatgcctcagtttccccaatttgagtggctgttgggatgttctgagggtgattgaaatgatacaatgttgaacattagatacctccatctgttgcaaatgtggggaggggacctctccccgtccactccccatccacgagtgtttccctgccttctcggtcctctgtgccaccacccagcccctctgcccctgcccactgccctgcttggcacccgggccagactctgggcagaaaggcccaggagcagctgagggagaggggcaacagcgaaactggagctgcgagggcaggttcagcagagtgcaggaatttaaaaactggagtttcttggagctaaaaatgattatttcttgtggttcacagatagggccgcaatgggtgggtccaacttagggatcccacctctcactgcagctcttcttcctctgtagatagcagaggacaccctccaaacactggttccccactgccctgtgccttccggccccagaaggatcttcctggatgccaacgtgaaggaaagctactgccccctagtgccccacaccatgtactgcctgcccctgtggcagggcatcaacctggtgctcctgaccagggtaggagagcccctcaccctgccctgatgatgcttagggttggcacgtcttccccaggggcagccccgttcacccgcctctcggcccttaccctcagagccccagcgcgcccctggccctggttctgtcccagctgatggatggcttctccatgctggagaagaagctgaaggaagggccggagcccggggcctccctgcgctcccagcccctcgtgggagacctgcgccagaggatggacaagtttgtcaagaatcgaggggcacaggagattcaggtgagacccaagttccagtcctccccacctggggaagaggcagggctggcagcagggtacatccggtccacagcagctgaggggccaatgggcctgggttcctgtccgggctccacctcccccgggcctacgatccttgttttccctattatgaaatgatattgaaaacttagctgctttttggttttcagaatctttttatgtgtgtttggcagaatacgaattataattccccttttttaggtgtggaaactaaggcttagacaagttttaacttggccaagattatgcagctcatgagcagtggagccagagcccggatgcagtgagcaagtgcagtcgggatccgcccgtcacgggcttcctctctgcagcggggctgtgtccccgggctcacagggcaacacagggatgtgcaggtcacggctccaccccacccccagtgagcttagggcccaggtggggagctgagaccaggagacaggtgagaatgtgcaggcagtagaaacagtccatcaccccgtgctctgacaaagcccagatcagggcctggacggcagtggggctggtggggcttgactctggatttaagcagtggaggcgcctggtgtttgaggagctgggacccattgtggctggagtgcctgtcagtctgaaggctgcaggattggctggaggaggcagtgccacatcccgcagtgcctcagggtgtcctaaggagcactttcactagaacaccaagttcttctgctttatagagatcccgtgaggccgccccctgcatggctaccccatgcccaccccataccctcccagcttctgcagcagcacctcctccgcacaccccagccgctgccctgtgtgtgccccccaccccgaggggctggcctggttgctgtgacggtgctactatgtgtgcctgtgcccgtcagacagcgagcccctggaaactgccctttaaataaacgctgctgagtgactagaacatggcacactgaagtctgcagggggctggtggggcctgccagggtagcctgcattggccagaagggcagatttgtctgggggccctgtgccctctcagagcctgatctgagaaggactttggcctggacctcactggaaatatggtcgggatgcaaacctgccccctgtcttccttccagagcacctggctggagtttaaggccaaggctttctccaaaagtgagcccggatcctcctgggagtgagtggtgggcctcaggacaaggggtgggtcgtgtgcccaggggactgttccctgggaggccacatctcctccaccactgcccttcatttatcagcaaaataatttcaagaaaggagatttcttcccacatacgtggagcaccgcgtggagaagctgggaagctccttcccattgcctgatcagctgtggctgcccccttaggtctttccatctgtctgtcctgggtgcaggagcagggtggtccacctgggagtgaggggctccccaggttggtctgtcctgggtacaagagtggggtggtccacaagggggaagggctccccaggtctgtctgtcctgggtgcaggaacaaggtggtccacacagggcgaggggctcccctaggtcccttctgctgtaatgccctcctctctcgtgctcaggctgctccaggcatgtgggaagctgaagcggcagctctgcgccatctaccggctgaactttctgaccacagcccccagcaggggaggcccacacctgccccagcacctgcaggaccaagtgcagaggctcatgcggtaagtgcagtgcggccccctgggtggccagggcagggtctggggcccgtacttccttcacgcagcccgagcttccctcggcagggagaagctgacggactggaaggacttcttgctggtgaagagcaggaggaacatcaccatggtgtcatatcctgacgccggggccccagccagcccaacaagcctcttggatctgctgcctctacacctgctccctggagggactatgggccccagggaagggggatatatgttccaccccatcagctgctcaccacctctctgaaggaaaataatgggacatagtggcccatgtgccttgtctataggaatacttcaagctgaaatttcaggaattcctcctgtcccaaagttaattcacaaaagccataaagaccctttatgtcagtgttgcccagctggcaaaatggtagtaggtattccacgaggggtggggaccggggggggggttcctgtggtctagtttggttgaaagggccgttgtccttcttagatcatgacagtgcacagtggcatgtaaaagctctagaaggcctacggcaaatgtttatccctgtttcagaagccattcctaagactatttgacccttttattatggaacactaattttatcgaatactgattttccatgaaaattcatgtaaagcagcttttcccatatcatctctgaaatgtccagcccccagtctcctgaggcaggtcctcagtgggcaggtgaaaggatgccagagggcctctttagccaccagctgctgcccttctatggatgtctcttcccctcccaaatgggagccttccaaactctcatgatgaagtgtaagggtttagcaagatcacagtgaggtgcataggctgggcagtcagctaggctcactcatgaaccaagtggctgtgctcacactccagcctcacgtgtgtctgacttaaattcatccctcatgaaaatgatgcataccatgttcctgtagggccagaactgcccgtgtcaaatgtgcaagtgttgaggatcttacagcttttcaaggcctggggagcttggaggtagtgggggatctgaggaagcaaggatacagggggcttagctgaaatggaagctgctggaaagaggcagtcctggccctcctgccaccatgactgggcacagctagaagcccaggacagaggcaggccgtccctagctcctggcttgtaagcaccttaactcagaccttcacctacctagaagacttcccaggcttggtgcacttcatctatgtggaccgcaccactgggcagatggtggcgccttccctcaactgcagtcaaaagacctcgtcggagttgggcaaggggccgctggctgcctttgtcaaaactaaggtaaccatttggacccagggcggggatgggtgggcctcagccaatattgggtagcccttcctggtgtgatccacatgcctggggctagcagagtgcgctgggcagcaggcccaaggaggcagtggccagtgccggcataaataaatgctcgacaagtatttgttgaatgagctagaatggagagaacggcaaggtccatcagttgggcatcagaatttaaaacaaggtgatttctgttaaggaagcattccctggaaattcttttattctccttatttaactgactgtttttcatgacaaagttgtatttttgatagggggaggacccctgccactctccaaaaaaactatacgtgtgtgtgtgtgtgtgtgtgtgtgtgtgtgtgtgtctgtgtgtgtgtgttcttttctttctttgttttggtgggggaggcaagtaaagtgtattctaatgtttaaaacaagatgggaagatgggtggtggaggcatgtgttggaagcccagccccgtctcccaccagttatgtggctttgggcagtacttagcccaagggtcagtttcctcatctgtagaaggaaataatagtgctatttacatcacagagttatgaagagtacatgagaggatacgtatcaaatatttagcatagcacgtagcacaaaatacagatacagttcattcagtacttactggtggcatcatcatcaccatcttcatccttgcccctcattctggagacagttggggttatcttggtacgtttctttctgttggttttctgtgcagtttgttgtagttgagatcactctgtatgtgcaactttgctaccatgttttcatttcacattatatcagatgctttccctcatgccattaactctttatagacatgatttttagcagctccataatagtccatcatgtgaatgtaacataatttattgaaccatttccctgatgtttagacatacagattatttctaggcttttgctgttataaataattctgcagtatacaccttgcatacatctgggtccccatctctgattatgtccccaatatggattcctagaaatggaattattaagtcagatgggaggaatgtttttaagattattgatggatgttgtcaaattactttcctgaaaagtacagtcaatccatggcagatttaatgagtaatcacacggcgatgcagtttggagcagatcgcctgtccctcccgttaagggtagaggagagggctcctcgagtctcttcccagccctgagaggtggcagagagcccactgtccctgctgccttccctggggcacttcaccggcagcactggtgacagtccctgcgtcaggcaggaggacattcccaggggagctaaggcacgtggtttctcaggccctgtgtttccatctgaccccttggtgaactctgatttggacttcccccctggctcagcacatcctacagggtcactcacctgtgccatcagttcccagcctgaagggcactaggtgagtgggcgaccccaggcagaggaggggattcaggagaccacaccttgttctcctgtgttcattaatgatgtccctggctattctctggcctgaatgatcatttcactaatttattttttttttaatattattattttttgagacagggtctcactttgtcacccaggctagagtgcagcggcacaagcacagctcactgcagcctcgacctcctgggctcaagcgatcctctcatctcagccccccaaatagctgggactacaggtgtgtgctaccacacccggctaattattttgtatattttgtagagacagggttttgctatgttgcccaggatggtctcgaactcctgagctcaagcaatccacctacctcagcctcccaaagtgctaggattacaggcgtaagccaccacactagcccagttcactaatttatggcatatgtgtatagtaaagttacacaaagcttttttacatatattttgcccccacgctaactggagggtagtccatccatccaataatgatttattgttgagcctcctgctctgagccaaggcagtgcccgggtactaggagaggcccctggcactcacggagcttctcggctgtgccctttccttccttcggaggtgagagctgcccaggcagaccaaggctgggagagtggtgatgcttgctgtcttttccccaggtctggtctctgatccagctggcgcgcagatacctgcagaagggctacaccacgctgctgttccaggagggggatttctactgctcctacttcctgtggttcgagaatgacatggtaggtgaggctgagtccctgggccaggacgggccacacacacttcccgctctgtaactcttggattcctttcttctgaattgttgtctgtctgtctcatcttctcttcttgttgctggtaagcccagcaggttgggagccagagttcagaggtcacattttcacatgggcgtttaactgctttgtgatccctctgcccagctgtctggcaaactcttgccattgtccacgtggcatccaggcacacatgtgagcagaaaggcacatgccccactgtgagaaatgcgactcagaccacacactttgtcgctagtgcttccatgtcgccagcgtcacatgccaagtgtggcacatggtcatccctgtggcataggcccctgaactcaagagcataggcccctgcttgaagcagtgagccaggctgcctgaggagacactggtggtgtggctcggggccctggcctccaggccctgcactgcttcttctgggcctcactgttactgcagagtagggtccagtggggggagcttactatcattgtgtctccatccatacaacggggtcagggatccctgccccagccactgcacagggctgtgaggggtgcagtggctgggactcctctcctcctgtctctccctcctctctgtcttttccctttcttcgctttcctcctgtttctcttttatttgcatctcgcttgtcaccataagtggttgttccagctctcaggagtggttgttccagctctcaggagtgttcctcctccctcgcagcccttggtctctgggtccctgcactcctgtgccttcccctgcccccaccctgcactctttgttcactgagggtgacagccatccctttccatagggcagggcggttactggggctctccaccactgttctctcagttaccccctcacagccctgtaaagtggctggggcagggattcctgaccccgttgtacggatggagacacaatgatccggagatcagacgccatggccagggccaccgaggctgtaagtgaggaagccggagcccaagctctgctcccccggcctgcaggctcccagctttcctccgtgccctcagaagtgcccaggacgtgtgtacaacagaagtgctagaaaattcctgtgacctttaccttcacttctagggagggacaggagtctgtgtgcttgggtggccccgtggggtgataaagtgaggcagagctgtgggctggagaggccaggtttgaatgccagccacacagcccagccggtgccgtgggggcagccctgcacactagggagtccactccccctgcagggcaggccacggtgcccaggcaagcatcagctaagtgccatgttcatgcctggcacacacggcacgtccagcagatcttaattcccttccccaccttatcccaccctgggaattcccaattctttcagagcagaggcttgggccttttgtgaatgctctgctcttcaagacctgtatgacagccctgcagggtgccctcctgagcgtgtgtttgtggcctgtacaggtccaggtattgacggtaatgagagctaccctgccggcccttgaagctttgtatactttttctctaatgttcataaggtgactgttgtcattctgacttcaaagatgaaaaaacaaggtccaggcattttcccaagcacccagcgcacatgacagagccaagccaggccgcaagcccggtgcgtctgactcaggcccttgcactacccccacacccactgcctccctgtcctccctcctcaggggtacaaactccagatgatcgaggtgcccgtcctctccgacgactcagtgcctatcggcatgctgggaggagactactacaggtgacgctgcgttgggagccactggggacagatgcccccatttgggtgataagtgctcgcctctgccgggagcagcttctgcttcagcagtgccctacctcagacccagaaatccacgctgggaacaccttcccggctggccctgtgtgcagcgagggaggacgggtgtggagggtacatctgtgttcctaccaccttcctgctggcatggtcttggcagcacggggaacgtctgtgcccggcccagaacatccccactgctacctcgtagccaggatgccactgttaggtcagtgaggaaccggagcggttgtcaaggcccacatgcaggggcctagtgagatgaccgagggcatgggcatttgcttgcgagggcccagagaggcctctggcgctggaggagtgccacagcctcactcctgaatcccatcctccccttcctccccaggaagctcctgcgctactacagcaagaaccgcccaaccgaggctgtcaggtgctacgagctgctggccctgcacctgtctgtcatccccactgacctgctggtgcagcaggccggccagctggcccggcgcctctgggaggcctcccgtatccccctgctctaggccaaggtggccgcagtctgcctttgcatcctgtcctccagccacccttgcttgccactgttccccatgacgagagcctcctgtctgcagtggccatcctgaggatagggcagagtgcccagggtggccccagggcttctaaaaccccacctagaccaccctccatgtcaggtactgagcaaggccccagatccttctctctggaggaagagggaagcccaggggtcctgtttgtaaaacaacggtggcaacagctcctcttccagagctgcctctgcctttatcctgggagatggggaggaagccccatctctgctgttccctgcgtggaggaagcccacccagcaagctctctcctaccccaggtaaaaggtgctcctttgcctgggtttgaattccagcgctgccacttcctctctgcacctcctggcaagtttcttctattccccacgtttaaagcgatggcacctccgtcccagggtggtgtgaggattacccagtgtggtaggtgctcaataaatgttggtcattgttatcactgaagcccaacatgctagtgcttctagacccttctgtcagtgctgataagcccttgctaagtcccagccccttcatgcttggctggcgtctgccctagggctggggttctcaagcccctggccctggcccagagatttggattcccttggcggccgtggagcccagcctttgatgtctttcaaagcttctgtggtgcgccctggattgagaaccaccacccgaggggtacagcccctctcttccaaccgagaagttcctgtcccagaatggacccagggacaagagaccctgagagccctgggactgggagtgtctgctcctctgaggccaggaggccggtgctgggccagagaggacggcgtggcgaaagtcagcgtccactgcagcacaggatcagatggccgtgtgctgtgcatgcaggagcctcgccttctgtgtctttagtcttgagccaaaatttgctcaaagactgatctcttccttgcagggaacagctttggggctgggggaactagaacccacatgttggtctaaaccctgagaaggtggcagtgaggaagtatcccctcaggtgactggatctgtgttcctccttaacatcatctgatggaatggcaatgaaaagcgtggattgtggaaaatacagaaaaacataaaggaaaaaactccaatcccctgagcccaccactgttcaggacccctgcttttgtcacctactatttccctttagtttttagcagcggctggatgtgatatgtctagtttaaccagtccccttgatctttctatataataaataacacaggagtgaacatcctgaatcaga

SEQ ID NO: 1199 - DNA, 40415 bp, Homo sapiens
cggcttgccaggagctggagggggaggtaggcggggcggcgcgtgacctaaggcctctctgccgcgcgcgcaggtacggggcagaagtcgcaggtacccagctgctgcccacatttctggtccagagtcccgaaccccgagcactgggatgcctggctactccggtgggtgggcggcgctcggagcgcggggataccgaggggcgggcccccagcttagagcgtgacccgaccccgcctaatccttaggcgttcgcccaccatttcccagtcccgtagagctggggccagacaccgcacagccctagtgctgttaccagtcgctgcctgcgccccgggggctgcgcccagcagcttcctggcccttttccagccattagcgtccgttttccagccctgctgccccactgaggccccttcccacagcagtatcaccagccccagccccgcgttgttactattacttcccaggctaccagatccttttctgctcatgttccgacgtctcttcctactccagggccattattggtctcttctggacctttcagagataagagaggacctcggtagtgtagggcccagtcctctgggaacaagggatggggagttttaggctgctgtccttggttccagtaacagagataccccctccacaggcacccaaatatgctccatagaatacaatgagtgtggtcctgtggaggcccaatccaaaatatctagagctgagaagagatagagattttacaggccgtcaaatattcaatgggggtcgtctctagagacttttaacaaactgtattgtgtacccacagattgcagaatggtgagcaaacatttgagaccatgttgctaaagcattaagcttggagaaagtgacagtaagaattagacaatagttttgaagtgaccaagaggttgtcacatggaagaattagaccttgttttgtgttttcctgcagagcgttatccagactagcgagtgggaggcagatgtaaaatctggaacgcagattttagtttgttggaaggagaaatgtaacatagtgaaccacgcatctctggagggtgtaaagcagagacagccaaggtaatttttggaaaagagtgcaggagagtagagtaaacgatgccagggttccttccgactctgaaattccgtgatacactgagctgtctttctcttgtggaagtttgaaagccatttgataaagttctcttcattttttagaaatttgccctgctctggaattctgcatgttcaggttacttttggactgtcaagatgacagttccttaatttgggttccattattaccacagcaactggtttatttgtatagctgtccacacctagagcattttcaccctgtcatttgattttatcttccgtgaagcttgtggtgtgtttcccttaactgttcgagaaactaaagcccttactctgaagtctctgcaagcctccctctttgattttgaagcatgattgtcaccctcacagaaagctcttttgaaatataccattcgtttaatcctgctgggtcacatgctctctcacgagttgctgaaatatctattccttgtgtttatttcagagccaaggcactgatgtttgaactggaaacttcaaaacgtttaataagagtcttcaggatgggtttgaactagacaagctagaaatttctttagaacaccagctctagcatgcatctcccacttttggctttcctggagaggagcttgaagaggtggttctgcagacagccacagtgatacttaggaaaccagaggaatggatttgacttttctgctaggattctctgttatagtttctccctgagttgtaagaggcatggaaatatacatgaaactgaagaacctgcaaggaagggaagtggaactttccatgctgagtgaaaactaaccaagtggcagttgtgactgaaaacactgaaacctaccacgtccagattcactggattgggggatagaggaacggtcacagctagggagaaagaagtgataccggaaaagaaaacctaaatgaagagaatgaggatgactgcacagtagatggccacctctacctccacagaggcaaagtcagcctcgtggtgagtaacaaggcctgccatggcatagcttttgctgggctgttggttagagttttggggttaattgaaaatccccagccagattgtgttaattttattaacataacaataaaaatgccattttcctcagagcagctgaatcaagcacgtgagccatcgctctccaaagctaacatgttttaaccttgcaagcctctcccaatgtttgaatgagtctggcattgctgggagattgtagaaaagatagccacagcctgatcatgcagcgagctttgatgataatgtgaatattgtagtcttcaatttgcagagatgaggtatggttgcatttgagaattacagcatgaggagaggtctggccagactgggtatcaaggggtattactcaatgtctgtctgaaacccagttcccttctcaaccctaaatgcgttaatcctttcccataattaggtttagcaaacatcagtcatagaggagatgaaggtgaaaagcaggtttagctagaattagcaggatttagtgactgattatttatgtggaagtcaaaaagatggagcagttcaaaatgacacccaagttttctttcgtgtgcccgcacaagcagggatgctttcatcaagagaacgtggggacaggggaggatggggtgcacatggagtttctgagttggctttgaaacttttttgaggctttttgatctgagcttaccctgcagccagttgtacatccagccttaggtattgggaaagaggacagtgccaagagaccaagttggtgctttatttatttgtttgtttgtttttgagacagggtcttgctctatcctccaggccagagtgcagtggcatgatctcaggtcactgtagcctcaatcccccaggctcaagtgatcctcctacctcagcatcccaagtaactggaaccagaggcacaccccaccatgcctggctaattttgtctgttttttgtggagatggggtttcacggtgttgcccaggctaatctcgaactcctaagctcaagcagtcctcctacctaggcctctcaaagtgctgggattataggtgtgagccactgtgcccagccaagttggtgctttttcatcaggaaggcagggtgggagccatggagggaggcttcagagagggcatagatccagggaagagagcagatgacacattggtcccattgcttgtttatgctatagcctcataaatgtgttctcagagacttagaagtaaaacaggtccagccaggctcagtagctcacacctgtaattccagcactttgggaggccagggcaggattatttgagtccaggaatttgagaccagcctgggcaatatagtgagactcgtttctataaaaaatttaaaaaaaaatagccgagcatgatggcacactcctgtagtcccatctacttgggaggctgaggcgggaggatggcttgagcctgggagattgagtttgcactgaaccgcaatcgcaccactgcactccagcctacagggctacaaagtgagaccctgtaaaaacaaaacaaaattgaggcctggcctttgaggtgtttgttttatggtcttaaagaggtaatcagataataacattacgtaatatagttatactgcagtgtagtctgtaagagtctttgaggaagaacagagggtcatggaaattcagaacaaagagatatctctgggccgagggaatcaggagacggttaatgaggaagtgtgcttgaatgatacttggtgaggtttggcatggtagagaggagttcagagtttctctgtaaattctcataggcccctgttttttccctgttacgaacttttggactcactatcctgcattgaaactgcgtgtttgctcagcaaccgcggagcacactgtgggccctcagtaaatgtttaagtgaatgcatgaattcctggtagaagggctgtttctggaaatctttgtgctcagcacttatgaggagtgcatctaatacatccctaacttattttgttatcagagccttaaaagacagcgtatcagaccatgtggttgtatagttaaggttcagtgtttcaaataagagcagtcattgtgggcgcctcgtttttttttctagctactcgtgtcttctccggcagatggtctaacggctggatagaggcatatttttagtttgaatttcctgcgcttacagaatggttttatctaatttgtagctactggggttctttattctctggggccacctgaaggctttcaaacacagtaataagccctcctcgggctgggaaacaggaagctgtgttttaaatgccgtgatcactggattaaaggaaacatggctccactctgttctcttgccaggtggaattatttttttctttatgatggttccaaggtaaaggaagaaggcgatccaacaagagctggcatttgttacttttatccttcccaggtaagccacacagcattttattgttcagtgaggatcccagtgcctccaagtggtgacttttcaaaagtatggggtttacattaggacagtttggctaatccagacaatgacatttctactgtcttattcttagttgtactatttcttgttgttctggtcttaaaatttccaggcagctcggcactttcatcgtctttagctttctatttccatcatgatttttgtctgcctccctctacccccaattttttgatcagcttggtttttaaaagttattattctgctgggcacggtagtttatgcctgcagtcccagctctttggcaggctgaggtggatggatcacctgaggtcaggagtttgagaccagcctggccagcatgatgaaaccctgtctctactaaaaatcccaaaattagctgggcgtggtggcacgctcctgtaatcccagctacttgggaggctgaggcacgagaatcgcttgaatccaggaggcagagttgcagtgagcagagactgcgccattgcacaccagcctgggcaataagagtgaaactccatctcaaaaaaaataaataaataagtttgtattcaaacatatacaaaaacagagaggcaagtatcatgaaccctcatatgccatcagtagcttcaacaattatcaatactttgccgatttttttttttttttttttgtgatggaggctcactctgtcacccagggtggagtgcagtggcatgatctctgctcactgcatgctccacctcccgggttcatgccattctcctgcctcaacctcccgagtagttgggactacagtcgcccgctaccacgcccggctaatttttgtatttttagtagggacggggttttaccatgttagccaggatggtctcgatctcctgacctcgtgatccacccacctcagcctcccaaagtgcagggattacaggcgtgagccaccacgcccggcaatactttgccaattttatgtgacctatctgaacctcttcttctctctcttttttttttcctggagcaaattctagatgttgcgtcatctcaccagtatcaagcaacatctctaactgaaaagggcattattttgaacattaccacacctaacgaaagttacagtaattagtaacagtaattccttaatattacctgatacccagactgtattcaaattttgccttattgtcttggatattacttattctgctcttccttccttccatgcacccatacttccatccttccatttctttttctttttcctaataaggatccaaacagcatccacatattctatttggttattttgtattttaagtccttttaataacagtcctcacccagccactcatctttttccccctcctctatgccattgaattattgaagaaaccaggtcatatgtgtagtagagtgttagaatgtcccacactctagatttggctgatttgttcctcatggtggtgtcatttaatgtctcctatccactgtatttcctttacattagtagtaagatctagagtcttggtgaggttcaagctcagttttctaggtaagaattcttcatgggtggtgtatacatttcctgtgtatcccatactgtctggctgtcctgtgcgttagttaaggctaaggttgattaggagattctgtacattccctcctgtgactgtgctctgacatggatagttggggttaatctgcatccctctggccactccgtatgggggatttgagtaggagtgaaaggctcatgcttctgctaagcatatgcctataatcctagcaacagaaatgcggttctgtgcagtcatcgcatgtgttcctgctgggtgttctcttagggttcagtcatctcaggtaggggttggcaaactttgtaaagggccagaaagtaaatattttaggctttgcaaggcacataaggtttcaatcacatgttcttctttgttgtaacctttaaaaagtataagaaccattcttagcttacaggccataggaaaacgggtaacagactggatttggcttgcaggctttagtatgctgtaagaaatgacttaagagttcaagaatttcagcttcctatctggaatgtgctcctttcccacagaccctgctagaccaacaggagttgctttgtggacagattgctggagttgtccgctgtgtttctgacatttctgactctcctcctactcttgttcgtctgagaaaactgaagtttgccataaaagttgatggagattacctttgggtaagttgaatggcagaatcagtgctgaagtgttgcaatgataagtttaggaagttatgttgtttctgagtcttgaatttagaattatctgcccccaccaacctcatccatgtactgtgtttagtaatcaccctcgcttcctgtggtactctctgcaggttttcatcatcaagtgctttccaaaacatttctaacatattctgcattgcacacagctggtttctcctttcctttcaaagacttaggccaacttgtggaaattctgtttactctgtgttgtaaattgagtttttatcatcatcttttcttctccatgctctctacacttactgggtaagtgacccagaaaaaaatgatagatatatgttaggttttagagaacccattaaaaaaaaaaaaagaatattgcttgagtccaggagttcgatatcagcctgggcaacatagtaagacccccgtctctataaaaaatttaaaaattaaccgggtgtggtggctcatgtctgtggtcttagctactggggaggctgaggggaggattgcttgagcttaggagtttcaggctgcagtgagccatgattgccactgcacgctagcctaggcaacagagtgacaccctgtcttaaaaaaaaaaaaagaataaaaatcattcctttacattctaatagtagcatataatctaaagtgctgtttcccatggctacatttattttaaggcttcctgaggtaaagggatgcttaagtgtgggatgctatattcaactttgtaggtattatttccaacattttattacgaaaattttttaaagtactgaacagttgaattttacagtgaatactcatatacctcctcaattctacagttagcattttattatagttgttttattacctatctattcattcctttatcctcccattaattcaaattatttttattttattttattgagacagggtctcaatctgttgctcaggctggagtgctgaggtgtgaccttggtttactgcaacctccgcctcccaggctcaaacgatcctcccatctcagcctcctgagttgctaggaccacaggcatgcaccaccatgcccggctaattttttaaactttttctagaggcagggtttcaccatgttgctcaggctggtcttgaactcctcagctcaaggaatcctcccgccttggcctcccaaagtgctgggattacaggcgcgagacactgtaacccagccccaaattattttgttacagttttcaaagtaagttgcacacattagtgtactctccacacagatactctctctatcatgcatatcatcaactaaaatttaatgtttggggctgagcgctgtggctcaggcctgtaatcccagcactttgggaggccaagacagtcggatcacctgaggtcaggaattcaagaccagcctgaccaacatggagaaaccctgtctgtactaaaaatacaaaattagccaggtgtggtggcacatgcctgtaatcccagctactcgggaggctgaggcaggagactctcttgaacctgggaggcagaggttacagtgagctgagatcgcgccattgcactccagcctgggcaacaaaagcgaaactccatctcaaaaaaaaaaaaaaaaaaaaaagaaatttaatgcttgtttgtggttacatgctttacaggcgtctgtcttgccacttaacacttgtgaaattcgttcatgttgttgcatctatcagcgttcgttccattttattatcaaacagtattccgttgtctgaatatatcacaatctgttcttcttttgatggacatctgaactgtgtccagttggggatattaaggataaggcttctgggaacattcctatacaagtattttggtgaacacgtgttttcatctctcctgggtaaatatccagtcctggaattgctgggtcatagagtaggtgtatgttggattttataggaaactgttagaacttttccttcagtggttgtaccattttacattcctaccaagaatgtatgagaattccagttactccacctgctcatcagcattgagattgacagtctgttcatcttagccattctgctggatgtgcagtggtgtgttattgtggttttagtcttcacttccctgatgactaatgatagtgaggccttttcatgtgcttaatgaccacttgaatatcttcctttgtgaagtgtccattcaaagccctgcccattttttaaattgggttttatttttttaattgaattgtagttctttttatatcctagataccagttctttgtcagatacatctttttaaaataatttctcccagtttgtggcatgcctgttaattttcttgttgtcttttgatgagcagaagtttttcattttaatgaagtctaacttataaattttatctttttatggttattgctttctgtgtcttgcctgaaaaaaaccactgcctactccattggaggagatagtctcccttttttattttttgtaagaatttgatagttttagcttttaaatttagatctgtaatccactttgggttaatatttgtgaatggtgtgaatagaggtcaaggatctttttttttttttccacctggataaccagttcttccagcatcattgttgaaaacattttcctttccctattggatttccctttggttcctttgccaaagatcagatgaccatttaagcgtgggtctatttctggactcttttcggcttttccacagatctgtttgaagattctgtgtgagtaccacactgtcttgatttctatagctttatagtaagtcttgaaaccagatagtataagttctccaaccttattctttctcaagatagctttggatatttcaggttctttgtgttttcattgtacaatcagtttgtggtttctgaagaaaagctggtgggattatgattgcaattgcattcagtctgttcatcaattggaagaattgaacacttcttacatgccagactgttgtaagctcttggattacatctgggaacaaagcaaagatccttgtgctactgtagcttacattcagagggaatttttgtttatttgttttctgtcagggtttattagtttaaatatctgatgattcccttaggacagattcctagaggtagaattactacatcaagtaataggaactttttcaggctctttaaacatatgaccagataactttctaactcagcaagtacttttttttttttgagacggtgtctcgctctgttgccaggctggagtgcagtagcgcaatctcggctcgctgcaacctctgcctcccaggttcaagcgattcccctgcctcagcctcctgagtagctgggactacaggcacacaccaccacgcccagtatttttagtagagacggggtttcaccatgttggtcaggatggtctcgatctcttgacctcgtgatccactcaaagtgctgggattacaggcatgagccaccgtgcccggccaagtatttatcttctgtggaactaaccactacgctcagcattttggagatctaggactgggaagattgcggtcagttcttgctcttaaagcactctatccagctggagaaacatgatggccattcatgaaggagtttgagtcctgtccattgtttgtaatggaatccagattaaacatctactgtccaaataacagtcctaacaatgcaagggtcagaaaaaaggtcagcattattggctcgaggtaatagaacagacctcatggagatactgaaattggtggtgggcactgaaggttgtaagttctggggaaatgaacaataaggaaaaggacatttgagattggaaaacatgaattgaggtacagaacttacttgtccatggagattaacttggccagaatgaagggtgtggactcagggacaatagaagatcaatttcgatgggccagtgaagtcaggtaattgagagccctggatgccaggattctgggcttggactcaaagagaaggaagatgcttgtcttcctggtttctctctttacaggtgctgggctgtgctgtggagctccctgatgtcagctgcaagcggtttctggatcagctagttggattctttaatttttacaatggacctgtttccctagcttatgaggtacaagtatggggttgaggagtcttacattgggcctctttataaaaaccggtattgccagaatgcagcacttactctggggtcttgtatacttcatataaacacattgtgtctggggacaaggtcaggagctcttggaggcccctcatatgcctttgggcctagtggcataggtcacatttattccaaatgtttatccccatctcctccctgggatgtttagaaagcgcaggccctgcttgccacccccacgcggcaggcgccgtggatctgtgatgggataggtttaaaacaggtcctcccttccggtcagtttcctgtgtgaggaacaatttttgaggtagttgggactctggccaaagaatctgtccctcaaaatctcagatattgacctgaggctctttctgttttagaactgttctcaggaagaactgagcacggagtgggacaccttcatcgagcaaattctgaaaaacaccagtgatctgcataagattttcaattccctctggaacttggaccaaactaaagtaacattttcatcctccttattcattttatatgtaagactagggcttctggatacttttttaatattcctgaagtgaactatatctggaaaagtgagtagaatgtcacttctcaggcagggccatgacacggcaggtcacctctcagcctcatttcccttatccaaagaatggtgtcagcatacctgccttcttgaactgttttgatgatcaagtgaagcagtacctcaaatgacaccaagtaaatgctcagtaaagggaattagtattttgttcatgcctcagaagtgttgaactcagtaatctgaaggccgcctctcttgatattcatatcatatgatctagttattctcagcatcaaaaatgcccagcatgaacatttcaaaaacaaggttgctgtctttgagagagaatggttgggaactgtttttgtatctctgagccgctccgtttgcggttggcactcagtgaaacctaggctgcttgtgtggctggcctgaccacctgtgctgccccattaagagccagctacctgagccctgactcacagccctctcctgtgtctcactgcgatagtaaataatgtccctgtagcaggggtgtagcactgtggctcagccttcacagagcatgactccaccagacatggggaagggttttccctgctccagtctggaaaacttcctgtagctggccccagagctttatagaatggctggctgggatggcacagtcttgaggctatgaagaataaacttcttaatgtgtcagcagctccggaggctccattaacactagttctaacagctggtggatacttgctggttctagctggcaggtggaagtctgaggaggctgctggttattgctggctcttcctgaccaggtccagatgcttttcttgtatttttagggacttctaggcccctgactccatacaaggaatgtggaactgaggcatatttccccgagtgaaagagcatgatgttttcattttatgtgatggaatagagtcatggaacctggtcagacatcaagccacctgtatcaccatggggattgtgcttcagaaggaaagtggaggatagggtaggtgggtttcacctggtaccatgacatgtatttataggatacaccctcctcttctgctgccgtgaggtcttagcattgtcagggtagacagtcggtctcccaggccatctactttgacccctttgaatagccatatgccatatttgctgcaccttctagcttctggacaggcctccttgttctaagaatttggcatttagtggtgtcagcagttctgagtatagagaggtagaatagtcccaagccatggcacagctttcactgtgtgacacattctccttttccaggctttgagctacaccctgtccagctgttctgtacaaccctttccccttttctcccttcctgattgtgagcatgctgatgggtgggcatgatgcctcttgccctgcacaggtggagcccctgttgttgctgaaggcagcccgcattctgcagacctgccagcgctcgcctcacattctcgctggctgcatcctctataaaggactgtgagtaactccagacccctttcttccagccccattcccttgctgcacaactgaccatcagccacctccagatcacagtggggagcccagtctctggccagttccaagtgggctggttcggcaaatatcaggtagtttagatttgactcagtttagaaagacaggtgtgtacctgtctttgagcaaagctgagaaattggaaatagttgtgttcagaaaagagttaagaatgtccctataattctcagtatggggcatgctggaatagttgtcagtctgcaaaatgctaatgcagagtcccgagcgttgccagcagccagcactgtagtcaagaggcatggaaggggcctgctgtgaccctcctcctgctgcccagagaccctggtgtgcttgcctcagctcagctctgcaaagcagccttacaggcccttatccagctgccttcaagcctcttggctgggccagtgtcttggttggcctctgagaattcacttcacttcttcatgtagttggagggcttcttggtgaatctgagtgcccaagagccactctaggtcatctaaggcctctctcctcatggagggtttgctgtcacagcccagggcaggcagggccattgcgctgtgcccggagcttcctgaggagcaggcaactactgtgtaaatggagaagcactgaggctctcgcaggggcccttgggccagacaggctcggccccagatcctcccttctttcgccagccatgcggccttgggcaagttgcttagcctcaattttctcttctgggaaatagacatcccttgtgaagaatgaaatgagatgacagatgcggaagaaccgagcatagaccctggtgggctttgcactcttcttccttgccccggttcttatcatgatggttctgaatcagctgtgggatttccaagttcgtcagtgacatacccaccaaagacagtattttttttccccttttctcattttgcatttcttaaatgtatatatatatatttttttttcttttttttttttttgtagggacgaggtcttgctatgttgcccaggctggtctcaaacacctggcttcaagcgatcctcagcttcccaaactgcttggattatagacataagccactgcacccagcctgtatttacattatacggctaatacatgaatacattttcactgtaaacaaatcaatcaatagaggaacacacagagcacaatttaaaagccccccttctttcttcaccatttttgtttgtttgtttttgagacacagtcttgctttgttgcccaggctgtagtgtagtggcataaacacagcttactacagcctcgacctcttggactcaagtgatcctcccacgtagctggaacaacaagcacttgctaccacacctggccaagcttttgattttttttttttttttttttgtagagatgggatctcactatgttgctcatggaggtctcaaactcctaagctcaagttattctcccacctcagcctcccaaagtgctgtgattgcaggagtaagccactgtgcccagcctctccctcactcttaacctgtcctcaccattggcagtttggtgggcatcttgctctttctgtgtgtttgtccccactggtacatgtatgcatatattgcttttgtttatttttgctatctccttaaataggatcacatggtttctcaacgcatacagtgaagatttccttaccggttcatatgggtctacctcattcttatgaggactgcatactttttgggattctggctgtgttgtgctttactgtcttgttgatgaacattttggtggtttactcattttttaattgtttttaccattctccctgtaatgaatattcttacgcatacatcttggtacaagctgagtcaaagggtttggatattttaaatgttggtaggaactgccagagtgccctctgtaagggttttaccagttgaaactcccaccagccaagtccccaagatcctcgtcaacacgggctgttaggcatctttaaaatttggagtgttttggtgtatttcgtctcatggtgttcttgttctgtgtgtgacctcctaggattgtcagcacccaactcccgccctccctcaccgccaaggtcctgcttcaccgaacagcacctcaggagcaggtattgtaaagtccacccacctggctggacagcatcccccagagcactggtcactgagcctgaggctggagggatcaggagcagaggccgtggagcagttgtttcacttggtcttgtcaggaccccaagtcctccaatgtcattctcctcagtagtgaagccattggtgaggctgaaagaaaatgttttcttccacgagctaggcctggatagttgttttttcttcaaaccaaggaaatcttggttgaattcgacttcccataagaatttgatgtctctttatgtcaaagagatgttagacttttcagagacagactgtaaaggatgtgtctttagaaagatttagggggttgggcacggtggttcacacctgtaatcccagcactttgggtggctgaggtgggcagatcacttgaggtgaggagttcaagaccagcctggccaacatgatgaaacccatctctatttaaaatacaaaaattagctgggtgtggtggtgcacacctgtaaatcccagctacttgggaggctgaggcaggagaatcgcttgaacctggcaggcagaggttgaggtgagctgagatcgcgccactgcactccagcctgggtagcaagagtgagactctgtctcaaaaaataaaaataaaaataaaaaaataaggaaaacaaactcttctaaaatacttccattttatatttatttaattgtttttatattgaaaaaaaagccatgcatgctcattgagaataaaattgcccatctttgaactgtacagggatagccactgccagcatctggcatatctccttccagtcctttttttgttttgtgtatgaagctgtggtttccagcgtatcatgaggctgtctttttacatgtattagtgaacaggcatgtaaaatgctggtagggctctattcagcctcctcagccactgtggctatgggtgtcaattcaagtagcctttctgggaaacactttgataatgagaacgttaaggatgccctttatttttttcctaataatttgacttctaggaatatatcttaaggaaataatgtaactgctgaaaaaaatttatactcaaaacttgatcacaacaagctttatgaaagtgaaaaatcagacaaaacttgaatgcttaaagtaggaggtggcaaattatggcctgtgggccacctgcctacaaatgaagttttatttggctgcttttgagctataatagcagaaccaagtaggtgggacagagaccatatgccctgcaaagccaaaaatatttactgtcttgtcttttgcacagaaagtttactaattactggtctaaggtaggtaaatgattaatttactcatatcacttaaaccttcataaaattttaatcagccgtttaaaatggccaaagatgttttagtggcaggaaatgcgtgttactgttttaagcagaaatatgaaattttatatagtgtggcctcaaaagtataaaaactgcataggcttaaggaaaaaatacccaatattaatagtactagcttggggatgagggattgtatgtgattttttttttcaacgctttgtctagagtaaattgaggttaggcttagtaatctaaaacatagttttttaaaaatcaccaaaaaaggaagaacaccatatcattctaagattgaaagtcattttggctagaagagcagttcttgtttggtttggttttgttttggtgggttcttttggaaccctcagattgaaacgagagatgttttcatttttgagaaaatcatcaggttttaggccctgattgtgaaccagaacaaacgagagattgggtatagcattttgtttaagtcaaatcctttatcgtgagagtcacagtattttgacatttttattataatggaatttatgtgaattctacatcagggctgtggcagatgtgactgtattctagaatatgagttccccaaaggtgtaaaagagaacaggaatcctcaattttattcccagaagggagagagactgagaaaatcagaacgtagagtgtgatgtgagtttgggtggagctgctgccttgcagcctgtgtgggcccaggttcttgcttcatcccagccatagtgggagccagcagcttgggggagcttctgttccatctgcttggctcttagcatgtggttgggacaagctttctgggcctggctaagttttatgaacagatggcacagcaaattcctgatggttaggtcaagaggagaatgtggtgcccagcgccaacttctgtgtgtgtttgttttcagagactccctacgggagaggatgccccgcaggaacatggtaagtagtgaggcgcatggttgcctcttgagaacggcggtcttttatgctacctacccctgtacaagttatgcgaaggaaaccaagccatctgcatgtttatttcctctgctcataataggaaaatggatgttatggagcttcaagaatcgagttacccaccagaaccctaatggtaaagctatgattttaggcatgctgtcaaatccctgctttcagaccctccttaacttcatattgtgagactgctcggtcaagtgccaggagattgtgattgggagagggtaaggcaaacagcgactgccagaaagaccttttgcaggatgtggaggcgtcctcaggagagttatttcgatttattctgaagcctgagttggagcagatccctttcttagcttatatcttcttcttgtaaaagtgcttttcaacctttctctcccgaacatcttccttctccaaagctgggagtcatgttgcctgcagggactctttccttactgggcccaggagttcgaggtgcagtttggcaacctgtgtcctggctgaggaatgcactcacagcacccctttccgagcccacgtgtgggttggatgcatcacgccagtgcagctattgccccgctgccctctctggctcaggggaaagtcctgttcatattgctttgcaattccaggagcggcattgcccccgaatgtccagattatccctgtttttgtgaccaaagaggaagccattagtctccacgagttcccggtggaacagatgacaaggtaatggagtgcacagagagttaaccttgcaccacacctgagggaccccatcgcgtgattggttaaaaaacaaacctctgatacatcccatcgttccttaattccatcttccccatgccctgtcttgtaaaggagcatctgaatcttgagtttgttaagaaacagagtggcatagagagatgacattggctttcatatcccagctctcttacttataccagctatgggaccttgggcaagtccattccctgcctgagcctcagttttttcatctgaaaagtagacaaaatagtatccctttcatgagttcattgtgacacttgaaaatagtataggtacagcacctagtatagggcctgatgcgtaggagaccttccagatgtgggtcagtcttattcagtgggctctgccattttcagtaggtgagtctggtgtcactacgtaaagccccaagggccagatgttggtgtatttttactcttgtgatttaactctggtggcctcttaggctctgtggcctcaggcacccccttgtccttgatgcctgtgctttagtcttcactgtggaagggcacttgccctgcagtctgtcaacgtgccccttccttacatctctcttgtttgccaggtctctagcatctccagcaggactccaggatggttcagcccagcaccatccaaagggtgggagcacatctgccctgaaagaaaacgccactggccatgtggaatccatggcctggaccaccccagatcccacatcccctgacgaagcttgtccagatggcaggaaggagaacggatgcttgtctggccatgatctggagagcatcaggcccgcaggactgcacaactctgccaggggtgaggttcttggcctcagctcctccctggggaaggaactagtctttctccaagaagaactcgacttgtctgaaatccacattccagaggctcaggaagtggaaatggcctcaggtcattttgccttcctacatgtgcctgttccagatggcagggctccttactgcaaggcatctctcagcgcctccagcagcctggaacccacgcctcctgaggacacagccatcagcagcttgcgccctccctctgctcctgagatgctgacccagcatggagcccaagagcagctcgaagaccatcctggccatagcagccaagcccccattcccagagcagaccctctccccagaaggacccgcaggcccttgttattgcctcgcttagatccaggacagagaggaaacaagcttcccacgggggaacaaggcctggatgaggatgttgatggggtctgtgaaagccacgcagcccctggtctggaatgcagttcaggctcagcaaactgtcagggtgctggcccctctgcagatggaatcagctccaggctgacaccagcagagtcctgcatggggctcgtgaggatgaatctctacactcactgcgtcaaagggctggtgctgtccctgctggctgaggagccgctgctgggagacagcgcagccatagaggaagtggtgagtgtcctcagaccttctcctgcccctctgcggcctctgccgatctcctgtgcttccctcacagcactgtgccaacacccagggaagagataaaggctcagccctcagttgtgtgaccctgggcaagacgttcttgtttagacgatggaggtattacctgcctctgtgggtttttgtggggggtaagagtgagtcaagcgcatagcactggtggtgcattggcatccaacaagtgttggttctcttcttccgctgtttctagttttgcagagcgcaggccttggagaaagggaaggcctgagatggaatcctggcccttgtcctctagctgtgtgaacttgcccacagacctttgtccccttgagccttggctaactcctcagtcacgtagggatggtggtagaccttcctgttccagatgcagtgagataatgcaggcagagactgcacacgtacgtgcatgtgttgtgccgcccctgctcatggcctcatttcctagcctggacagctctaggttctgtgtcagctggaaactcctccgcagtgtgtcacagcctgggttgggagttccctagaaacccagtgtttccctccatagccccagcatcgtacctgatctgaagctccttcctagaaggctgggatgtctgaaatcctgcctggctctggagggctcttaaactattgcagccccttccccgcttagaggcttagagtggtaaactgaccttccctggggcccacgctggagattcgttgctatagtaacagccttgctttagtaggcagggaaagtggtagcagtaagaacagcaggttgaaattgctgcagggcaaatggtgtcttggggctttccttgtttttattcttaaatgtgtattattctaagctgatcttactatcatgcagggcttgtgaccctccataaatgagctagtcaccttgaaatacagaagaagagataagactgcacagcagcttccttgcacagagctcctagcaagagaatgctctctggagctgtcaggcttctctgtgccctttccacagacgctggatcactgagttatggctcatttgcttcctgtatccccattcaccatagctaggagtgactatccatctccttcttatagcagtgcggggagttgtggctgcagtgttaaatgcctcatctccctgccaatgccttggttttcatggtctgttctgcacagtgtcgagccttggaagtgtcattttgaagggcccagtgtttgaatgcaataaagtggatataatacctctctttttaccttcccccacaaaaaggaaaaaatagcccaggctgctctttgagatgtattctgcaccaactatatgtgaaatacttcgcatctctcgttttagccaagccttagaacagttctgggaaggaggcattgtaactcccattttaccagtaagaaaacagcctcattgagatgaaaagacttcctgcaagtggcaggtccagaattcttgcttgtttctggttccccaccccagcctctctgtccccccactgccctgcccttgcagtgatagctgggaagctgaagaaagggggtcagtgtcctgccttctgtggctcgtgctctatggccatatcccctggtttgtcaaggtctatccatgctgttacgacatcagcctccatgggcttctgtggaaagcagggtttgatgctggctaggccccgggaaatagactgcagttttatggaagagaaaaagctaatcttttcttcttttttttttttttttttgagatggagttccgctcttgttgcccaggctggagtacaatggtgtgatctgagctcactgcaacctccgcctccccggttcaagcggttctcctacctcaacctcctgagtagctgggattacaggcatgtgccaccaggcccggctaattttgtatttttagtagagacggggtttctccatgttggtcaggctggtctcgaactcctgacctcaggtaatctgcccgcctcggcctcccaaagtgctgggattacaggcatgattgcacccatccctgaaaagctaatcttttctagtatggagtgactaactttgatcagcccactggtttgagagtgggtttgttaatcagacccaaaggatttctgttttataatcaggaagaggtgtttgattgcctttttgtcccagactagccttgaaaatactttatctgatttccctgcagcccctctgctactgtctagaaaaaccaaatacccccagttacggtgagcacaccccttttgcaagggctccttaatgatgttacatactgccaagctgcccttgtgtcatttggctgtcttgtctttgggtggatcagcttccacagggagtaggggtagggtgaggggcagcaggggttgggattggtgaaaggagccctgggtggagcagccaggagggttgggattggggctggaattccctcagagggagtggaataggctcacaccagggggcagcatagagccgctgatagtccattactcagaccccaagataatctccttgaccttcaaacacagtgatcagattaattatttatcactacaataggacatggagcttctgtgtacagtacatgaggcttgaagttagtgtgagagtgttgccataaaacattttatgaaaaaacaccttcccccaactgggaaaccggtatctctaagtgaatgtgtgttccatgcattgctcctgctgcacgctgtgtcacacactgacatttgtgccacttgctttcgtgtgcactagaagtcagaggacccgggaattagcctcagctctgtgttgcctagggctgttgtgaggatcacattatgtagcagtatatatcggtggctggcaaacattttatgtaaaggaccagaaagcaaatattttcagctttgcacagcttttcagctctgctgttgcagtacaaaaacagccatagacagtatataaatggtatgactgtattccagtaattatttatggacatggaattggaacttcatataatttgcacatgttacaatattattcttttgacttttttccccaaccaagtaaaaaaatataaaaaccattcttaggtctcagactgtacaaagataggcaacaggctggatttagtttataggctagagtttgctgacccctggtatgtatgaaagcacttggttatcagtaaaaattatccacatgtcatctgacatagcatcttgtgattaactgtgtttttatggttaagtgatcctatcttgagtgcaagttaggcagaagattttggaagcaaagctccgtgcctgtggggaaacagtttttggcatggctcactctctgttcttattgtttcttcctctggacaccagctcagcatggaagggatgactgttagcacgttcttgaggtccaaaaactttcagtgaggctgtggtttgacttcatcaggtgaatgcttatgtgtgcccgtgtgcgtgtcggcacatgcacacacacacatctgttcaaataagaggctcagtgttaaacgcagtgttggtcaggctctctcagtgatctgaacatgagatattatgattgtctttcctgagcacatatctttttacatagctctgcaaccttggtttaaaccaaatagctcataaattggcagtgcttggcattggatgtgttcatttattcattcatttagtggattcatttattgagcacctactaggagtcagacactctactaagcattgaggatacaaaactgagcgcatagaaaataactttgtatgtcacacctattgacttgaaatatcatttctgagactttcatacaggaaaactgatttaacaccaatatactcccaaaataacatgtaagcttcatgacatttacttcagaagcattctgtttgcatctctgtactttttatatgcacttatttttcttacatagctgttgaaaaatagtccacaaattatctgtgatctctaaagagacaccatttcttttatatgattattttcatttccttgactttataaaaagactctgcctcaggatagcactttagagtttacaaaggacttttggatgtgtcatttcatttaagtcactcaatagtcccgtactgttcccattttgcagttgactagaaaaatgaggcacagaaaacttggtaacttgctcctggtcatttgactaaaaagaggctgaacttgggatgttttttacctgggaactgcaaatgtttggggacagtgaccttctttcttgtggctgaagcaggcccaggaaaccccatttcagaccaagcctattatgacaggcctggcctactgagtcaagccctcagtggagcttgaggaacactgcacagccattaaagaattatatgatagaatatttaaagacgagaaaagcagttcatgctgtgttgttaggttaaaaaactatcagtcattatttatgatttgatctcatttttattttacagaaaaagagttacacaaaacagtttagtccagtcttttcaattgtacttaaactttatctccttggaggtttgtaaaaatacaggtacttgaacccatctccttgacagtcgtcctcaactgtattcctcttctgaaccatcaagtgcagaaagctgtttgactgacactcagtccttccaagaaagccaggaccgtgctaggtgtagcagagagaagttaccgtgttacatccagtgagggacttctgtacccagggccagtgagaaacaatgcgggatggtcccaggctgtttgtattgtgaaatcatgcagcctgggtaggaaagccatggttaaaataagatacaccacagtggtgacagtggctattactggatggtgaaatgatgggttgttttcttgttatttttttgctcatctcttttctaaatctcctacaatataatcattatttttaaaaacattagaacataagggtgaaagaaaaatgttggtgagagtccattttgctggatcaagtaggcagtaagatactccatgaatgatttttttttttttttttcgagacagagtctcactctatcacccaggctggagtgtggtggtgcggtctcggctcactgcagccttaaactcctggcttaagtgatcctcctgcctcggtctcacaaagcactgggattacaggtgtgagccaccgtgcctggctggaggattttttttttaactaagtctgtggttaactagccctcagaaggcttgctgaggtcagccctacaagcccatgaccctctccccctttgcagtaccacagcagcctggcttcactgaatgggctggaagtccacctgaaagagacgctgcccagggatgaggcagcctccacgagcagcacctacaacttcacacattacgaccgcattcagagcttgctgatgggtaagaaccagccaaggggcctggggcgacggggatgccagattctagatgggtggagatgagaacttgagccccagcatcatgatgacacggctgtgcacagagttgtctgacctgcgttcagggctctcttctcaccgggagcccagtcccactgagtgtggcgttcactgggcagacgcttctctgctcatgtgtctgtttttggcgtttcccagtgttttgagagaagttcatgttcacatatctgtgatagggtttgtctcagaatgttgagatccacacgcagaaaccgggtgctgcatcgcacagcggcggcagccgaagcccaatgccccgggcctttgtctctgccccgggcagccaactcatggccttgagccgtgctcagtccccgtgttcagtactgggcttcatggggtgggagggcagaaggtaactgtctgctcttcacaactctgtgtcctcttctggaagcaaacctgccgcaggtggccaccccgcaggatcgccgcttcctccaggccgtcagcctgatgcatagcgaatttgcccagctgcccgcgctttatgaaatgactgtcaggtgagcctccctgagtcgctccccaacctactctccacggtcctgctcatgggaaccacctgtggggcccaggcagcgccttattcctaagtagatgaaaaacattctagttactctccttaaggccttcctttgtcggttcctattgccgccatcatccactgttgtgcagtcacgtgccatggactttctggttcccttcctactttagacgcttggggtccagcagtgaaggaacctgaggtcctcaccatcatggagctacatccattactagggacggtggctccgtctccttgctagaaacagtgttgaaatattgttgtctttctaattacaaagtaatatggctgggcacagtggctcacacctgtaatctcagcactttgcgaggcagggggatcacttgaggtcagggttcaagaccagcctggccaacctggtgaaaccctgtctctactaaaaatacaaaaaattagctgggcagggtggtgggtgcctgtagtcccagctactcaggaggctgaggcaggagaatcacttgaacccgggtggcagaggttatagtgagctgagatcacaccattgcactccagcctgggcaacagagtgagactgcgtctcagaaaaaaaaaaaaaaaaaaaaaagtaatacgtgctgatcatacagtcatgcagaatgcttggaaatgtatcaagtaaaacattttcctctctcatctccatcacacaccaggaaataaccacattttacagtttggtatatattgctccaggttttattggtttttggtttttattttttgcacatataaattgtatttttaattattttaagtcttctagaaaataggattctactaatgtacaattttacagttgtcttttttcacattatgtcatagcttgaacacctccatgccagaagaaatattatgattattgtaatttacagtatttaaccaaccgaatttgtttttttctttctatatgcttctcttatgaaaccagaaagggagtttgggctttaaagatcactttataaaagcccgaggagactgggacctgagaatttggttgacaactggtaacagaaaataaagcaagttagcaggtcaagggcagtgctggcaatgtgtatattagtccacgtagtccttggaaccatctggtcaagggcattattttttatttatttattttgagatggagtctcactctcgccaggctggagtgcaggggctcagtctcggctcattgcaacctctgtctcctggtttcaagcaattcttctgcctcagcctcctgagtagctgggactacaggcacctgccaccatgcccagctaatttttgtatttttagtagagatagggtttcaccatgttggccaggatagtctcaatgttttgacctagtgatctgcccaccttggccttccaaagtgctgggattacaggcgtgagccaccacgcccggcttcaagggcattttttaaatcctcattttacagatgagaaaattgaagcacaaataggataagcagcttgcccagggttatattcttcttaagtggcagggccaggatttgaagcattttctccaactgttaagcacatgtatgacctttccacacacatttcagtgtcggggcagtgtggtccagtgtgaggggcatgggtggtggactgacagggagcctgggtgggtgattaggatggttctgattccctgtcacccgccacacttgagcgccaggtgttctgctgcctctcagcgtctccagccaatattccaatagatctttctgtcagaaatgtgtcttctctggctttaattcacagctgccccaggctggcaacccagaggcaacttgcatctacagtcactggtttgggaactggctgtgttgggggtgtgtgtgtctgttttgtgggaggtggaaacaagtaaaatgtcagcatctgctccaccaaccaccttgtggccctgcagtatgtcaccttccttagagctgagaggggtttagtgttgagacacatagctcaaggcatttgttgagagattatttcaataacagtaatagaaacaacagctaccatttctttttttttttaattttattattattataagttttagggtacatgtgctgtgcacaacgtgaggtgtgttacatatgtatacatttgccatgttggtgtgctgcacccattaactcgtcatttagcattaggtatatctcctaatgctatccctcccccctccccccaccctacaacaggccccagtgtgtgatgttccccttcctgtgtccatgtattctcattgttcaattcccacctatgagtgagaacatgtggtgtttggttttttgtccttgcaatagtttgctgagaatgatggtttccagtttcatccatgtccctacaaaggacatgaactcatcattttttatggctgcatagtattccatggtgtatatgtgccacattttcttaatccagtctatcgttgttggacatttaggttggttccaaatctttgctattgtgaatagtgccgctataaacatacgtgtgcatgtgtctttatagcagcatgatttataatcctttgggtatatacccagtaatgggttggctgggtcaaatggtatttctagttctagatccctgaggaatcgccacactgacttccacaatggttgaactagtttacagtcccaccaacagtgtaaaagtgttcctatttctccacatcctctccagcacctgttgtttcctgactttttaatgatcgccattctaactgatgtgagatggtatctcattgtggttttgatttgcattgctctgatggccagtgatgatgagcattttttcatgtgttttttggctgcataaatgtcttcttttgagaagtgtctgttcatatccttcgcccactttttgatggggttgtttgtttttttcttgtaaatttgtttgagttcattgtagattctggatattagccctttgtcagatgagtaggttgcgaaaattttctcccgttctgtaggttgcctgttcactctgatggtagtttcttttgctgtgcagaagctctttagtttaattagatcccatttgtcaattttggcttttgttgccattgcttttggtgttttagatgtgaagtccttggccatgcctatgtcctgaatggtattgcctaggttttcttctagggtttttatggttttaggtctaacatgtaagtctttaatccatcttgaattaatttttgtgtaaggtgtaaggaagggatccagtttcagctttctacatatgaacagctaccatttcttaaccactcacaatgtgttaagcactcacttaatctcattctttaaaacaaaacaaaacaaaaacaccaatgaggacacatactgttgcaacaaacactgtacagatgaaaaagctgggactcagaaatgttgaatagcagcccaggacacacactaggaagtaatagggctgggattagcacctgagtgtgtgtgactccagatccatgctcataaccatctggcctcggagccctcccacagggctgtgagaagagattgtcttgctgggccagtgggtgcaggagacactgaagcttggaatagggtgggatttttctcccttacagggaaggagagaattgagtgaggggagccttagcagtccctgactccaccctttctcactagatttgggggaaactgaggcccataatagttggagaggcaggatccagaaaccaggggggtttgtttaccttggcctggagttggctcctcccaggtggctccgcctctgtgtagtgccctcatccctccctctctgtgtccacaggcttcctgtcacttcgtgtcacatcccactcctgtccttcactccctctcagtctatccagccacccccagtgtggagagcagactagactcctttctcggacactgccattgcctcgtcatagaggcagggcagccccagctactcactctgagcctcagggtccttgtctgtgaaatgggaccataccaccactgcagagcttatgtgaggggcaaagcagagactgtatgcagagcacattgcatagctgccagtatgtcaaaaaagccagcactccacagttcctttatgcaatacttataactccaggatctgtggctgctgccactgtggatggtcccgccacggactcttccagcatctagtgagctgaaaggaaggaaagatggtattggcactgaagcctgaaactcagctgaagaaatagaattccgtgccatgacagctgcacatgccacattgggtgtcctgggtcctctgtgacaagaaccttactgaggtctctgtgtggtctgagattagcaccagcagcattggaccgttgccttctttcttcctccaacagaaatgcctccacggctgtgtacgcctgttgcaaccccatccaggagacatatttccagcagctggcacctgcagcacggagctccggcttcccaaaccctcaggatggcgccttcagcctctccggcaaagcaaagcagaagctgctgaagcacggggtgaacttgctctgaactgcacccaggaggtgactgggaaggagaaaaccagcaaaggaagctctgccttttataattgaaaaggcccctctattttatttttcttgaaaacattcccttttttaggaaccaaatgatatttgagtttttgttattccttttgcagattgggatgtgttttgggggcaggggttagttcttcaggtcggcagacccagagcacttgataaagaactgtatttaatcggtagtgttggggccgggacgggcttggctccctctctgccatactgagcctgaggtatttcatatctcctgctgttccatcccagcttgaattggtgccacaagcttccaagttggcattttttctagaacctgatcgtccactagcccagagtgtgtgtgttcaacccccacaccaggtggtggtaggcggtgtgactgcacagcgaggtgccggatctgtgagcaggccgactccactcccacgccgcaggtaggtttctccagtgcgctcttgctgggaggtccggatcgttcctgcagggaagcggcagcacacggagaccacttggttgaattctgttggaactctactcaaatctaggggcgtcttctttggacccacaatgggggcaagccttaataatatggaagggagtttgggctttagagatccctttataaaagctctgggggctgagccctgagaattcagtgacaacaggaccaacctgcgctgcctttgactacaagtgggccgtgcagctggttcctctcgagcgagtgtccctaaataggagtttacaagatgtctgggggtaaaagcactgtgcttttcagtggtggctgcgtgaaagggagcgacactcagctgtgtgttcctgggcttgtgtggtacttagaacctcagttctattacgttatagtcagacatttttttgacagtatgagacagactgcaggatgaaaatatttgtcaaaatcttaactgaatgtttactggaagtacttgagattccatttgagagttgtattgttaataatttcatgtcagtgaactgatatctgatgtttatgatatggtgtctttttcttgaaacaagcttccaagggctagaaataaaatagccaaaaaatgctggagttctgagtaattaaatggcagcatttttttgtgacaaaggtaagggttaagacagtgtgtgtgtgtgtgtgtgtgtgtgtgtgtgtgtgtgtgcgcgcgcgcgcgcgcgcgtaacgtgggcgcatccctcttttccttccctgggttcagtgtggctgggtaaggaccgtctgtttgtagggctgccaggctgcagcctgctgctccagggagcaccagctgcagctgatccaatacaccaagcctgtgtctccctcttctatcacctctctccaggatctctgctgtctcttggatcccatctgcctagatggaagaggatcctatccgaagctaggataaatgttgtcttactcctctgctatgttctcccagaaaaaattgattacaagttctctgctgtggttgctgcagctccaggaagtccccgcaatgtctcacgttgtctttgaccagtggtccccagtaccaggccagcgaagacaactttataatgtcatttgtgttgtgaaaattcttccactgacccaaaatggaaccgtacaaagcctatccgtgtatatggaaaagtctcatgcacctggattaactcagaaaaagtaaagtcctgaaacttcactttgcaggtgtgcccctttctttcctcctttgatcctgcttagtttctgcagtggaggttctgctcagagccccagggcactggcagctgcagccgtcatctctaaagcttggtaactgtggcccagaggctgcagagaagaaacacttaacccgctgttttcccgttttttaatatttcagaggtttcagggggtcactcaggacacggttaatcccacagccccaggcccatcccctcaaaattagcgcccccagagtacgggccaagcgacggacagccaagcagcatgttcttgctggaatgggcaccacaacctcttatggccatgtttcccaagggaaggcagtgtgcaggacagcctgcccaccctggactcctagttgacaccgagtgccactgtcagtgatccaggaccacagattctagtgactcttcagggcagaaaagcctctgttttggcttcctctgtgccagccatctgccacctgtgaactgtaaggataaaggtcgcatgagtgattaatagtggtgtgttagtccgttctcacggttctaataaagacatacccgagactgggtactttataaaggaaagaggtttaactgactcacagttctgcagggctggagagaccttgggaaacttatgatcatggcagaaggggaaccaaacacatccttcttcacatggtggcagcaaagagaagtgcagagtgaaaggggggaaaagccccttatacaaccatcagatctcacgagaactgtcacaagaacagcatggaagtaaccacacccataattcaattacctcccaccaggtccctcccacgacatgtggggactatgagaactacaaaatgagatttgggtgggaacacagccaaaccatatcaagtggcaatcagattcctactgggaaaggacccctagaggggatgtttgagcctgatcaaactgtctcctcccctggagggaagcatctagacttctgggccgttgtcacttcaaccgacagagggtggtagcaagtggagcccaggggctttgttgaagtcgccctccatggtgtctgtcttgcatatttggtggtcttttccaatgtggctaagatgtacttcccatgccgcccagttactgcgttcttaacaccccgccctgctcggggtgggtgagtagcagcagacctttctctggtgtgagcctccctgccacaggccacttccctgtgtgtgcagtgagctgaatggtggcccccaaagatcaggtcccaatccccagaacctgtgaatgttgccttgttggatcggatgtttgcagatgtggttgagtgaaggatcttgagacgaagagatgatcctggcttatcccgtggtccctaaatgccctcacaaatgtgcttttaggagaggggcagggggaggttactcacgtggagaaggccacgtgaagatggcaaagactggagtgatgtggccgccagtcaaggaatgccagcagccaccaggtgccagaaaaggcaagaagtggattctgccctagagtgtgcggagggactgtgactgtcaacgtactgaattcggtcccgtgaaactgatttcagacttcggcctccagaaccgtgagagcatgggtttgtgttgtaagcctctgggtatatgctcatttgttacagcagccagaggaaacaaatccatcctcctgccaacttgctttctccttgtgatgcccagttccctctctctcagtagcgccgagccacagagcacggagggcgtgagaagagctggggccccacatgaggttgccatggcgcggggcacaggggagcctttaagcaggggagtgggatgggcgcggtgtgacgcctgtataatcccagcactttgggaggccgaggcgggtggatcacttgagctcaggagttcaagaccagcctggccaacgtgatgaaaccctgtctctactaaaaatacaaaaattaaccaggtggggtggcgcatgcctgtaatcccagctactcgggaggccgaagccggagaattgcttaaacccaggaggcggaggttgcagtgagccgagctgagattcattgcactccagcctgggtgacagagtgagactctgtctcaaaaaaaaaaaaaaaaaaaaaaaatgcaggggagtgactggagctggttctcatgaggaaggtcactagctcctgagtaggggataagctgggcaacagtggaaaccaccaggaggctatggttgtccaggtgggaagtggaatggctgaagcagagaggaggccagataatgggcagacgagcctgggcactgatgaggtttggggcggggagggacagccccagtggagaaggcagccaaggagatagattcctgccctgaaggagctggcggacggagtgagcaggaaacccacactaatactctcagcctgtgctcccgacacacacactcctctcccaacccctgaacccaccgctgctcctgggaaaagggcagtgggtgtgggaaagcacttgtctcctgctttgcttcttgattctgactgccacccggctctctgtgaggagacaggggagggcaggtgtcagacccactctcagcatcctagcttagaaataaaacatactctagatctttcttcaacatatttgttgagtttgagaagcttacagtgaagattctaagggcttcaaggtgaaaataggacaccttctctgttgatccagtatttaaatgtccaaacctgaaattagctgtacttcccctgagaataaaacccagagagtgctttggaatcctgtcaagagctgggaggtgttttatgattgcctgtgcatgccgaggtataagccgaaaagttgcaacccttctcccctgccctgcctcgctgtcagctgggccaagcaccctgaggaaagggcttgaggcccaggctgccaaacccatggggaggagagggagacaagtcctctaccgagtgtgctgttcaaagacaccttgtgcatccttcctccccacccaggctggactggcttgtgtggctgtggcaggagcacatgggctttggtgtcagacagctgggttcaaatcgcagctctgccacttattgctggaaatcagggcaagttgcttttctgtctctgagcctcagtgtccttttctttaaaatggacaggagaaggaaatggatgtaaggacttggcctatcatgggccctcagcaaatggagggtcctgttgagtgttctgagaaggcaaatggcctcccagcacagggagaaggacctgggggccggaggggtgtggtccttctgcatgttgaggaagtgagtcctggatgtgtgtccagacttcagaagatgcgctgtgctgcgagcctggatactcggcttccaattccagctcgccctgcagctggctgcgtgaccttgttcatgtcagctgcccgctctgagcctgtttcctcatgtgttaaatgtgcaattgacaaggatgaggtaggggaaggaacctcgtagggtgcacagtgctctccatgctcaaagaagcaggtgccctcacctcgaacgtgggggtggctaatgtatgggaagcggggagatatggggaagggcaggtacccagaagttagaagcaacgtgtgtgcctgggaaagaggcggaaagtaaaccaatccctgtgtgtgctccctcctgcctcctaatgctgcaatctgcttgagtgttttccctgccatctgtcagcagttctaaaatatgtggccttattctgtcctgttccctgtgtttacatctggttagcaagattcggctggggagttaaatgttatggaaggttgctggcagcaggcatgacggtcctcaaaaacctcattctgtgcttagcctctgctactcatatttacatcctgacaatgtgtatggagcacctctcccatccacccagaccacgacataatagcatcttaccaaaacctcacttgacactcacagagtggattaggacttttggtggcaaggatagaaaccacaactcaaacttggcttacgaataaaaggcgcacttattggctcatgtaacagaaaagtccagaggtagagctggttttcggcagagctgcgttcaggactcacgtgatctccacagcgcaggccccgcttgcctccgtgggtttctctctcagcttctttcccttcacctccccccaccaccccacctaataaaaagtggcctctctttcacagtcgtcccagaaaaagaacttggatcacgtgtccagccctgacccaatctctcagtggcccagagtttggaagactgattggtcagatctggatcatgggcccagccctggagacccaaggactgagcatggggatgttatggtcttgcaagaggctcatactgttggcaggataggtttaaaagcagtggctgctggccaggcgtggtggctaatgcctgtaataccagcactttgcggggcagaggcaggctgatcacttgaggttaggagttcgagatcagcctggccaacatagtgaaactgtctctactaaaaatacaagaattagccaggcgtggaagcgggcacctgtaagtccagctagtcacgaggctgaggcaggagaatcaccagaaggtggaggttgcagtgagccgagattgcgccactgcactccagcctgggcaacagaggagactctgtctcaaaaaaacaaaaacagataacaaaaaacagtgactgtcctctagagaccaagcttaggtggcctgcccggtgttacacagggccatagctcagactttaatgtccaggctgaatggtttcaaaggccttatcattcttgctactcacagcagcgaccccctcagcctgagctacacgttagaatcatgaccggaaatgagtttaaaacaaagacccgtgcctggaccccactctcggaacaatgaaaaaagatgctttgggagtggggtgtgtgctttggggtttccgacaagttcccgggtgactgcatcgtgcagccacagtcaaggaccagcacaccaggatcactcctctcccccacagtatgctacggagcactcagtgttacaagtttaatcgctgtcaccaaggacagaacccagacaatctgggtgactctaggggctgatgaacaggtgcctgggagaaagggtttgggatcagaagacctggggtgtgaccttctacaaatagtaattggtctggccttgagtacatgggaacagagggagcttgaggccagtccagcctgtctcgggtggaaggcaggattcccatttgcagccggctggctcccctttctcaccttgagcctccagagctacaacacgtaaattagcttagcaatgcctagctggcaatgcacacttgaggagggtgagaaacatcgcgatcccaggtgagtggcgctcttcccttccgcttgttgtggcagcccagcccggacagctggctggaacctcgcttgcaggtggaaacatgcggcagcccggctgcttctagggctcctggctgggagacccccctgtctccctctcttctaaagggaaaaacatgaaaaacacagctactgagggacatgtttcttcctctgtgattagacacaggcaattgaaagtagccactggcttctctggccacacccactgctgtcccgatgtgttttcccatctcttccatttggcggccttcctcttcacctgtttctctactcagctgtggcagaaagggaaacaaggttgttgagtgcccttcatgtgccagatactgcacatacccacagaggagaaactgaggctatgagaggctaagggacttgcccaaggtcccgagggtgcaaactcctggcacggagtcctaaatcctcagcttttctgaagccagggtccttgttcttctttgcccagttagacatctattgctccttaacatatcctagatgtgctcttgtccccaccccactagtcccattgctttgggacattttgcttcattcactatccacgatcaattctagtgacccgcctgtctctgtgacatcactcaaaacacaagagcctcaaagtcacttgcccccttctgcctagcaagtctttttttttggacagggtcttgttctgtcgtcttggctggagtgcactggcgcgacctaggctcactgcagcccccgcctcccaggttcaagtgatcctcccacctcagcctctcaaatagctgggactacaggtgtgcaccaccacactcagctagtttgtttgtttggtagagacaacgcctcactatattactcaggctggtctcaaactccttggctcaagcaatcctccccgctcagcttcccaaagtgctaggattacaggcgtgagccaccgagcctggcctaagtctttctttacaacagatgacctcaccacttcactctggttttcagcaagatcctttatttatcttctgttccccagacatgtcacatgaatgcaggtagctaggtacctgcgcgggctgttggttttgtaaacgcagagcagagcagtcacgatgtgtagaaatcatgcacctcagtgattctttaacaagataatgagtaaaaagacttcaggtatgtttgaaatgtctgccttttcctgcattctcatcactgacaaatatctgtgtagacattttactcaaatgtagacgtgctctttgcacacttgctagtacctgcctggtgcatttcaactgtgttttcttccaacagttgtacctcttagaagctgctgttttccatttggatctaaacactggacctgcacctgcgaccagctgtatattccaaaccactcctcggctttataaatctgacactgctcataatacattattcagaaaaggcatctctagtgtggctggccggctacgctttcacacatcagctaacacaggctatttctagagtgagtgcctcaaactggtctcctgggaccttttccttcgggaagagatccacatgttcttcacaggagaccagaaaaccagcacaacggccacgggtcctctgggcatgtaggtcttctctgtctcctcactagcacacactggcttgggtcattgtcacgcagtgcacacctttgtgccatgacaaagacacagggccaactcttccactatctccaagtctagtgtttgaacatttatgtacagacaaataaatgaaaaaaaaaaaaacataggcaacagaactccaaagcaaaacagaaactttggtcagatctattattccagttttgccagagaaaggctttccccaaatgtcgctgggtgagcgcggtcctatccccctacagctcctatcagccaacctggtggccttaacgttcatcactgtggactcaaaacacctaaaactgggaattttccaggcccagtttggcagtagggcttctgtaggcagtgaggtaagcggatcacacgttccgtggctgatctgtgtgagccgcagcttggtgctgggggacaccagcttcagctttgcaggaaagccatgtttaaagagtagcctccagtcctactggcccaatgcttttgccatcagggacctgacaaggtttagaatgaggtgagcgatggtgacagtatccctgggcctggacactgtgtgccaccctgactgtgtctggcagcccctccacctggctactgaagccagtcaggtgtgggggctgcagactgtccccctgccgtcaggtggctgaagggtccccagtgtgccagcatcagaggccaagttctctagctctctggtttgcagtttttagttttttttttttttttttaagatgaccacaagaagttttacattattatattcagacaaataaccatttagttactctatttcagagcactgaaaaaaacaagtagcaacagaagacagacttacaagggcactaagtctctggtcactcaaggaccaatcaaaggaatgcgctgttaggccagaaaggagtctctgaagcaaatgattggaagg

SEQ ID NO: 1200 - DNA, 17568 bp, Homo sapiens
gtcacatggggtgcgcgcccagactccgacccggaggcggaaccggcagtgcagcccgaagccccgcagtccccgagcacgcgtggccatgcgtcccctgcgcccccgcgccgcgctgctggcgctcctggcctcgctcctggccgcgcccccggtggccccggccgaggccccgcacctggtgcatgtggacgcggcccgcgcgctgtggcccctgcggcgcttctggaggagcacaggcttctggtgagcgctccgcggcctccgggaccccctggccgcacggggagagctcgggcgccccctgactgcgcactgtgagagcttcagagaccggagctccctcctctggggccctggctctcccgggcccgccccccgccgtgtttgtgggtgggtcctccacctgagtgggcgccggggcgtgagcctgggccgccccctgcagcccaggccgatgcccgggatcctgctctttgaggtaaaccaggagtctcccctgggagtggacggccctgcagcgggacctggcctgcctgtcccattccttccacctagagctgaggtacccgccttcctggcagggccagggccagggctggcgttggcccctcgtcttactgctgctgccgttccccatgaagatgggacctccccacattcctggccctaagggtcattttattagtcactgaacgcacgggcagcgcctggatcctgcgcccgggcagtcctgggcttgaacgtgtgtgtcagccgcgctgccagccatgctgaggctcgggactgagccgcccctttgttgtccccagccccccgctgccacacagccaggctgaccagtacgtcctcagctgggaccagcagctcaacctcgcctatgtgggcgccgtccctcaccgcggcatcaagcaggtccggacccactggctgctggagcttgtcaccaccaggtgggcggcgggcagggtctgggcgtcccagagccccttacagaggcacagatgggaggggagggctgggggctgctcggaagaccccttgttcccccacctcccgccgaagcaccctgttggggagagcgtgtccttgctggctgtgctggggtgagggctgtgtgctggagggagcccctgcatggggcacggtgggcttcctgcaggtctccctgcaggctcagggttggctgcgccgcacctggctcctggtgcacccgtgagcatccctgtgtgtgtctgctggccaggctgggtagggccactgcacctgagggctgagctgaggtctcatcggtcacagcaccctgggccctgacgctggtgcaggtggccaccctgtgagggggaggcacgaggtgtgaggggcacttgggtgtgtggggccttctggaaacacagagaccctcgtgcacttggccagagccgctggctcctaccagcagggtgggcaccgggcaggcctgggcatagggagtcctcttggcaccttggaggctgcatgatggcgggggacccttgttcaaataagatgtcaaccctgagcgtcaggtcaggcccatccctcctgagctgagggacggtgcattggggcccagccagcactgtgggccagcctgtctcggaggcagaggttcttgatttctgagtgtttgggtcctgcgtgtgatcagagggcctcctttcccagttggggttccccggtttccccagggcagctgtggcacaagagtgcagctcttgggtggctcctccctgggaagggtctcagcagtggcttgcagacgtctgctgtgggtccccaggagggagcagaggctgctgggcaggcctggccctgctacagatgggcatcggtggcctccagctccctgtggcgggctcgtgctgtctgcacggcatcgtgcacactgaggaacagctgctcctcctcagccgtgtccccggggccctccccgaggaagcctcctctgctcagaatgtctctcacaggcgggctgcagcaggctagcagcaggctgatgcccagggccccgtagtctcggcgcaggtcctgcagcgtgctcacaccggctgcgtctaggaacagcagcggggcgcagtcgatgaccactgtgtggaagccggccgctgcgggcaccagcgcagccctggtgctaaccgggcccaggtcctcgccctgggcagggcctccctcaccgacccccgtctctgagcccccctccttcctcctggcagccatgcaccctgcgtccagccccgtgaggctgtagagtgactgcaggaagaagtccttgttggcatagtacagcggccccccaaagcggaacacccgcacgccgggctcagggacgaggccctcgaactctgtggcatcctcgtagaaggccgtgtccccgatgcgggccagcagggcggtgcgtgggcgttgggtgcggccggccaggctgagcagcgagaggatgacgccagccagcagcccggcctctgtgctgaccagcatacaggtggccgcggtgcctgcccagaccagcgcgtcagccgggctcatccgccacagccgcgggaggtcccacaccttgcgcagggccccccgcaggctgaccacgatgacgcaggccagcacgcttcgctgtaggtcgtggaacagcggtgccagcgccagcagcaccagcagcaccacggtggcgctgaccacgctggacagctgtgtccggcagccagtggctgtcttcaccaggctcttggccagggcggcgctggtggcgaagcagtggaggaaggcgggtagcacgttgcagcagcccacagccagcagctcctggttggcacgcacagagtagccgtgactgcgggcgaacatctccgccagcgagatggagaaggcggcagccacgagggccagggccacggcatccaaagccacacgctgcatcagcctgggctctgggacctgagggggcatgaaacccgtggggatgtcgccagccacgctcgagccaaagcgcttgtggagctgcccgaagtgcgacacgagtgtggccaccacgatgaccagcagctccgtgggcagcggcaccctcaggcggtgtcggtagcggtctgagagctccttcgcggctagcagcaccgccaggcacaccgtgctggtgaccacgtcgcacacgttggcctgcccggcgccgcgcagcaggctcagccatgtgaggaccaccatgccgggcccctggtgccgcgggatccgcacgcccagcaggtgtttgagctgcgaggtcaggatggtcacggaggcccccatggcaaagccatcgagcagtggctgtgagaggtaggcggacacgaagcccagccggaggacgcccatgaggacctgtggacggagtgcggtcaggccagcaggcgcctggcgggagccacctgcccctcaccagcacctggcatggcccgaggggtggtggtcacggcacaggacctgacaattctgtgttgcggccccgtgtgttccaaaccagactcctcacacgggcctgagttctggttccacgcgtgctcatgcccgcagacaactgtgacatccacgtgagcatcacacgtgcacacagctggccatagacacgtctaacccttgtcacgtgcagcagcccgttttatttcagaattaagacctctggtatcagaaggcaaccccttcctgctgcttcctacacatggtgcccactgccccccatgcagatgtggagccaacgggggccaaggtggacaggccaaggcaggagaccttcgggggtggggaggccatcccccactccacctaggacagaaggcctgggaggccacatggcctcagtccagcaccactgagccacagccacacctggcctgctggtccccaccaaggccatggcccaccggactggctccccgtgcccctcccctcctgcatccacagcctctccgcgtcggtgcctcgccctgggatgccccggcacgccccagctctgcccaagccttgctgtcttgggccagcacctcctctgccaaccctgtgcttgcccccagccttgccctcgtggatggccaaaacctaagggggggtgccctgggcccctccctgtgcccaagcagggctcctcacctggtaaagcccggtcatcagcgtgagggcggtggcgacacggatggcgtagcagtcacgcccgcagtccagcatggcagccgagccgttgagggtgctgctgttggctccgggctgcaggccgtcctgggaggggtcaaagccggccagctggagctcccggtccaccacctgccccaccatgaggcaaagcaggctgaagatgcccacggagacatgccgtgaggtgcccatgaggaagtagatgaggttggcgaagaaggacgtatagaggctgtagatgggctgcagcccggccagcaatgagtaggcgatggcctgcggcaccaggatgatgccgatgaccagcccagacatgacgtcgcctgccaggtactcccgcgggcggtactgacgcagccagcgcgtggcggggagcaggtcctgcaccagcgcccggacgcacagcacactgcacgagcagctgcaccacagcctggccttcagcatctcacgcagaccccggggtgctgggcgctgccgtcggaccggcaccggccctctgccctgctgcagaggctcaggggactcgtccatcctgttgcgtcaggtcccgtggccgacctgcggccgagaagagggcatggtcacaggagcccccggatccagggccaaacgacaaggtccccggcagcaacgggccccttggggcggacccctcgcccacccagggccggggattggtgctgggccttctcctggcagcgcgggccccagccccctgcccggtatggatggacgctgggccctgctggatccagaatccatcgtgaggtgagatgggattacgacaccaagcccatgccatggggtgtgctgaggccagcagtgctgaggggcggcgtggcggcaccctgtccaggctcagctccggcctattggctctgcggttcctggctgaaaaccaccctgtagcctcctgaagctcacctccccaacggggcaggaacaggctgggctgccaccacgcacatgtgcctaccgtcagaatgtcacagtcactggacacaggtgcaggcaagcctgagtccagctgctccgtgtccacctccctggctccccaggttggcaaacggtcctgctgtccaccccatgcccacaccagagccctccctcccccatccaaaccatcgcctgctctcctggagacacctccacccacccctctgtcacctgccctgtgggtcctggggctggcggaagtctcaggaagaggcctcctatgtccctgccaagctttgtgggtactgggaccccaagtctgctgggggagcagcactcagacactagcctagcccatccgcctggacttgggacagaattctgagaatatgcctggacgggggccccatcagggccagctgggaggggaggagggtgactggcgtctgtctcccctgcccagacagttctgggacgtgaggcgccctttttcccaggctgcaccagctcactgtggaacggccatgacacactgtcccgaggcagcaccgagagggcccagcccgctgcacacagtcaccctgggccggcagagccggaagggcacctgacctttcccttgatctcggaaaacaccgtggcgttagggaggcggtgcttagaggcctgactggtcccacgtgaggcctcgggtctgtcctgtttgcagactccaatgtactttcactttaaacattcttctcagcgacgttaggcaaagactttgctcccaggacaccaggtgcccaggacaccctggagcctgggctgagcctgctgtttgcacgctggcccagggtgtgcgagctccagtctcctggcgggtgtgttggggcagtgagcccagcctggtaggttgacacatgcaggctgggcacagcacccctggggcacagagcgggggtcctggccctcaggcaacattgcaagagttgtgtccccttccctggaagaccccaccacactgggtccctggatgccctgaagcccaccccaagcccctggggtccaggtgtgtggaatggggacagtagggccacctgccttgagcctgagggtgcccctaagaaaccacgagtccagggcatttctggcctcggctcccacgcccccctctgctgcagctgagatctgggcccaggatggttcttacctgagggagtcctcacaggcgcggagggccctgggatgacgaggggctggcaagaccaccgaggaccgcagggccctctggctcccgcgagcagcggggagagtgggggtggtggcgccaacctgcaggcagtggtctgtgccctggactctgtagttcaattatttacctacagattgctgagtcatgggtttctccagccatgttacctgatcggctgatccgggagttgaactgtaatcaggggcttgtaggagttagagctgtgtgggcctctgaggagctcccagcctcccaggagccgctgcagctgtggctctgcggccctgccgggggggcttagggaccagcgggaggcgggggctcaggggctgagcacaggtaaaccttcagctctggggtctggggtcgagtgcagcagccttcaaacccaggcggggctgagggaggcttggtctccgtgtccagtcgccggacaccctcctggtcctgcaaggagccagcctggtccaagctggagcagggcagaggctgacagccggctcagcccaaggctgccggtgcgtgcatatgcgtgtgtgctcgcgtaagccctgtgtgtggtgctcaccgcccagggcgaggactgccggggtcaaggtgccgtgactggccaggagtcctggtctgactggacccagcaccgacccacagcgcctggtcaccctcacggctcctctgccctcccctctaccacagaccaggaccggcagtgcctgcctcatagggctggggtgaagataaatgatttttttaagtgaactaaattaggcccacacgtgaaaataagggtaagctgctttttaaaaggaattattagccaggcacgatggttcactcctgtaattccaacactttgggaggcctagacaggaggatcgcttaaggccagcagttcaagaccagcctggtcaacatagtgagacgccccccaccttttctttttttttttttgaggcggagtcttgctctgtcacccaggccggaatgcagtggtgtgatctcggctcactggaagctctgcctcctgggttcacgccattctcctgcctcagcctcctgagtagctgggactacaggcgcccgccaccgcgcccggctaatttttttttttttgagacggagtttcgctctgttgcccaggctggagtacagtggcatgatctcggctcactgcaagctctgtctcccgggttcaagtgattctcctgcctcagcctcccgagtagctgggactacaggcacccgccaccacgcccggctaattttttgtatttttagtagagacggggtttcaccatgttagccaggatggtcttgatctcctgacctcgtgatccacccacctcggcctcccaaagtgctgggattacaggcttgagccactgcacccggccgccccctgccccccaacctttaaaaaattaaaagtaaaaaattagctgggtgtggtggtgtgtgcctgtatcccagctactcaagcggctcaggtgggagcatggcttgagcccaggagtttgaggctgccatgaggtatgattaggccactgcaccctatcctaggccacagagcaagagcccgtctcaaaaacaaacgctgtcattggcccagcactttgggaagctaaggtaggaggattgcttgagccctggaggtccaggctgcagtgaggtatgtttgtagcgcttcactccagcctacaagtcttttttttttttttttgagatggagtctcgctctgttgcccaggctggagtgcagtggcacaatctcggctcactgcagcctctgcctcccgggttcaagcgattctcctgcctcagccgcctgagtagttgggactacaggcgtgtgccaccacgcccggctaatttttgtatttttagtagagacagggtttcactatgttggtcaggctagtcttgaactcctgaccttgtgatccacccgcctcggcctcccaaagtgctgggattacaggcgtgagccaccgtgcccggccagttctgtctcaaaaaaaaaaaaaaaattccttgggagcctcaggtccccccgactttgacagtgagtactgggtgggagcctgcacggggcacctgtggccggagggtgagtgtaacgaggggctgcagccctcagtgctctcccatcccaagggaggccaggaggctgcggtgggtccctcgggtggggctggaaggccaacccggccctggcaccttgggcagcctgactctgtccggggaacagaagccacaggctctacttctcctgtccatgtgggattgaagccgagggtctcgcagaaccagctgatgtgccggggctccatttccccaagacgaggacactgacattgatggggcacagccccggagggaggagaccctggacactcaccccaccaaaggtacctccttgtggaagccgtctgccaagcgctgctagttccccacagccctgggtgagcccagggaagactgggctgcagtgcccccatttggaggtgaaatgggagtggaatgtagttgggatggccagagagtaggagacatcctaagtgtgagatgtggacagggctgaatgctccagggtctcgtaccccagagtgtgagatgcgggcagggctgaacgctctggggtctcgtacccctgagtgtgagattcgggcagagctgaacaggctccagggtctcatacccccatagcctccacctgggatgccctctccaagtctgatttctcctcgaagcccctgccctgtcctccagagtctgagcccttgcttccaccccagcccaacctgggccccagtggtccctgggaagcagctgtttgctcagcagttgggagctgtgctgtaagaagcggttggccagtgggtggggtaaggcagtcacgcagggcctcaggtccctccctgggacagataagggcccctctgggtgcagccaccagcagggttgttggagaactggggagacccagggggctggggttgttccctcaaggtctccctaaaggaggcagggaggacctgggtgctacagcaggggtggggcacctggtgcagacgcctgcatgcagggtggggtgggcagtgccacctggggccacagaaaaacctggagtgggaggtggcccttcccccctcaggaaaggtggtggaggtttccagaggctggcttatggggacctgtggtgaggttttaggcaggtgagcgtagttcaggaacagcctcagccgcactgcaggggcctggcctcaggtcttctgcaggcattgggccttatgcccttttagtccccacctaggctgggtgtctaaagtaggtgaggtcatcactgcaggatccttggggcctgacctgccccctcccacgtgtctctgcctcagtttctctgagcattgaggcagtggctggtgctgtcctgtggccaggcccagaggctgagtgcccagggggtccaggggccttgctggccagagagagtgggtagcccattctaccccgagcctgtgcacgcgcagggctgccaacacctccttccttccccgcttggcccacgcaggacagggggcgtgggggccccagcaactgggacctgcctgaatccgcctccctcctgaacccccctcccgcctgaacccctggccagtcttgtgtcacacgcttacttccttagttttgtctttaaatcagccgttttacattggagtccatttactgggaaaggagaccttgcatccttgcctcccacccgtgggaagaagcccggccgacagggctttgagaccggacccgagtttattcccagagaccctcccgcgggtgggcgagctccgaggtctggagaagaggaggccccggcccgcaccctctagcacctgtgtccccttcgtcccggccacagatgcaggttctcccaagaggcgggtctgtacccgccccgcgcccccagcccagcgggcccggcctccgcccctgccccgcactcccacccccaccctcaggagagcgcggccctgctccccaccccgcgcggtctccccccaccgcctgcgaacccccatgcacgcgcggccccgccccgcgcactcaccaggcccggcagccgcgcggtcttagcggctcacgcgctcgggcccaggggcggggacgtggggacccgggcggccgctcagccgcggccgcgcggtgaatgagcccgttgtgcggccgccgcggccccagcgacaccccgcgcggggtctacaagggctgacgcgcccccgcggcttccgttcccgggctgggcggtggctcgtctgcgtctccggccctgggggtgggctgcgcgctccatctcgccggcccagtcccctccccagcgtcggtctctcaaggcccctcccaatgggggccaggcggagggtgggccctcgggcctgtggactgaccccggggttcctgggcctgggggcggggatccctgtcccgggctcccctcgctgcgaggctggccctgccagatgacactcagaggcgccttgggtgtcaggccagggacatctctgatgctggggctccccccgctagggtcaggggctgccgggctatcgccttggggttctgcagagaaaacctgaagcccagctgggtcttcactttcctccaggtcaccgtgccccgctactccaactccgtgggactttggaatgcaccttctgggcatttaattcttatccaagtgcctcttaagttatacttctttgctaccagtgtgtcctttggatggaggggaggagaggtggtaggggccgggtggggtggaccccagggactcctgctgctcctgctggacacccagcccggggtacaggagcaggtggggaccagcagaggcggggcggagcaggagcccacacccaaaggctgtagactcctgccaaggctctgccttgatcttgtacaccatgggaggaccagaagggaggcgttgaggtgtccagacctttgctgtggagctgggggtgctgtggcatggggagactgacagacggggagctgtatagggccagattccggtccatggtggtaaccccatcccccaccactgcagatgcggcacaaagccagctgccacaggaggtgcactgccccacgggcagctgtgctcacctgcgtggcgtccgcaggaagccctcagaccctggccagcctggtctctgcttctcactccaggctcaaggctggctgctattccattcaccccattccctttccctcaggccagaagcatcactcacaactccagacccttgcacaccaatctcctcactcagttcaccctcagatgtccaactccacatggccaaaaccgagaccagtctcactccaagctcatccacccgcctagctgcccaagctgaaatccacagttgccctgtacgaccccccgaccccccacctcaccccccagctcacctcaaacctcatcagtccctctgctcacagcctgcacagccaccacccagtctgggcaccatacctctctgggcaacccccatggcccccagccagtcttccagctcccaccctgactccagtgagctgccagagggatccttgaaaaatgctctggaagccaaggtgggcggatcacgaggtcaggaaatggaaaccatcctggctaacatggtgaaactccgtctctactaaaaatacaaaaaaattagccgggcgtggtggcgggcgcctgtagtcccagctactcaggaggctgaggcaggagaatggtgtgaacccgggagggggagcttgcagtgagccgagatcgcgccactgcaccccaggctgggcaacagagtgagactctgtctcaaaaaaaaaaaaaagaaaaaagaaaaatgccctggcactgctcagctcagaaccttgaaagggatccttgtttcgctctgggtcagggtcccatcctcaaagcagtcacttccagagccccatggagcctcatatcccatgatatccacccttattctgtctcaggcccaccagctgcctccctgctgcctgattgtcatgtgtgcattcctgttccagagcctttgcactggcgatgccatctgctgcctggatgtcttcctgctggctggtcccgttgcatggtagccttaggtgtctcctcagagaggtccctcgctgaccatcaggctcctcactccctgtcgtatccccttcaccaaagattcccattccctgacgacgcctgtcccctcggaatgcaggcctcgtgggaattcagcccatccgcaagtgcagtggcagggcggcccccttcccccttgacgacgcctgtccccttggaatgcaggcctcgtgggaattcagcccatctgcaagtgcagtggcagggcggcccccttctcccttgaggacgcctgtcccctcgtaatgcaggcctcgtgggaattcagcccatctgcaagtgcagtggcagggcggcccccttctcccttgaggacgcctgtcccctcgtaatgcaggcctcgtgggaattcagcccatctgcaagtgcagtggcagggcggcccccttctcccttgaggacgcctgtcccctcggaatgcaggcctcgtgggaattcagccccatctgcaagtgcagtggcagggcggcccccttctcccttgacgacgcctgtcccctcggaatgcaggcctcgtgggaattcagccccatcggcaagtgcagtggcagggcggcccccttcacccttgacgacgcctgtcccctcggaatgcaggcctcatgggaattcagcccatctgcaagtgcagtggcagggtggcccccttctccctttcctgtgcactcatgttgcctcttggggtgtgggaggggaaatggggcactcctgggcctccaggaggtgcagagaaccagggtgaggtgtccaccaggtcctgcctggctcctgacccctggcccctgctgctcgcgactggcctgcctcgtgccactgagcctcagagccattccgaacccccaccccaagttttccatctcttgatggtgtagggttggggggtctccatgtacagatactctagttcataccaggccttcatagggttattttccaaggggaagggcccctcgggaagccgggatcggagtcctgtgtggcaccttgcaggctcccacatgctccgttgtggccacggttccagcctggagcatggagctgtgtgggcaccctgcttcctgacgctgaccgtccttctgcagggggtccactggacggggcctgagctacaacttcacccacctggacgggtacctggaccttctcagggagaaccagctcctcccaggtgagctgtgggctctgccctcccagcccgcctgcacccccttgccctgcccaccctctccctcacccagcccctctgagtccttggatgtccattcagggctggccttggtgccggagcacaggcctggcagagcatgggtgtggtgtgtggtgggcggtggggcagccctcctgtgttccagggtttgagctgatgggcagcgcctcgggccacttcactgactttgaggacaagcagcaggtgtttgagtggaaggacttggtctccagcctggccaggagatacatcggtgggcgagcgcaggccctggggccctggccggggcgggggtactcctgggcaggttgcacccctatcacgcaggctgctgcctggtcaggagatacattggtgggcaggcgcaggcccttgtggggggatgggggtgacaagggataggttggtggtcggcgcaggccctggggccccaggctggggggtactcctgggcttggtgggtgggcgaaggccctgggcccctggggtggggggtactcctgggcaggctgcacccctatcacccaggccgcacccctatcacccaggccgccgcccaggtcttggacccccttgagccagcgcttcctgatgtggggcgggaggctggcctgcatggagatggggttcatcttgagtcagacgcccttcatcaccttgcaccctccctccgtgggagtcactgaggcgagattcacctgtgctggggggacagcaaggctcctctgcaggtaggtacggactggcgcatgtttccaagtggaacttcgagacgtggaatgagccagaccaccacgactttgacaacgtctccatgaccatgcaaggtgtgcaccgcttcctggggtcctgcccggctgaaagggggcagaggaaggcaggagcagaggctaagccgctcatccccagggcaggtgtagacgcagtgctcccccggcccaggcttcctgaactactacgatgcctgctcggagggtctgcgcgccgccagccccgccctgcggctgggaggccccggcgactccttccacaccccaccgcgatccccgctgagctggggcctcctgcgccactgccacgacggtaccaacttcttcactggggaggcgggcgtgcggctggactacatctccctccacaggaaggtgcgccctgcccctccgtccgccccggtgttctgcgccctcagccgctgtgccccgggccgcgctgaccctggtggtgctgaggcggccccgcccgcagggtgcgcgcagctccatctccatcctggagcaggagaaggtcgtcgcgcagcagatccggcagctcttccccaagttcgcggacacccccatttacaacgacgaggcggacccgctggtgggctggtccctgccacagccgtggagggcggacgtgacctacgcggccatggtggtgaaggtgggccggcccaacgccctgcgcgccccccggccaccttcctcccgagacgggacaggcgagcggtggccgcgccacccggtcccagctgccctggacacccgcaggtcatcgcgcagcatcagaacctgctactggccaacaccacctccgccttcccctacgcgctcctgagcaacgacaatgccttcctgagctaccacccgcaccccttcgcgcagcgcacgctcaccgcgcgcttccaggtcaacaacacccgcccgccgcacgtgcagctgttgcgcaagccggtgctcacggccatggggctgctggcgctgctgggtgagccggggccgctggggtgggccggccagggccctccaggctggggagcggctcctgcgaaggccccgctgcggggagcgcacttcctccagccgcgcgcttcccggggtcggcctccgcgtggcggggcctggggactccttcaccaaggggagggggagcgagtggtgggaggcccggccctgggtcggggggcggctgggcaacgaccccacgcggcgacggcccccccccgccccgcagatgaggagcagctctgggccgaagtgtcgcaggccgggaccgtcctggacagcaaccacacggtgggcgtcctggccagcgcccaccgcccccagggcccggccgacgcctggcgcgccgcggtgctgatctacgcgagcgacgacacccgcgcccaccccaaccgcagcgtcgcggtgaccctgcggctgcgcggggtgccccccggcccgggtaagccggggttccagggaggtctctggccccgctggggctctggagggggcggcccggggagccgaggcctgagtgtcaggccccgcaggcctggtctacgtcacgcgctacctggacaacgggctctgcagccccgacggcgagtggcggcgcctgggccggcccgtcttccccacggcagagcagttccggcgcatgcgcgcggctgaggtaggtgggccgcggaggggcgaggggccgggccgggccggggtcccgggggggtggggtccggggcgggggctccgaggcggtgtgggtgggaggtggagcggtgggccgggggcgttcgccctgaggtcgggccgagcgtccccagctcccctggagaaccctgaggaccggccactgcgcccaggacccggtggccgcggcgccccgccccttacccgccggcggccgcctgaccctgcgccccgcgctgcggctgccgtcgcttttgctggtgcacgtgtgtgcgcgccccgagaagccgcccgggcaggcaagtggcagtcccctaacccgcgccgcggcccggactccccttccccgacgccatcacagcccttccctcccccaggtcacgcggctccgcgccctgcccctgacccaagggcagctggttctggtctggtcggatgaacacgtgggctccaagtgcgtgagtggggccgcccctccctctgcctggtcctaggcaggtccctgggtcccgaccccttcacccatgcggtcactcgggccacttgccgtggcccatcggctccctccctcgccgccctgcgtccctgcccttcaccccacacactgtgggccacgcgccaggccctgccagtggggtgtgggttctcctaggggacatgagatggacattcgggctccagccctctcctgcctgggcaggaagagtgcccaggggctggggaggtgccgccgaggggcttgagggaatgaggctgtgggtccacgcggccgtgccctgcctgctcccacctttgaggactgtcttgaccccagccttgttcttggcctgacctccccaggtgcctgtggacatacgagatccagttctctcaggacggtaaggcgtacaccccggtcagcaggaagccatcgaccttcaacctctttgtgttcagcccaggtgcgcccaccacccgctgccctggactcggccaccccattcttgggcctcagggcagtactgggtgggggcctcgagaagcctggggtcagggggctttcgggtgggggcaggttccggttggcacacatgtccccttgtctccagacacaggtgctgtctctggctcctaccgagttcgagccctggactactgggcccgaccaggccccttctcggaccctgtgccgtacctggaggtccctgtgccaagagggcccccatccccgggcaatccatgagcctgtgctgagccccagtgggttgcacctccaccggcagtcagcgagctggggctgcactgtgcccatgctgccctcccatcaccccctttgcaatatatttttatattttattattttcttttatatcttggtaccaacgccccctttaaagcggctttgcacaggtca

SEQ ID NO: 1201 - DNA, 80472 bp, Homo sapiens
attctcgaggaagacgcaccgcccccacacgccccgaccaatcgctcgcgctctggttgcgctggcgccttaggggctccagtgccaccattgcttttgctgcttttctggctttccctttcggacatgcgcgctcggagcaaggcgccctcgcactcagcttaccgcgcatgtacgttgccaggggtaacgcaggtagccaaagtggcttgtggagtggcgaccgttagtgaggcggttgctgagacagacgctgaggcgggtaggaggagcccgagccgtaagggaagccgtgatgagggccgtgttgacgtggagagataaagccgagcactggtgaggagcggggcggttcgcgaagagcaggaggtcgagtcctcgcggggagtgcgcgagccgctgcagcgtgtttgaggggggcagcgggcttgctgcctgggccgagggcactgaaccccggcctgggagactgcagggtcgccctcccgccccttggcggttggagaaactcccgagggttggagagcggcaaagggaggtgccgcgcctgaggtggtggcgggtggaggcggctcttccctcacggtctggccctgtcgctgccttggattcatctcacacccacgagacagcacgaagctgctcaagcttcacagttcttgccacatccacatagtacccatactcttgttttcttgacgtttttctctaaattgtctcatttattttaattatgatttcacattttacaaggaaactttattactccatttatgaaaaccagtgtcacttgctctaaatgttaagataaaatcagcgtcgcttgctctaagtgtaaaagtaaaacttaaagtagggagaaacaaaactgaacaagctgtagctagctattgttgctagggagcctttaaacctgagatctcgtttctctaaaactggagatgggcaggtatgatcagaaaggtgctcaaaatgagcaccaaacacaagctctcctaattgggaagtctgaaaaagaactgaaggggaatgactttgtcaccttttgattcagttatttaatgtcctattccattgttatcgcctaaatctataacatagcagtctgttttgtcatattcttacttatgggataggtcttggcctgactttgaaaatcattcagcattgttgtgaagcctctgttctggccactggagcaggttacttgtctttggttctgtcccttctgagatctttctctgtgtaaagcatgccgtctctcctcatctcacacggaaatcctgaacatccttcaaggctcacgttggagacgggtcctctcttttgtgttcggcactagtggtagctgacactatgtgccaggtgctggctaagcacttcatatcctttatctcgttgtgtcttcaccactctctaaggtaggtactataatttcctctattttatgtatgaggaaactgaagcccagagagggtggataatttgccagcgtcacacagtgaggggtggaaccagctttcaagctcaggtcttcctcactccaacgtcaacgctctcagccactacattaatttttccttatgttacagacgtggcaaactcaaatgtctgcaggagacaggcaggtaacataaatgggagatgtttatttgcatcttcaacactaggaattgtatgttttccctaggaatagtcttgtattctgtaccccatttttcttgaaacacagccgtatcagtgaatctttcatttgtacttttaatagagatttgagttttaaaaaatcattttacttttaactttattataaacgtacctatagcacaagctgatgatagctggcaactgaacatttggcttcaatgtcagagtaatagagtgtggcaaactgcagagctcatgctcggcctaaaaggggcagctgctgctcagctcctgccaattaccaccatgcaggaatttggcctagtgtgctcagctcttcctgtttttaccagaagctaggaatctgggtttttatgtgaaatggcctaatttttaaatgttagcatccactctgaaaaaaaaacaaaacaccgtgtgggccaaataaaacatttgctggccgaatgcagcctgatttgctctgttttcaacccctggcacagaattttgttcatttctctcttgtggtacttccagagtctgttgagcataagagttaattttttaaatctgtttaattcagaagtctaataaacccgttaaaggcaatggctatgtcttactcgtttccaaattattctagagacaggtcagtggttgttgttactatggatagtaataaaatactagatatatataaaacgaaatactgtgggtagatgtattcatacgtgaatgaatgatgaataaagattggttttctggtttttggcccattacagatttgagacaacctattaggataagggatgtaggggttctatagaccatcaatcctgatggctgctagatataccagctgatagcccagaatgaaaacaaaacaaaaaactaaacaaaaaaaaaaaagacagtagaactaaaaaaatcctagatgtcaaagattagtcctccacatccaaatcagccattgtctcccggtctgctcctttgcttctattttaaccttcacatagcagcaggaactctgtttttttaagacctgctgctgtgatcctgttactctacttctcataaacctagagtgattcccaattactttccatgtcaagtcgtgcattttgctagagggtcctcctgaccctcctccccatcaggcttgcaacatttaaatttatacttttaggttgagctgaaaactctatttttctacccgaagatccttcccaaatgctcccttattctatgaactccctagttttctcctttaaatgcacagctccaggttcatctcaaccaggatgtcttattaggctagcccactgtattccaatcaggctagcatctgctgtaactctccattcatgccagctagtatttactgagtacttgctataggccacatgtccacatgtctttataggtgttatcatgtttaatctctacaacatgtgaggttggaattttcatctcatttaaagatgaagaaattgagatttaatgaggtgacataagttacctaagattacaaaatgagtaagtggggctgggtcagatgatgcaggaattggagaggcactgtgggacattggtttacagtgaggtgggtgcagggttgtcagaggacaatttgcaggattcctctgtatctctgcaatggaatctgacagtgtgtcttctgacagtgtatctcttttataaaaagaggcaggtggagagagaaccatcctacagtagaatagactgcctgcaaatgagtgagctcccagccctggagtgttcaagcaggggctagatggccatctataaggaattcttgccctgatgggccagatggactgcatgacaaggtctagagtcctttccaattctgagtttctggtgatttcataattatatttattacatgtctaggacagtgccatgcactgtgggtccacaaatatgtagaacatggccattgctttcaaattgtgtatgactataattaaaggggcaaggcaagataatatctaacacaatgtaaagaagactgtataagtcagagctaaactgaaatgtacagattctaagtacattaagagtttagattggggcaaatcagacatatatgatatattttaggaaggcaaatttcaagatattcagagaaaatgaatttttatatctaagaggaagaatgttcaggcttggctcaaatgagacattcagaaatgattttgtgataattcaacccaaaatgacccttatgaagaagaggtcacacaggaatcactttgatgagctcatatgtgtacaaggcagaaaggaagccacataccaaggatgactttagatgagaggtgcagacactgctccaacatctaataatccaccatagcaatccacaagtgtcaggcgctttggatagactggcttgtgcaccccgtgagtaggaggctacctctctatccttgttttgtaggtgagaatgaaagctcagataggagatcagcttttctggccccacgtcccccctactttttattccgccatgctgcttctcaaaatgtgaaatgtgccaaggctcagaggaagaaagcgtaagaaacaaggaaggcccaggtctgttaccacataatggtgaggaagctgaaaaactcagggcttcagtttgcccagctggaaagagtgtgataatcatccttgttccagcttctttatcagccagctctgtgactaggagcaaacaacttgcctctctgtactttagtttcctcattggtaaaatcggggcagtggtgcctgtcctgtctactacattatgttttcgtaaggatcaaataagataatgtaagtttacactcttttttttttttgagacagagtctcgctctgttgccaggctggagtgcagtggcgcaatctcggctcactgcaagctccgcctcccaggttcaagccattctcctgcctcagcctcccgagtaggtgggactacaggtgtgcaccaccacgcccagctaatttctgtatttttagtagagatacagtttcaccatgttggccaggatggtctccatctcttgacctcgtgatctgcctgcctcggcctcccaaaatgctaagattataggcgtgagccaccatgtctggccaagtttacactctttaacaattcttaaatattgaataactgtgaagagtttttattaaaggaagcgtcaggtcaacagagccatattaaaagctttctgaattcttcatgtaatgccttaagtaggtaataatacctttttttgacatatgccaacaatgataatggcagccacatagcataatggttaaaacatgggcttcaggccagattgcctgggtttgaggccggatgcagtggctcacacttaaaatcccagcactttgggaggctgaggcagatggatcacttgaggtcaggagttcgagaccagcctggccaacatggtaaaaccctgtctttaccaaaaatacaaaaatgacctgggtgtggtggcaggcacctgtcatcccagctactcaggaggctaaggcaggagaatcgattgaaactgggaggcagaggttgctgtgagccaagatcctgctactgcactccagcctgggtgacagagcaagactccacctcaaaaaaaacaaaaacaaaaacaaaaaaacagattgccttggtttgaatcctggctccatttccattcagtagcactttattttcaggcaagttatttaacttctctgtaccatagttttctcatctgtgaaacaggtatacagttgttttgaggttaacatgagttaatacatgtaaagcatttaagctgtacctggcatacacaataataaatgtgttcaataaatgttagtcactgttattaaagtatgaaggataacagatttgacatacttggcagtaattcaagggagcagaaggcagcatagcgcgttaattacaagcacagactctagagtcagacctgagttgaaatcctggcccttgcacttgctagttgtgtgacatcaggcaaactacttgacctctctgagccatggtatcctcatctacaaaacagagtaataattcctacctcacagaattattgtggagatgaaataaaataatgcattttaagagctcagcaggtgctgtctggaataagagttcgaagtactgtcattgagagtgtacttccaagttactgacaaaagcttgatttttagattactggtataaaccaaaaataaaattcagaggccccccaaccatctgaatggatttccttctcaaccagggctcttttaaaatttaacctgagagactgtttcaggccatgatgggaaatgggggtcaaacatgcctcagtatacctctctggcattaacatcaacacagactttaagtatgataagaaacattttacaaactctcctctctaaagcctagtacctcaaggcttcctctgcaaacagtaacttgggttgccacaatcctttatcttaacccaggcattcctttctgttgaacctaggttttttgttttttttttttctgagacagagtctcactctgtcgcccaggctggagtgtagtggcgcgatctcagctcactgcaagctccaccttccgggttcacgccattctcctgcctcatcctcccgtgtagctgggactataggtgcccgccatcatgcttggctaattttttgtagagacggggtttcaccgtgttagccaggatggtctcagtctcctgacctcatgatccacccacctcggcctcccaaagtgctgggattacaggcatgagccaccgcgcccggccgaccctaggtccttagataagctcaaccaattgtcagaaaaattttaaatcaacctataagctagaagccccctgcttcaagttgttccatctttctggaccaaaccaatgcatttcttaaatgtatttgattgaagtctcatgtttcactaaaatgtgtcaaaccgagctgcaccctgaccaccttgggcacatgttctcaggaccacctgagggctgtgtcatgggctgtggtcactcatatttggctcagaataaatctcttcagatattttacagagtttgattttttgttgacactggcaagtttatcccatgctaaacttttactatgggttgggttttgtttttttgttgttgttgtttgttttttgtgtgttttgttttgagtaacttcagtagtaaccttaacaatagtctgttttgacaggtttttgacacattcttactatagtcacctgaaccaatgaaatcctctgcctggggcatttgaaaaatctttgtaatatggctctagcccatttttctagcctcatttctccatgttctagcaacatcttgcacatagccagatgtttcagtcaaattaaattattttgattacttgtgttggcaagaagagtcaaactgcaaaatattttaagagatttattctgagcctaatatgagtgaccacagccagtgacacagccctcaggaggtccacagaacatgtgcccacggtggttggggtgcagtttggggaggcatgagacatcaatcagatacatttaagaaatacattggtttgatccagaaaggcaggacaactcaaagtgagggcttccaggctataggtaaatttaaacattttctggctgacaattggctgagtttgtttaaagacctgggatcaacagaaaggaatgtctgggttaagataaaggattgtggagacccatgttcttatttgcagaggaagccttcgggtactaggcttcagaaagaataggttgtaaaatgtttcttctcaccctgcaaaacagagtcttgctgtcacccaggctggagtgcagtggtgcaatctcggctcactgcaacctctgtctcccgggttcaagcaattctcctgcctcagcctccctagtagctgggattacaggcgcccgccaccacacctggctaatttttgtatttttagttgagacagggtttcaccatgttggtcaggctggcctcaaactcctgacctcgtgatccgcccgcctcggcctcccaaaacgctgggattacaggcatgagcaccgcacccagcctaaaatgtttatcatacttaaagtctgtgttgatattaatgccggagaggtacaatgaggcatgtcagaggcccacttcccgtcatggcctgaaacagtctctcaggttaaattttaaaagagccctggttgaggaggaagtccattcagacggttgggggggcttacaattttatttttgttttacacttgttatttctcactttcatgtctttgcttgttttattttctttgcctgaaatgtcctttacccagtgtcctcctccatgtttcaaaagccctacctttttcaaatatcttcttcattaatctttttctgatcctctccttgaattaaaatgctgttgaagcggcgtcattgtctggggtaaatatccgagatttgttgtctcaacagcaatggaaaactaggatacggacacaccagagtgaggttacgagtagaagtttaacaggcgaaagaaagagaagagctcactgcagctgacagcgttctcgaaaaaatgagttgccacctctgtggtgaaatgcaggttttatagataagcttgaggaggtggtgtctgatttacatagggcacaaaagattgattggattggtgtttcatttgcataactttcgaaaaactggttagggctaggtgtgtcatttgcattgggtgcgaaaagctggccacccccaccctaatcttttattatgcagttgggttatttacgtggccagcgccatgttgcccgtttctttactgtacacgtggtgacaaattaaagggaggacagaacctccatgttgaacatacttggcccccaggtagcctttttctattggcacagctgccggcattcaccagtgcaagcttccagcttgcctttttatttatttatttattttttttttttgagacggagtcttcctccgtcgcccagactggagtgcagtggcatgatcttggctcactgcaacctctgcctcccaggttctagtgattctcctgcctcagcctctcgagtagctgggattacaggcgctcaccacccaccaccatgcccagctaatttttgtatttttggtagagacaaggtttcactatgttggccaggctggtctcgaactcctgacctcaagtcttcctcctgccttggcctcccagagtgctgggattacaggcatgagccgctgcgccaggcctcagcttgcctatctatgtttgcagctcgatttttcaggctgctctttgttagaaaaaaataatttcttgggctgctttttattaaaagggaagttctgccgaagactcttttaccttcactatctggctaaataatttctttctagctcctgtatcactgcgtcttcctccttcgaatcctgttttcatgtgtctcttaaagcctttatcagagtactgttctgtatttcatccaatctaataggtcattgattataaaataccattgttttgtgtatcaataagaaagcaaaaaatgctgccagttacactgaaacatcatcaattataagacacaaccttagaggtgagaaaatgtgaaaaaaaaatgtaagctttagaattgatgacatatggtagttctttgtgaaagtgtctgtttcacaccttctcactggatagtaatttccctgaggggagggagggattatgatctgttcatatctgttggtgcctggcacctaagagggactcagtaagtatctgtggatttactggcccttaacacattctctcatgttgtctagcctttatgatattattagaagagttaataccctcaacagttgaccctttgaataatttcttgtgtctggcttctggacaagaggaaatcaggacaaagagctaactactgagtggatcatgattgaatgggctgctgtggtgtggcggttgaatggaatttgcaacaaatgcaattcgtagttattctttttctcctcagtacacacacagtgtttcttaatggcaataaagtttactttcctggccattagcagacttcatcattttggttcctaattgtctttttcccttgtcttctgttcagtataaatgacatcgcatttaagcctgatggaactcaactgattttggctgccggaagcagattactggtaggattttgtcttagtttcctcttaaagtgcttccctaacctccctcttgtgagtactctgaaatttgaccctttttttttttttttgagattaaaaaggcaagggtggaaaaaccttccctattactttttaatagggatggaaatgggctatttaaaacgggcaagtaaactatcagataagaacctgtgaacaataccacctttggggtcattcatctttccctttttactttgagacacccatgaaagagttgaaaacaatcacaatgcctttgaaactggactggtgtcagtttacattttgtcccccagaaaaattcaagcaacaggactgacggtgctgtgtccatgaaaagtcagatagcctgaccccaacttttaggcattggcctatctaaacagttccatatggatgttgtcctatttttcatattttcaaataacataagctccctctggaacctatccaggtatataaaagtaattttcagagaaccccttatgtttgaccaaaaaacctttgtatgatctctctttctgtctaagtctacttcctcttctctgttgtctctagatacgcagactgattaatctccattctttgtatggttaactacataatcttaaaacatggttaaattgttctgcagacttctctccagtgtaaacaatccaaactctattagtttttctacataggttatcttttccaatactctaaccatttcagaaagtttccgcttgatttctcagatggtgtgtgtgtgtgtgttttttttttttttttttttttttggagacagagtctggctctgtcgcccaggctggagtgcagtgacgcgatctcggcttactgcaagctccacctcccgggttcacaccattctcctgcctcagcctcctgagtagctgggactacaggcgcctgccgctacgctcagctaattttttgtatttttagtagagacggggtttctccgtgttagccaggatggtctcgatctcctgacctcgtaatccacccacctcggcctcccaaagtgctgggattacagaggtgagccaccgcgcccggccagatggtgtgtttttaaactctccacatagtgatagatgtcacatggctatcaaatacctaaatccatattacagctgggttttattttatttcttagagacagggttgtgctctgttgcccaagctggtgtgcagtagtgcagtcatagatcactgcagcctcaaactcctgggcttaagggatcttcccacctcagcctcccgagtagctaggactgtggacacacaccacctcgtccacctaatttttatttttttttatttttatttatttttattttttgtagagatggggtttcacttagttgcccaagctggtcttgaactcctggtttcaagcaatcctcccacttcagcctcccagagtgttgggatgacaggagtgagctaccatgcctggcctacagttgggttttataacattccctcctacttgaaagcccagagttctgtgactttcaaattcttggtagcaaatatgaaacatctattatgttgatttagtgcagagctggcattaaaatttaatcatgttgtagctggctctttttatgggctagttttatttaggagggcctgccttgatcaatcatatatccaaattcaggtaaggatgagtataaagaatttccatggagtgagtaattgaacctttggttctcaaggattggtagtatattcctggtcacatagtacatagacctgggtcctctacttcttggttacccaactttaagtcacgttgtttttggttttgcagtgcagtttttattggctacagatttagaatattgacacgtattgttataaaaacaaaaatagcagtagcaaccctgcaggaattctgactaatagatatcacatagataatctgtatttgtctcttttgccaggtttatgacacctctgatggcaccttacttcagcccctcaagggacacaaagacactgtgtactgtgtggcatatgcgaaggatggtaaaaggctgctctgggtttccattctctataatagcctcatcattgttcatttttctctttagtcactttttaattatttctagtaagctggagtacaagttgcaagttcagaagacagtgaagttgctaagacttcagtttggtcattcaatctagcaagtatttattgaggtcatctatgttccaggcactgttcaaggtgcttgagttacttcagagaaaaaaacggtggtccctccccttatggggcttctgttttatggggtggtggtgagaagtgagggaggaagaaagtatgagggaagacatacagtaaacatagtaaaaaggtaaattaagtagtatgctggaaggtgataactgttatggaagaagaaaaagtagagcagaatgagggggattgagagtgctgggcagggcagggggttgggtacagtattgaattagactagtgagggtgggctcattgagatgaggacaggtgaggaaaaagactttgaagtcaggaggcaatgagattgtgccagtgggcatcggggggaagagagctctttgcagaggaagagccattgcagaggccctcaggtgtgggtgtggctgctaggagctggatcaaagagaatcgggaattgtagaggatgaggataaagtggtaacagacatggggtggtcagatcataaagattttgattctcagtcaaaatggaactactgaaaggtcctcagcagaggagggatctgatttgatttgtattttaaaaggatccctctagttgctgagttggaaacaacctgcaagaggtgagggttaggacatctgtgtgaggaagcatcatccagacagggggtgatggtggctcagacctctgtgggggcagaggaggtgatgagaaattatcagactctggatataatgggagggtggagccaactggattgtctgacagattggatatgggctatgaagaaaaaggagtcaagtttttgacctgaggactgaaaggttggagttgccccccccactgagatggaaaagactgcaggtagagaaaagttatggttgaagatcagaaattcagttttatacatgctgaatttgagaaaagttgatgatgtcggagaggggagagaactgctggaacagagttgttgagtaggcaagaggagatgggatctagggcatagacggggtatttgctttagataggggcacagtaggaactgcagaggccagcagatggggacaatgtggtagtaggaatctaatggaaattctcaattccattttttttttcttcagtgaaataggaagcaacagcaactgagagtggcaatggggaagggaggtttcagagagttgaagagaaagggaaaaagtgtaaagtcactgcctcagagaatgggacagcgagtggacccaggaggtgtagtgagatccccggtgacatgaagggccctcttgaagattgtgatcatgaattgaaagtgagattagttggtgtgattgtgtctttttctccagcgattttgagctgcatagttgtagaggcagaagaggtgaatttaaccagaggtggttttgcaagcacatttgaagatgaagtaggagggcaagggagcagaaagtgtatacagataaataattatgtacattaaccttgaattgttggctgaataatgaagggagagaggacagcaatggagaagtagtaggttctggtggtgttgaaggattgttacagttggggtaccaggtgggttgggaaggaagggaagtggtgcatgaaactgagatttaaatttattttaaaataaatccatgttgtcccacagcataggattagtgggaagaaatgggctttggaatgagacagttgtgagttccaaccccaacccaacaccagagttctgtgagtctgagctggttattgagtctgagtcacgatttcttcatgtatcaaatggataacattgagataacattctgtagccactgccaagaagtcacaaaattgtaatgttataattcttgaatgaaccttggagattattccagtcccaggtttttaacttcttttggctgatgggcctctttgataatcagatggaagctttagaccactttctagaaagatgcaaattcttcatgtgtatgcagaatttcatgcatataattttagtctgattagtccagtctcttcactttagtcctgcataaagacataaacaattggccaggcacggtggctcatgcctataatcctactgaaatcctaaagctctgggagcctgagttgggaagattgcttaaggcaggagtttgagaccagcctgggcaacatagtgagactccctaaaatctggcctgggtgacagagctagactctgtctcttaaaaaaaaaaaaaaaagacaagtcatgtgacttgccaaggccatgcagcagattggcccaaagacaaaactaatttcttgcttcatagtcaggtgtgctgtaccatggtagtcatatttgtgtgtgtgtgtgtgtgtgtgtgtgtgtgtgtgtgtgtgtgtgcatgtttgagttcaagttcagaataatgttttagggagacctgtgaggagggagcctggagagctgaactgtttctgtctcatcctagtggctgttgaggaatgtgggtcagtccagggcccagtataaggcccagtaggtacagaagagctattgggcctctggtgcctctggtgtttataagcatagcagggctctttgacctgcaacaccattagggcacttgaggatgtcagagtgtgacccatcagtagtggcatttgcacagcactttgcagagtcctgtcacacacatctcacttgatgcttccaacaactctctgaagcaggcagcaaggggactcttatctccgctcaaagatgagaaaacagacttggagcaattacaggtgatggtggcagaggcaggcctaacccaggttctctgactgcagagtctttgttctttctagtgtatcatgctgcctcttcatgacacctgtataatgattaagaagtcttttagtcctcagaattggttttttcctcttagacctgaagattgagatacactgaattccagctttgctctttaagtctgcttgtttctgatttctcctttaagttcattaagttttttttgtttttttttttgagatgaagtctcgctctgtcgcccaggctggagtgcagtggcgcgatctcggctcatggcaacctctgactccctggttcaagtgattctcctgcctcagcctcctgagtagctgggactacaggcacgcgccaccatgcctagctaatttttgtattttcagtagagacagggtttcaccatgttggtcggcctgatctcaaactcctgacctcgtgatccgcccacctcggcctcccaaagtgctgggattacaggcgtgaaccaccatgcctggcccaagtttaataagtatttaatgagcaaccatgatataaaagtatgtaagacatagtttttttgttcaagaaaaacaatataatatgaagaaataatagaaatagctaatttttttttaattctattccaggcccagttctaagcaacataagggttaggggtgccactgcctgtgcaataaaaaatctgcatgtaatttctgaaccccccaaaactttactattaatagcctactgttgaccagaagccttacctgttacataaacagttaacacatttttaatattatatgtattatatattgtattcttaaaataagctagataaaatgttaattgagaaaaaagaaaaatatatttactcttcattaaatggaagtggatcatcataaaggtcttcatcttcattgtcttcaggttgaataggctgaggaggaggaggaggaggaggaggaggaagagggattggtgatgctgtgccagggagacagaggcaaaagaaaattcacatgtaaaagtggactcatgtagttaaaactcatgttgttcaggggtcaactgtatgtacacatgtacatacactcatttaatcttcacaccaaccatgaggtaaatactaacattgtatccatttttcaaataaggaaatgaaagctcttcagtagcttgtttgggtcatgcagctggtcagtgagatctctaggaattctgacccagagactctgagcccaaagcttatgcttttcatcaccatcacctgctacctaccaggatgagggaggagtgatggaaatagtaagagcagtttctttgtttatttagtatttgcagcaatatcatatggctcaccctaatatctactatttcagctactgtaaaaggtacttggccgggtgtggtggctcatgcttgtgatctcagcactttgggaagccaaggcgggtggatcatgaggtcaggagtttgagacaagcctggccaacacagtgaaacctcgtctgtactaaatatataaaaattagctgggcatggtggtgtgtgcctgtaatcccaactacttgggaggctgaggcaggagaattgcttgaacctgggaggcggagattgcagtgagctgagattatgccactgctctctggcctgggtgacagagctagactccgtctcaaaaagggccagtcgtggtgactcatgcctgtaatcacagcactttggaaggcggatcacctgaggtcaggagtttgagaccagcctgcccaacatggagaaaccccatctctactaaaaatacaaaaaattagccaggtgtggtggtgggcacctgtagtcccagctactcgggaggctgaggcaggataatcgcttgaacccgggagtcggaggttgcggtgagccgagatcgtgccactgcactatagcctgggcaacagagtgagacttagtctcaaaaaaaaggtactttacagatactatcttagttgactcccataaaaagactctgaggaagatactgttcctctgtgtttcagatgaaggcattgaggctcagagaacagtgacttgcccaaggtcaccttccacttgccctgtgaataaagtctaaaagtccttaagatgtacagaatgtggcacatacttacctcttaatcctcgtctctcaccagagtaggtgaagaccccgttatttgctgccatggtaccgtgatcctcttccaaatgcttataaatgtggaacagtgtaattaataacaaattacttgttatatgttgcctctctccagtctgttccttcataaagcccaagtagtatgaaaatgcgaatctgatctatcactctttgcttaaaacctttctttggcttcccattgctttaggataaagagcaaggcctctgctgtgtccctgaggtcccaagagatccttccacaacccacctcacccttccctccgttccatgatgactccgctcattccctcagacatgccaggcttttcctgcttcagggcctttgcacatctgttccatccatgtggatgggtctgtctcctctctacatctggctaagctctgctcatcctttaggtctccactgaaggatctcatccttagagaaatgttccctcatctaaattaggtcccccaggagatgttgaccaaagggtagtttcagtcagacaaaaggagtacatttttgagatctattgcacagcatggtgaccatagttaataatagcgtatatttcaaaactggcacaggaatagtttttttttttttttttttttgagatggagtctcgctctgttgcccaggctggagtgcagtggcgtgatctcggctcactgcaagccccacctcctgggttcactccattttcccacctcagcctccagagtagctgggactacaggcgcccgtcaccaggccggctaattttgtttttgtatttttagtagagacggggtttcaccgtgttggccaggatggtctcgatctcctgacctcgtgatccacccgcctcagccctccaaagtgctgggattacaggtgtgagccactgttcccggccaggaatagattttaaatgttctcactataaaaaaataagtatctgcagtgatggatatgttaattagcttaatcattcttcaatgtgtatgtatataaaataccacattgtacttcataagtagatataattattatttgtcaaaaataaaaatttaagtaaaaaagtaaatcaggttccccagttattctctttcataggatccgtgtcttaccatgttgtatttgtgttagattaatttgatgtgtacttcttacactagactgaactttatgaaagtagggatcatgtgtgttttaatcattacttaatccctagcatagaacatgacagctacatgtagtaggctcccaatacatctttgtttactcagtgtcagacaaagcaggtttggaacccaaatattctgactccaaggtcctgcctcccagtactgataagaactaggaaagaagctaacacttactaggtaccttaaagaactagttttctaaagaattctctctgggaaatgctggtttaagataaatgtaagactttccattttacaaacacttttaggcaagcgctttgcttctggatcagctgacaaaagcgttattatctggacatcaaaactggaaggcattctgaagtacacgtaagtaacttaggtgtacagtattatgagtttgatgcttattgaataattgcagcaaaagcctcttagaaaagatgtaggagaaaacttttttctcttaaattgaacttgaaattaagttgtgggtgtgtgtggttggtataggaaggttgagtagtgaataagttaatgaatatttcttggccacttactggcgtggccagcactgggctaggtgcttttatgtagctcatctcagttcatctgacattgtagactttatcccacccccaacctgtcatcttccagtgtccctgtctcagagaatggccttatatccacccagtgtcaaatgtcagaaacttggggtcagtgtgctccaggcctcctcttactattggggatctgccgtgttcttcccctgttcctctactagttggtccctatttaccctgcagatctcagactcaaatgtcagtttctttgtaaggactttcctgcctctctagactggaacaggtctctttcgaggcatttctcacaattgcagttttaggtttattctggtgactgatcagtattgctcatcggcctgtaagttccataagaacagatactgcatctattttttgttttgttttgttttgttttgagacagagtcttgctctgttgcccaggctggagtgcagtggcacgatctcggctcaccgcaagctccacctcccaggttcacgccattctcctgcctcagcctcccgagtagctgggactataggcgctcaccaccatgccaggctaattttttgtatttttagtagagatggggtttcaccatgttagctaggatggtctcgatctcctgactacatctattttttttttctcactcttgtgtccctgatacaatgcctagcccataattggtactcaccaattttccttccttccttctttccttccttccttccttccttccttccctccctccctcccttcttccttccttccttccctccctccctcccttcttccttccttccttccttccttccttccttccttccttccttccctccctccctcccttcttccttccttccttccttccttccttcctttcttttcagtcttgctctgtctcccaggctacagtgcagtggtaactagctcactgcaactacaaccttccaggctcaaataatcctcttacttcagcttcccaaatagctggaactgcaggtgcacacccccacaccaggccaatttttaaatttttttttttcttggtagagacagggtttcactttgttgcctgtactggtcttgaactcctgggctcaagcagtcctctcaaagtactgggattacagatacgagccactgcacctggcctcttttcaattgtggtaaaatatacatgacataaaatttatcatattaactactttttaagtttacagtttaatgttaaatacatttacattgttgtgcaaccaatctcccaaactcttttatcctgctaaactaaaattctatatccttcaaatacctactcacccttctctcctacccccagcccctgaaaaccagcattctactttctgtctctctgagtttgactgctttacatacctcatataagtagagtcatacaatgtttgttcttttgtggctgagttatttcatttcacgtaatgtcctcaaggctcatctgtgttgtagcatgtgtcagaatttactttctgtgttgtagcatgtgtcagaatttacttccttttttttctttattattatttttttttatgaagacgaggtctcactatgactcctgagctcaagcaatccttctcccttggccgcccaaactgctgggattacaggtgtgagccactgggctcagcttccttcctttttaagtctgaatattattccattgtatatatagaccacattttctttatccattcatctgttgatggacacttgtgttgcttctgcttcttagctattatgaataatgctgctatgaacatgggtgtacaaatcaacaaacaatttttgaaggaatgaatgaatgagtgaagttgtaagtaaagtattacccacaagtgaaggactaaaacgggttgagacgccttgcatggtacatgatttgctcagctttcattgttgtctaaggatttgtcatgtttccagatcttggtctgtgatgtcttcattgcacctccatcttccatttctgggcctccacaaaacagtaagagtaacagccacagataaagcacctaaaggccaaggtgggaggattgattgcttgaggccaagcgttcaaaaccaacctggccaaaagtgagtccccatctctacaaataagaaaacagtgggtgaggagaaggagaattaattctttaggagtaggagaattaatttctgtgctttttgttggtcacttgcagaagagcatgtggtctaaagtcagaggctgtgggctcattattaaaatcttcagttgtagccactgaaatctttgtggtttgctgcatagtaatctacagttgtttacttcccaggcacaatgatgctatacaatgtgtctcctacaatcctattactcatcaactggcatcttgttcctccagtgactttggtacgttctgattcctgatgtcctgtcctggaataactgaaaatctgggctaaaaatgctaaaatgcattcagaatatggtgattttatcctgagagagttaatactacttctctaccttcaatggctgaggggaggctgacagttattctttaaattgtgtggaaaccaagacagtgaatggtgacctttactctggtaagacatcagagactacaggaagggccccagcaaaggaaatggtaacaagattgggagggcacaggcataacttggtgttgctgcctttgggaagccttcccttggtgttgctgcctctgggaagccttccctgactcaccctggcagagacagtgcagttgtcctcacctttgtattgacccacatctatgtttatgtgaaattcttcactgttgcggttctacttcttgtgcaatttgtcgtcattactggtttaggtggctgtagctgtcctccctgaggggctgaacaccttgaggagttcatcctggccacggtcccgtgccagcattacagcactggtgtagtactggcacaaaagaggtgtcagtaaaatgtctgtggagggaggaagggagtgaaattgggcagaggcttgtaggttatttccattaatggttgattctgttttcagctctatcagtctgtgttcgttgctagtggatacaatgaagtcactagatgaggagtcagaggcctaatccctctcagtgttccagttcccttatctaaaaggagcatgctactcactgtgtctcactgatacggttctggttctgaggttcaaaagagagaatggaattgaaagccaattgtataaatacatggagaaaggcctgtcatttgtttaacatattttatagcattttcttcatgtgaagcactggtctgtgtgcttacactggaatattaaaaaggcaaaatagaatccctaccctcaaggagcttgtggtcttaggagaaggtgggattaaaaaaaatataatattaagtactagtatttattgaatgcttgcagtgtgctaggcactgttctaaggattagaaatgaatttctatttgagctttatgacagcccctgaggtgtcaggtattattctcattcccaccctactgatgaaaaagaggtagaggtcccttagctagtaagtggaggaaccagggcttggactttagaccaggtgattgcatacagagcctgctctgctaagcactgctgaaggaggcccaggaggaaggagtttcttccagcttggggctccaggcaggcttagtggaacacagataacatgtgcacacgtcaaaatgtttggaggaagcgttctggaccaggggaaaggcaaaaaataacttgtttgatgttgcacttggccatgtatttgtgcactggagttaccttcttgattgtacttcgcaacttggcaaatagaagaatttgcttatgttgtctagacatacacttgctatgaggcactgagccagggcatctgggacaggggggagcaagccttaggtgaccagtgtgccatgggagaggcacagctcagatagagtcatgtgttgtgattgagacctatgaaagaaaactagattttcagaaagcatcattgttattttaaatgctaggttatactctggttgcagtgtcaaagttataaacaatgaaactgtcatttctttgagagtcaaatccctgaaaagttggctagaactttaccaatctattttatttttcttctgaaagaatgatagattcatagtaagttacaaagatggtaccaagaagtctatgtacttttcatccagtttcccccagtggatccatcttatgtaactattatacaatatcaagaccaggaaactgagactggcacaaagtgtgtatattatatagttctgttgttttatcgcatgtgtagattgccatcagcgtgacacagaactaagccatcaccatgcagttaccacttagtgtcatatctactcaccttacctccagttatctccaaaccctggtaaccacaaatctgttctccatttctataattttgtcattcaagaatgttatataaatggaatcgtacagtatatgaccttttgagattatgttttttcattcagcataaaatcctggagatccatctaagttgttgtatgtttcaattatttgttcctttttattgctgggtagtattccaaccaatccatcttcttttatattattgtgcattgaagggttgtggtctcctgaacagaagtctgtctccaaacacaaatcaagcagcaagatcatctgctgcaggtaagtgcagctctgacgataagatttatgttccttcatcttccacacagactctcaaaatccaattatttcatgcagcagagaaggtcttgtgttaggtagttggtttaggcccctgtatttccttttttcttctttcttcgtctcctcgatgggaaagacttgtgcctttgatcatgaagcaaaagagaactacaagttgccttcatgcagttacttagcaacaagcctcaacatccagctatactgagtggaggcttgttgaaaatgtgaggctgtcattgtccaggcagcatgtgtggggaagaaagctttccctcccacactttgatgctagacctgaattagaatccagaatctctcattgacaggccatgtgacctcaggaaagttactaaatctttctgagctggagctttacgttcctcatctgacagatagggataaaaatactgacttgacgagattgttgtgaaatgcacacaaactcatgagtgtaaagcgtgcaggacagtacctggtgtacagtagacactctaaatggtagctattcttgctgttcagcttctaggagtatatcccttccgttcagcatctgttgagcaccttctacaaagcaagcactgttctaggggttggaagacaccaagtctgttcttaaggtgctctttaagtgggaggggattgagatggagagtgggaagtggtggctggcccagagatgtaggcacaagctaagggctgtcatagaggtatgtacagagggctgggggagctcagaaaaaggcaccaaatggtgccttcacttctcactgtttattacagaactaaatagcattttaagtttgatcctctgactttatgtcaggaccggcaataatgaaaccatatcccagctgttgctgcctcatcagacttttatttcaaaccaaggcatcatcctcactagttttaccttctgtggggtgcttcccctatccccatgccttttgttggttgtgtacacagctggacaaatgatggtcagtacctggcgctggggatgttcaatgggatcatcagcatacggaacaaaaatggcgaggagaaagtaaagatcgagcggccggggggctccctctcgccaatatggtccatctgctggaacccttcaaggtactcttaaagttgtcctccttctagaacaaacaccatcatgaagaagggctttttgtcttcctgaggtctccctacattcaaaggcttctcacctcacttgaatggtctgttttagaacctgtcccatttgtatggattttttttttaatagtcccgctacctgagaatgtatggaatttattaagagcctcctcaaaagttgagtttaggaatgaatcctggacattttagcaaagcagatgagctatttaggacaggccaaagtgtgtgtgtggcgtgtgtgtctgcgcacatgtgcatgcacacatgtgtacgtgtacatgtatatgagtgtgtgtgtgtgtgtgtgtgtgtgtgtgtgtgtgtgtgtgtgtgtggtgtgtgagtgatgcagcaggaccatttccttatgaatcaatagtggagctctttgctgtggctttatttttgcctttccttttttagttcttccctccaagtttgggcagaatatgtgcccacctgttaataaatagctttttcatgagcctttttttgcccttgtcagaaagtcaaaattaagtctacagacgtccctaaagcctagagatacacaaacaattggcacctaccttcttaaattttatacacactttgctttctatgtccatgtgactttgagagtaaactaattatatgctctttttttttttttttttttttttgagatggagtctcgctcggttgcccagcctggagtgcagtggcacaatctcggctcactgcaacctccacctctcgggttcacgcagttctcctgtctcagcctcctgagtagctgggattacaggtgcctgccaccacgcctggctaattttttttttttttttgagacggagtctcgctctgtcgcccaggccggactgcggactgcagtggcgcaatctcggctcactgcaagctccgcttcccgggttcacgccattctcctgcctcagcctcccgagtagctgggactacaggcgcccgccaccgcgcccggctaattttttgtatttttagtagagacggggtttcaccttgttagccaggatggtctcgatctcctgacctcatgatccacccgcctcggcctcccaaagtgctgggattacaggcgtgagccaccgcgcacgcctggctaattttttgttgccaccacacctggctaattttttgtatttttagtagagacagggtttcaccatgttggccaggctggtcttgaacttctgacctcaggttatccacccacctcagcctcccaaagtgctgagattacaggtgtgagccactgtgcctgaccctatatgctctttatatatcctataatattattaaaccatcagtatcctttacagagtcctctgagggtaaacgaaaggtcctacttgtttaccagctcaatgtcattttacagatggttgcctacttgatttagaaggttgtttggaaggttattatgcttcttcctgaataattttttttggcccatgctgtaccatgcatgtctaatgctgtcaaaggccattagcctgccccagagttcctgctgtttgatttgtggctgcagaggacttggtggctctaggctaccatttttaattcatgagaagcaggaggccctgtatacctggtggctgtcctcctccaggtagggttcagaggctccttttattttttatttttattcttttttttttttttttttttttttgagacggggtctcactctgtcacccaggctgcagtgcagtagtgcgatcttggctcactgcaacctccgcctcccaggttcaagcaatcctctcacctcagcctcccaagtagcttggatcacaggcacatgccactacacctgtctaattttttgtatttttggtagagacagggtttcaccatgttggccaggctggtcttgaactcctgatctcgagcgattcacttgcctcggcctcctgaagtgctgggattacaggcgtgagtcactgcacctggcccccaggggctccttgccaggattttaaattatagttttagtgtagttctaggcaatgtaattttgaacaactacttactgtctacagccgatgggagagtttctggatgaacagagagaatgaggatgccgaggatgtcattgtcaacagatatattcaggaaatcccttccactctgaagtcagcagtgtacagtagtcagggtagtgaggcagaggaggaagaaccagaggaagaggacgacagtcccagggacgacaacttgtgagtgtgtcccagtgagtgggaacccttctggtaagggcccaggccccacacagacttgccaggacagatgttaaactctttggccaagggagtgcagggactagggggaactgtgggtgaaagcgccttcaaaaaaaggagacatacccttaaaacttgtgtgtgggtataaagtgatcctgtgagaaactataggaaatactgaaaagactaaaggagaaagttcaacttttctgataaaaccccatcccctgaggaaatcactgttagcaatctagtgtatttctcctcagtcttttcgtgtgttcatataattaactaagtcatattctgctttttttttcacttaacattatagtgtgaaccctttccagtaacattacaaatccttcgaagaacatgatttttaatgtctgaaaagtgtgcccttttgtggatgccccatcactcgacacttcctctattactggacacgtttcttagcctgttcccacactatcccttaccttaccttgcattttctaggatgtatatcagagaggaagcccttaccttagccacagtcttcactcccaaatcctggctgtctagtcattcttctcttcagttgagattgcctgtagggaaaacatgggcaggccagagtggggaaagctggggtagccaggatatctcagtttggcagtagagatctagcttgagactttccaaactgttttacatagtacctgagtttccttggaagaatcccaccctgaggtcatgggggctgggaagtggggaccagtaaaggaggaaggtatggctttgggtccccatctcagtgcctttgattgtttcaacatgagtttttgtttcataaagaatcctactgccccaggaggtaaaagggggttgaaaatcactgatccatctcacagggactgagcccagcccagagccatatgtggcctccccaagagggctcactggtgggctgggctcctggattgtgtttggactttggacatcagtgccagtcacacaaaggtcatctgcaggctccctcattaacatccctctcggtctttgtctcttttcccttagttttgggttagtgcctatgacatttgccactcttggctgggttttacaaacaaggctttaccttgcctgcctacatatccagtggtgctaccaggttaccacaagacactgggatcagaaaagctggaattaataaacaaagaggcaacattaggtggattaagacccagcctcaagggctaggaatgcttttcttttttttttttgtgacagagtctggctctgtcacctgggctggagtgcagtggcacgatctcggctcactgcaacttccgcctcccgggttctaagcgattcttgtgcctcagcctctggaatagctgggattacagacacgcgacaccacgccgaactaattttgcattttcagtaaagatagggtttccccatgttggccaggctggtctagaactcctgacctcaggtgatccacctgcctcaacctcccaaagtgctggaattacaagcgtgagccatcacgggctgccgcttttctcttgaactagattcccaggtagcttgctctccagcctcaggcaagggagtttctcctgtgtgctggtcctacagtcccagccccacagcactgatccccataggttctcagtttcaaagacagttgtttgttttcagagcccattgctcttttttgaaaattagattcagtcagaaaccatttcacctgtgcaaggacccccgcctgcaggagaacctatttttaggtgttaattttctttcttcaggaagagcaagcaagtttcccttctattaaaaaatgtctttgtgctgcaagagatgtttctctgccatctccccacattttctagtatgtaagagaaaagcagtctcaatattgcagccttgcctatcttagtgttgctccccagtaagctctgaaatgagaggtttatcttcttcagctgcagcagtgtccccagcaccataaggtcatagcaggggactcagtgaaacagcagatcccaggaaggctgaacctcaactctgcttcatcccgtaagactgattgatgggttgggccaaattataacttttggcttcagtaaagctgtacaacatttggcaacctgaggccaggacttccttgttcctgttgtttaagcccttagagctatactcatcagcaggctgtggcccttcataacctcttttatcttctgttgattagagaggaacgtaatgacatcctggctgtggctgactggggacagaaagtttccttctaccagctgagtggaaaacaggtatgtagccctgtacaaatccaattgcagtcatgcctgttatattttcattttctgagattctgttactattaattatacattatcattgttagttcctgcttattgagcatttgctgtggtaccagatactgtgctcactgctttgcatactttatcctattttattcttataaaacccaatgaagtgggtactactttccttatcaactttttagaaatgagtaaaccagaactcagagcagtgaaattatatgcccaagatctcacacagctagtaaatggtggagcctaggagttaaacccaggttggtttgactttaaaatctagctcttaattttgaccttactttcctctattcgctttctttcattcaaccagtatttatgagtacccactcaggaaagccctttcataaaggagctgctgacatagagctgggaaagtgatagcctctacctgcaagagctcacaggctggcggagacacacttgatagcaaagagcccctgtgtggtgtggtatgtgacacaatagaaagctgtacagatagacagctttttgggacacaaaagagggtaacatcactacttggtagagatgggaggtcttgttagaggttatctttgagcaggccatctttgagttaggctaaggacattgggaatggtgtttcaggcagaaaaaaaaatagcatgtatcaaggcaggaaggaatgaaaatatatgacagttcagagaatggtgagttgtacagggtgactgcatctcagagtttgtgacctgaaaacagagctgaagaggaacatgggggtatgattttttatttatttatttatttatttatttatttttaatttttttcgagatggagtctcactctgtggcccaggctggagtgcagtggctcagtcttggctcactgcaagctccgcctcctgggttcacgccattctcctacctcagcctcctgagtagctgggactacaggcgcccaccaccacgcctggctaatattttttgtatttttagtagagacggggtttcactgtgttagccaggatggtctcaatctcctgacctcgtgatccgcccgcctcagcctcccaaagtgctgggattacaggcatgagccaccacgcccggcctatgattttttgtttgtttgttttgagacagagtctcactctgtcgcctaggctggagtgtaatggctcaatctcggttcactgcgacctctgcctcacgggttcaagagattctcctgcctcagcctcctgggtagctgggattacaggcatgtgccaccatgtccggctaattttgtatttttagtagagacggggtttctccatgttggtcaggctggtctcaagctcctgacctcaggtgatccacctgcctcagtctcccaaagtgctgggattacaggcatgagctgccaccacgcctggctggagatgtgattataaaggacctgagtagtgtgaataagaagtttgaacatcatatactgtaagtattcaggagccataggtggcaggaagtggcatcacagattcttgcttcagaagaataacttgtttccatggagggtggattaaaatatagagagcatggtagtaggatgacttattagtaggcaggaaatgccaaggattagagtaaaggtgctgggtacagatttcacaccacagccaagcaagtgagaaatgcaacctgtgcagtgaagcctttaattgcgtagcatccttattcctcaaaacatgtcatgtaagagggaagagttttagatgtgtgtagcccagcttttgggccatttcttctacccctgccttaccattggtcatttcttttgtattcgagtaaagaaaagataaagggagcagataatgaagtattttctcagtttcccatggctgatttcctaaaactctcattttaattaactatcatctagtttccctggccctctctattcatctgcttaatgtgtgtacatcatcattcaacagatacttattggcacacctactgtgtacgaggcactggatgtgggtactgaagactcttgggaacaaataaccacactgcagtgggagggaatggggtcttgttgctatggccacagaagaaaagagctcaacatggccgagggccacaggaaatatcttgcatgtatgcagccccagagctcatgttgtggcccaaagtttctgcacgatgagcaaccttaacctgctgagatggtaaccccaacttgtttgggacagtaaaattgttttcttgctgggtgtcttcccttcccaatctaggaagatttagaattcaatataggatgatgaagtaaatcaaacccatacttttgtgttagtctgaggtataatttgtgtatttttgtcatttgaagtgttagtaatacttaaggggatctggcttaataataataatagctaacatttattgaattccaggcattatataaactctttacaaggattaactcttttaatccttataacaaccctatgaggtaaatactgttatcatcaccattttacatgtacgaaaattgaagcacagagaggctcaataatttgcccaaaggcacacatttagtctgtggtccaccctgctgaaacccaggcatactggtgccagaatccatattagaatgtctatcagattagtcttgcaatgaccattcaaaagttgtattgagtaatttcatatgtctgattttatttactttttgagaaaaggcctcaccctgttacccaggctggagtgcagtggtatgatcatggttcactgcagccttgatccccctgggctcaaggaatcttcccactttggccttccaagtagctgggactacaggcacatgccaccacatcctgctaattaaaaaaaaaaattttttttttttggtagagatagggtctcctatgttgtccaggctggtctcaaactcctgggctcaaatgattcttctgccttggcttcccaaactgctgggaatacaggtgtgagccaccatatctggcctacttctgattttaagtggaaagataagaattatatttaaagtgtatattatttaaggttcctaagcaatattggaatgcttaagcaatttgttacatttttcttcttggtgttcactgagctttttgaatctacacattgatatcgttctgtctttcaccaaatgtgaaaacattttggccatgatttcttgaaatatttcttcttctccattctttcctttcctctggaactctaattacacttacattagaccttttgttactgttctccaagtcatcgaggccctgttattatttttttaaatcccttcttttccctctgatcttcagattagaggatttctgttgttcagtattaaatttcattgactcttctgcaacttccaatatttttcttaagctcattcagtgtgtatttgtttcagttattattgcatttttccttttctagaatttccatttggttcttttttcctttttattcattacaagcgtatttttctttatagccttaatcatagttataataactgttttaaaattctcatctgcagctgggcatggtggctcatgcctgtaatcttagtacttctggaggccaaggagggacgattgcttgaggccaggagttcaagactagcctgggctacatagagagactccatccctaaaaacgaacaaacaaattggccagggaggtggcaggcacccattgtcctaacaactctgtaggctgaggtgggagtattctcaagctgaggagttcaaggctgcagtgaactcttaccactgcactccagtgtgggtgacagagcaagacctgtgcccaaaaagcaaacaaaaattcttatctgctatttctaacatttgggtcgtcatggttcagtctccattgatttttttcccttgaatatggttcacattttcctgctttggggaattttgaattgtactcaatattgtgagtaatatgtcataaagactcatatccatcatgttcctctgaagattattgtgtatgtttgtgtgtatatatgtttaagcaggcagtttactttgctgggctcaaaatcaaaactccatgttttcagtggtgtcagcagctgacatctctgtgcagttctttagctgtagctaggctgcttggcatcttgtcacagtttatagttcaagggtttccagatattcagtggagtttatgtgcagaatttaagctcttactttgcttctcttttctgggatttcccacttcactttccgggtgctgtggtcctcccaaattctatactcacccagcatgatggtgaagagggctgccctcaggcaaaaacccttaaaaaaatgagaagttcacctagtgtttgttcccttcttctaaatgtgcatgtgtcttcagtttctgcctgcttttggtcgccctgaaatggttgttgtttatagttggtccagagtttattgttgttactttgtgggaagattggtccgatgggaactagtgagccatttccagaagctgctagccttccatgtcgtgattcataagaatttttagttttcttgttaggttttctagcatcagataagtgctagggaaagttttcgttgctaggcatttgaaattcctatacaggaaaggaaatttgaatgtattaaacttataattgcagtttaaattggtgtaagggaattaatttaactaagttttaaatgggactggatatttaagggattttataatctgttcaaaattggatgccttaaacagtcaaagtcaattggctgttcactttaactagatttataaataggaaaatatttgtaaattgaacttaagaacttaaggagaaaccagttccctaaagttatttcttttataaattgaatattagtttaataatgttaatcacaaatcgtctttttattcacaaaagacacccttggggcagcaaaaaactccagtggtaataaggaacttgggctttagtggggcagacctgattaaccctgtgtctacagacaacgagagaagtgcaatgggataggcgagcacaagtgctgtgggaggatgaggggatggggattggagatgttcctggaggagatgacacctggcagacaaagtgagggaaagagcattcctggctgggtctaggaatggtgtggagtgtagcacctgtgaggatgtggaggcctgaaaaagcattgcccgcttaggaaacttacaagttcattttggctgagagaatgaccttgggggctgagctcgggagtttgacctgcatcctagaagctgaggaagcaccatcaagaaagagaaaagacaacccacagaatgagagaagttttacaactcatatatctgataaaggacttgtatctggaatatataaagagctataaagacagggctgggcatggtggttcacacgtgtaatcccagtgctttgggaggcagagacagggagatcacttgagaacaggagttcaggaccaacctgggtaacagtgggaccccacctctaaaaaaatatatttttaattagctgagtgtggtggtatatgcctctagtcccagctactgggggtggtgaggggctgaggcagaggaattgagcccagaagttcaaggttgcattgagttatgatcatacgactgcattccagcctaagccacagagtgtgacatttctctgtggccaataagcacatgaaatgatgctccatatcattagccatcaggaaaatgcaaattgaaaccacaatgagataattcgcactcactaaaatggagaaattggaatcctcatacactgctaatgcaaatataaagtggtgcattcacttgaaaagtgtagcagttcctaaaaaaggttcaacgtagagtttaaaaataaaaaaatataggccaggagctatgactcactcctgtaatcccagcactttgggaggccaaggtgggtggatcatctgagctcaggagtttgagactagccgggacaacaaggagaaacaccgtctctgcaaaaaatacaaaaattagccaggcgtgttctcacacatctgtagtcccagctacttgggaggctgaggtaggaggatcacgtgaagctgggaagtggaggttgcagtaagccaagatggcgccactgcactccagcctgggcaacagagtcagaccctttttcaaaaaaaaaattttttgccaggcatggtggcactcacctatggtcccagctacttaggaggctgaggcaggaagatcgcttgagtccaggagttgaaggctgcagtgagccgtaattgcaccactgcactccagcctgggtgacagagtgagaccccatcttgaaataaacaagaattaaaaaatgaagagaagtagtatgggtgtagttgcagaataaaggacagtctttaaactgaataaactcagctttataaaatacttttttaaaaaggcggagaaaagaagctgagggaacccattgaactataggaagaactatatttgcagagggaggggggcctttgggaacaaaaccacccacagtctccatcttggcggaggagccctgacacactcctgcactcctggagcacttgggtgggactaggggaggtgccactgactccaggagctgaggtttgggctgtgtagaggatgagtagggagatgcagaggcagagaggcctgtgttcaccatgggatgacacaggagaaaaggctggccagctctccctgtcttcccaactccctctaaagttggcgagaaaaagcccttaattgtattgcaatggttatggattcggaaatggtttttcccttgctgtgtgttctttttcctcagattggaaaggatcgggcactgaactttgacccctgctgcatcagctactttactaaaggcgagtacattttgctggggggttcagacaagcaagtatctcttttcaccaaggatggagtgcggcttgggactgttggggagcagaactcctgggtgtggacgtgtcaagcgaaaccggattccaactatgtggtaagaagagaaagtttgttctgtggggccatggcttgaagaggcactgagcagccgccgtgtctcgagtcacatcactggggtttgtgtctgacaaatgggggaatgcagactttctccagagagctgggaattgacagttctctcaccccgcaggtggtcggctgccaggacggcaccatttccttctaccagcttattttcagcacagtccatgggctttacaaggaccgctatgcctacagggatagcatgactgacgtcattgtgcagcacctgatcactgagcagaaaggtaagaggcaggtccagaccttgggaagagggacaggtggaagcaggtggaaagggctggtgacagggcacttgaaatgacaggaaaaggtttctctttggcgttttgcaaacctgttagccactgggtctgtgtcttgttttcttttttttttttttttggtgggggaagtagggatgccagtctccttgaggatctcatgaaagcaataaatcctctctgaaaaatgtaccaactcagaattttgcacataatttcaaggagtacatgaatttccttagtgagggaggatgatttatgacaggttggagccaggtggttgacctgcatgggtcttcgtggacctttatcctttctggtcagagtcactctggggtgcttctccctcagccctgtctccacttgcctcctggtgggtccttctgccagagatgagcagtggaattggattggcacaggctaggtcagaagatcagagttcccggcctcgcatagtcattctaagccctaagactgcagtctctccctctgtccacttaagttgctgtgctggttaaatagactcaatccacttacttcaggtgtattcatatctggatgtgctggccttagtgcactgctaggtgcctttgcaagggatccaggttgggggttgtcttgtagattcagatgagtgtcctttggtccccctgggggaccctatctttttgaagattctggctgtggtggttggggcaaagccccttgggcagcttcacagtgtcccccttagggacattttctccacctggtctgtagtgggagtgtagagcctggtgtgtaccagaaattacatgtcttccccgtttgtcaaggaggtgggcagggagcggccagaggtgaggtcagttacttaggcaggcttctgatcaccgggggccactagtgctgtgcagaggagtttatatttgtatccagcaagtgatggtaacagtgagtagtttatttccatactcagttgtcagccttggaccatgaagattgtgtcctataggactttggatcccagggttcagcagagttgattgtatgtattagatactctaaagatttttcaatgagagtatctcactttaattgccagtagcgctaagtaaatgatggcttttaatttctctgccttgcaccttacataacaacctcttgctagaactagatatttttttctttgacagttcggattaaatgcaaagagcttgtcaagaagattgccatctacagaaatcgattggctatccaactgccagagaaaatcctcatctatgagttgtattcagaggacttatcagacatgcattaccgggtaaaggagaagattatcaagaagtttgagtgcaacctcctggtggtgtgtgccaatcacatcatcctgtgccaggtgggcagcagcatgttgaaggagttgggctgaattccatttgtgctccccccccagtgatagggtgcccacctcatggttttaaaactggtcactagaaaacaagtctgttccatcaaactaagtggtgcttattggctttcattttcctggcatctggatgaaccagactctatcagcaagtcatgagccataaactggagaatgtttttttgttttattttattattttttaaaaaatatttttcttgagacagacagggtcttgctctgttgcccaggctggaatgcagtggcacaattatggctcactgcagctttgacctcccaagctcaagcggtcttcctcctgagtagctggcaccacaggcacatgccaccacacccaactaattttttatttttagtagagacgcgaggctgtactttgggaggctaaggcgggaggaatgcttgaacccaggagtttgagacctgtccagcttcctaaagtactgggattataggtgtgagccactgtgtctagccaagaataccttgttctattgcagaacatcttgtcatactgggattagatatactttaatgacttaaaacataaattggtgtacagaatgaagatagtttttattgataagcatatacacataaaatttgtatcaactcagtaattgtcaaggaagttttaattcctgaaagattttttttcatagaaaaatatttctcaagattcttagagagtgtctaagtcaatgccaagagaagtttggaaagactttgagagaaggctagcccagcatcttggaagtagaggtggatttagttttacatagttctgttggaggtgataaaagagaagaattccttaggaatcactgtagtgtaaaatactattaaaatctctcaaaagcctagaactgggctgggtgcagtggctcatgcctgtaaatcccagcactttgggaggccaaggcaggatgattgcttgaggctagtagttcgaaagcagtctagaaaacagagaccccatctccaccaaaaaaaaaaaaaaaaaaaaaaaattatttaattagctgggtgtggtggcgcttgcctgtagtcccagctacttgggaggctgaggcaggagaattgctttagccagaaattggaggcagcagtgagctatgatagcgccactacactccagcctgggtgacagagtgagactctgtctcaaaaacaaataataaataaataatcaaagttagaactccaagcggtttagggttgctacaaattacaggatagatgtggcaagtatgtgtacttttgagtgctgcctctggcctaggctgcctgggtgggggtttgcattgaagatctgaggctgaattgggctccgtggggaagccttgcatggagtcttggattaacgatgccaatcgtggggtctacattgggttagatagatggatactgaatgtgtaggtattttctccccttagggacagaaagatctccttggggaggtctgggggcacttattctgttgaatttccatgcagagctgggtttgcttcctaggagaaacggctgcagtgcctgtccttcagcggagtgaaggagcgggagtggcagatggagtctctcattcgttacatcaaggtgatcggtggccctcctggaagagaaggcctcttagtggggctgaagaatggacaggtgagtgctccctcacgtctcctgtcaggctgataatctgcatgcacacgtgggtgacccgtctagcaatgactctgagctgggttctcagggcaggaaaagggcttctctcctccatgggtgaattgtggggcagcctgagttcagttttttgaggacagcctcaggccaaaggtgctgtggccctcacactcctagcaggcccacgttttggcagagttgagctataacctttggctacatgtagagtgtattagtggcttaaggtctccagaaggtgggagatttgttagagatgttgcttctgtggatttctagagggaggcagagatcgttacctaggtcagctcctgattagggcagcgagtggattaaggcagtgcgttccagcatgtgtcctaaagaatgctgggtcctcaagatactgatagatgtcataagcaaaatgggccctttggccagttagatgtgggatatccaggttacacaaaattctgtgtgtgtgtatacatgtgtacacgtgtgttctttgctcagcataagaaaagttctaagtaggctgctacatggaactttgaaagtgacaatgtagctgcattagcctgacagccaagctgtgcagcagatggcttatggctgaggcttgtcaggtctttgctggggatggaagtcacagggcatgagagcagtgggtgaagtcaagcagcaatgccaaggggaggaagggccgcttatttctcaggcagctctcacttccaatgggagcatggactatggggtcaggtgggccggaggtcgtgttcttacttagctactcactggctttgtcatcctgggcaggtcactttacctctgtgaggctggttttacatgaggataataccacatatttcatagggctgtcaaaaacagatatcatcagggttgggagttaaagccaatgttaaaaacaaaacaaaacaaaaaaaacaccaggggtattaaaacaggcatggtggagggtacctgttttcccagctactcaggaggctgagataggaggatcactttgagcccaggagtttgaggctgcagtgtgatatgattatacctgtgaatagccactgcgatcagcctgggcaacatagcaagaccttatctctaaaaaaaattttttttaaaccagggatatcagtaaatgatagctatcatgatcactatcatcattattataattttctaccacatgtcttgtcagtgttcatagtagctttttcctgtgttagttcgtgactcagatctctgctaggtggcatctcctaaagctgcagtttgggtaatgtcatcaacaaatccccagtccgaacagacactgaagtgagctcggcctgtctcagggctgtcattacttctgcagcctctgatgaacctcgcttctggcctcctaaggataagccattgccccccacccccctctttcttttgatgagtccttttccctgcacagagcttctggtgaaggtggtgggagttgttcttgcagagcacatgggattccaacggcctggcagtgggccaggatcttgttgccatggtgactgacactgttttcgctgaaattttgccagatcctgaagatcttcgtggacaatctctttgctatcgtcctgctgaagcaggccacagctgtgcgctgcttggacatgagtgcctcccgtaagaagctggccgtggtagatgaaaatgacacttgcctggtgtatgacatcgacaccaaggagctgctttttcaggtgaagtccctgagggggcccagggacatcatcctttgattagagactctcctctagcttcccagtccctgcaggaggctctcctgctctggcccaggcaggtctctgggaggggcaggggccaagcacatgcacagagtcccagaggccctgggccacaacctgctcctcccacacaggcacaagccgcagggcctggaccggcctctttaactttggtttccttgccaatggaaaccgaaggctctgagccagcagagcctttcttaagcgtttaccatgaacaagaaatggggcaatgactctgagaggggtgtgacgttggcactcagtgaatggggcgatggatgcacttcctttgcagaagtctgtgtctcacctgctgcaggcctgcctgtgtctatgcgcacctacagcgtgggaaggaaacaggatgttttgtcatctgaaagggggaaggggatgggcaagcctggccttctacttaattcacaagaatgctagaagagccagcagaatgcgaagtgcttggatctttggggttgtaggcgttgttcagtggagtcatccagccctgtggcctgaggaagtgtgtcaccagagaagacagcccggcagctctgtgccccgggcctggttggctttctgctgggctcgcgccattctttctctctttaggtctttgtaggtggtcaggactggttttccagagtgaagttccccccaaagctggagcccctcctgactggtttcctcggccactgcagggtttcctgatgttatgggcagattcagtccccttaccaggctcctccttgttctcagcagcagaatcgatgggggaggggtctggagtggggagcagcctcagtcaattagaaggagttacctggccacctctagcccagaggtaactccatgtcagtctcaactcactcatgtccttgagagagtagaatggtttcggggaaagagagggcatagccttcaagctgacctgggcttgggtcctgcctgcatcccttactgtgtgatcttaagttagtgagcctctctgagccttaattacttttctctaaaatgaaattagtaattgccccttacagaattgctacaggaatacactagatactacagtgcctagctcagtgttgagcacaaaatggggcctgaaatgttacttcccttctccccagcctcacctcccacctatagggggcatagctggccccaaatgtgaatcttgtgtctgagcctagaatcatacaagtgtggaagggcgtctgtgctgccccatccccactgctggctctatggcaggctaggggaggtgattctcagccctgccaggagacatcagcattcccagctgtaacattgcctgctggcttttcctcttctccactgcccctccctctacacataaaacagctatattgattttttctcattataaaaaacaatccatgctgattataaaagatttagtcattataaaagatcctaggcagaaaggtatgagcatatttcaggagaataattttttttcaaaagtaatacttgcttactcaaaaattccaacaacacgcaggtgcatggaggggcttgcctctgttcatttctcttgcctctgttcatttctttgtggtcccctttcatccttttccctccatcccactgtaagcaatttagtgggattcagtctttaagagggtattgggctgaaatgtgtgagcgctgaccaagcccagggtggttctcacaggatccccactgtccctgttccccaggaaccaaacgccaacagtgtagcttggaacacccagtgtgaggacatgctctgcttctcgggaggaggctacctcaacatcaaagccagcaccttccctgtgcaccggcagaagctgcagggctttgtggtcggctacaatggctccaagatcttctgcctccatgtcttctccatttctgccgtggaggtgccgcaggtaactgggggtgcctgtccactcttagcactggcaaggctgacaagaccagggaagctgggccctttgctggtgctttggggagagagtagcaaggagagaagaatggcagctgtgaggtcgtgggaggcagtctgggcctggaacctgccgccctgtctccactccttgcaacctgtgtgactgggggcaaacagctcaacctccctgagtatcagtttcttccttgtcccctttctgtagggatgggaggggtatgcagtgttgtcagcagcgtgtgttttgcagagagcccagcgtggggccgaatggagtgagcagcaaagccgggagtccggcagggtgtgtgtgtgagtacgtgtgtgatggtggtgatgtgtgtgtgagagagaggggagagagagaatgagtgggtggggggtgtgggctgaggtctgtgagccaataagggagcatgggactctgcacaagctctctgaaccaggaggtggccagaacagaaatggggcactgaagggtggagccacagaatgggggagggcagaaccacagacaggcgcctgagattgacctcccgaatgcaggatggtctcccctccaccttctgcaccccaggcagatggtgctcactgtagaattgccataaaacagagacgtgcatagcgagaaactgtagccttcagcatcccatcctcaggacagaatcactcttaaacatgttgaaatacatctgcttagcgcttttctacgtgtatatataatatatgcataatatacaattaggagcatgtggttttataagaacatttttaaacaaaagtggaatcacactgcaaatacttttcatgacttttatgtgtatacgtattgctacctatagatggaacctcagatttactgtattccctgagcctggcctgtaaacaagacttctcatcccttcctttatggctatcttctcatttcacctcacattcggttatggcagccccatcactgtctatgaagtgctggctgtacactagtcatctggccttttcactcaacaatctcctaaagcatcgttctgtgtcagtaaatggtaaatgttcttattctgcatggcaaaatttagggtaattgtagactcacataaattgtaggaaataatacagagatcccttaaaccctttgcctagtttcccccaacggtaacagtgtgcatagctctagagtgatcttcccacccatgttggcatgtgtaatctcccaccacagtcatggcactgaacactgccaccaccacaaggtccctggtgttgtgctttttacagccagcacccctccctcctgcctggtccccacctgccttgtatttacagctgcattttattgtgtcttgtggatgttccacagctttctttaccagtcctactggacatgtttgctgcttatagcttttttgtattattgtaaatagcaggcatctttctagctaggtccttgcacctgtcccaacttggcgccttggcataaattcctagaaatgaaattgctgggtcaaagcacgtgtacctttgaaagacttttagggaaatttccaggtttcccttccgctaggctctgtcagtctgttttccccatacaactcagcttcaggctagagcccacttcttctaagttgatgataccctcgaaactcatgactgcaagacttactggggaaatgcccatcatccatgcctgacacagatcagctattcaagaaatgttagtggaattcagatctgaggaaaaagaccagaaagcaagaggaagaagggaatgaggtgggtggaagtggcagcaggacgaggggcacgaacagcttctcctggactgtgtcctcgtcatccttgtctgccccattacaaacccacgcaccacatccaccaggaactcatctccctcaattgccccaaactagctctgcttattttattaaaaggttttctcccaagattgccatcctgacctcaaaaataaatgcagtttgctgctctctgactgtggccggccaagaggagccagaggggcagcctggggcttcctctgccaggactttaagattcagcagcaaagtcttgctgactgcaccaaggccatcctgctgacgcagcgggtcaggactgccaagggttaggaaacacattctcaagacaaaggctgttcatctgtcgcctctgcctccggccatcctgtggttttggcccagagaggagggagaaagcatcagacccagtcttggaatttttggttgcctttcgaaatttacattgtcttgtgcaagaactggtttgtcagggctgccaagtaggacaacgagccctaggagggcttctcaaggcggtggtgacttcatgtttgaaatccaacagcaagataaagtatagctcagagagtatttgttcagtggggtctatttttaaaactccactcaaattgtgcctcccaagtaagtccaagtgttagccatccatcatatgctcagctgtgatatgcctgcctgagtgcctgtcccactcacggggcagtcagcatggcaagcagttggtgtggttcggggaaggagcaccagctttcagtcctgactctgccatctcaagcagctgtaactagagcaactcatttcactctttggggcctcatttcttttctgtgaaatggggttaattatacccatctttcaggtttcgtcaagccaaatttctattattatttctccttattactgactcataaaatagcaaaaaccacaaaacacaactaaattgcaacaggctgtacttactgacggactttagaaaggaaagctcattgtgtgctttaagaaaagctttcaggagtttgagaaagcttccaggagatggtgaaacttgatctgagccctgagaggtctggaaaggaagagtggagcagggaagcttttcaaacaaagggaaaggtgggggtaggaacaagactggagagcctgggagatggtgaggagctggtgctgagaaaatacagtgaaggtaatgatcatgcctgcattttgcccagtgcttcattatttttggagcacatctctcctttgcccatggtagcctgagctgggcaggacatctaaacagaagttaatggatttacccaaaaagtcaccagcctaggatgtggctgagcctggcctgggttctaggtcacctgctccgtagcctatgcctgctgccccgctaaagggagcatttaatgtgccaatgaggagagatggcatggtggaaaagataagcacttggaagcagccatgttttgctctgagagtagacagactcaaaataaaaaaaattccttcaattctaaagctaaaaaatgggactggaaatttcaaagacagacaaaagccccaaatggagaaaacaatacttcaagctccacatttgggaaccattagcacagaggtcctggctgatttctcttccctgcccaggaagccaggagagatgcaggccactgaagcacactggctggcctaaaacaagggcaaggcctttccttgttaaagatgtcatggcccaactcaagactcattctcaggcctgcacgcacatatgcacatatacacgcgtgcatacatgtggcaggaaggggcacagaacctggagtccagtcacctctggctattgccagctatttgctgggacaggtcatttgtcctctctgagtctcggtctcctgggctgtagccagggagaaataatacctactgcacaggactgtggggacagccaaaagccttttataaacctaagaaagagaagtcgttaggaactattcatgggcactcacagcaaggcaaccccatcttgtaggagggcatctgtccccagggcagggatcaggagagctgtttccagaggcttccagggtaacttggagcaaatcacttacctttcttggactcagtccctggaagaagaggccattccagaccgcttcctcccacgaactcattcattgtgtcagcaaacgtagactggggttctgctgagggaggccgatacaacccaccactgcccacggctgtgcacggctttgctgtgggaacaggcctgtaactgcggcacaacctgcgatctggacaaagggcagaggaagctgagactctttcccctggggtgggggcttgaggggcttgggaggactctgcagaagaggtgacatttcaacagggccttgaaagccaaataggtattttccagaggcagagtggggaggggcaaaggcattccaggtgagggtgacatcctatggcgaggcaggcctgtaggtgggaaggaggggaggatgggcagagagtttgtgctgtggagcacagtagcccagtcatgagagaggtgcaggatggagcacacagggtgggctgggcaggctgggcagggtgctgattggcggctgcagggctgctccccaggcatgggtaatcatcccacgcatctggaggcaggctctgtatgcatctggttctttccatggctctgaaaacagtcttctttttttcccttgatgaaatcctgcagtccgctcccatgtaccagtacctggataggaaactgttcaaggaagcctaccagattgcttgcttgggtgtcacagacactgattggcgtgaactggccatggaagcgctagaaggtttagattttgaaacagcaaagaaggtaagcatctagccagcaggagctggagtttggtccttgtggggtcccttaagaaggcagatggggacccaggtggcacggagaggccatagactgcagcagtctctggagttaggctgacctgggcttgtatcttagccacttcctcactgtgggcctgggtaggtgacaccctttctaagattgcttctctatagacgtaggatgatgacaggccccatcctcacaaagctgtgaggatcaaatgggaggatgcctgtaaagcctgacccaggagcagcatgtcagattctggctgtcactcttattagctgttctctgtgggaagcacctgactagtagcctggcacatcacaggcactccgtaaatggcggcttttattatcggtgtagtcactggccatgatgctgcacacaatgctgcttttcttagcatctgccaactaaggtgggagagatggtcaaggtctctgattctgacagcaatgtgggcacttcccacgtaccttcatggcgggattcatggacttgattcgttgtgtcctttcctggcctagtctatgaaagctagagagatggctgaaaacatctgacccctctctgcacataaggaaaagcccaggtatgttcctgagctgtgtttccatctagaacctcagatggaggaaggaatggcttccaacctccactcccctaccccttccctctttatctccccacagtcaattaatgagctgctcattttgtccatattcccgggctgacattgaaggagtggcaaagagggacgtgatgcccgccttgggttagatcaagacttgtaggcatgaagagaggagactggaccagaccaggactaagaagcctggctgagaacgagctgtgtcacataaggggctctgggacctcaggccagccactttccttggagccccagtcctcccagttctgaaatgggggtggtgagaatgcccgctgcagtcatgaggcttaactgagatgttgtaaaggggaatttaaatcagggatggttgtgcagatgctagccattactaaacaagggaagtgatcgttgtgtaacaatgatctagattatatttttagatgtcctcagtgtaggaaagtggagatggaggaggctgtaagaattcagaggaggggccaggcgcggtggctcacgcctgtaaatcctagcactttgggaggccgaggtgtgcggatcacaaggtcaggagatcgagaccatcctggctaacacggtgaaaccccgtctctactaaaaatacaaaaaattagccgggcatggtggcaggcgcctgtagtcccagctactccggaggctgaggcaggagaatggcgtgaacctgggaggcggagcgtgcagtgagccgagatggtgccactgcactccagcctgggccatagagcaagactctgacttaaaaaaaaaaaaaaaaaagaattcagaggagggaggaggcatctctatggagggagcttccctctcctgccccacccagaaatgccagcagggagggagacgacaaatccctagaatagaaaggattgtaaaaagccacaaggtttaatatgagtgtttactgatatttttataaatatatatatttttatatatttgtttaaatattgagacggggactcactgtgttgcccaggcaggtcttgaactcctgggctcaagcagtcttcttgcctcagcctcccaaagtgctgggattacaggtataaaccaccacacccagccagatttactatagttgaaaagtaagtgtatgtggtatatatctattgtgtacaacatgctgttttgaaaaagccacatgatattgaagataggctggatgttactatttcatctaaatcccgagtaccccacctctttactctgtgccaggcactcaggctcaccagcttggatatagtggttcctagagatggacagccatccccactagatggcagagaagagctgctgagctcccgccagaccctgagcagagctgcaggttcctccctattcccaggcttccctctgctgagctcattcaggggccttgtgactctgaccaggcaccctgacgctgcaaaatgtgtcaggttgaaggaactcggaaacagatttattaatgggcaaatcctagacactagcacagctgagctacagctagaaagacccttgagagggtgtcagtagcaggcccctttccacaaagaagatggttggagcccagaagcagagaagtaggctcagagcgaggactcagacctcgaatgctcctttccctcttggccactgtgctgggctttgcagggttgccctctcaaggcgctttaaggaaacccagatctagagggtgatgtgtaagacctacagcttgggacacaggtagtcttagccctgtgttccttggcccatgtgatgcccgcattgcccttttctacgaattcctcttcacaaacacttgtttgccaggttctgactctgatgcctcccttaacgctgcctcccacccctgctcatgctcagaccattcatccgtgttctccaggcatgtggttcgtagttggagagctcttagctctgggaggtgtcatgatctgtttaattgaccagctttccctgttagaatgtggacctctgaattgtggagggggacaggggccgagacatgtttctccctgggtcctcagtctcttgacaggaagcctggtcctgtgggatgaaaagataaagttgcattgtggtcacctgcaaggcaggccggggacttgctcatctcccgaggtcttttcaggagggaggatgccatgctgctgagcagaggctgcaagtggtcaggattgctctgcgtgttcagttcaaagggctctggagctgctgcctcctctaggcacaggtcagcccattttgaatggggcaataaatggtgacagcaaagccacctgaaagcagcctgacctggtggcttgtgctcctccaaaccctgggcagaatctgaaagcagcaaaactagcttagctaacaccagtctgcttgttcctcagaaacttctagaggtccatgagttaaagtctctggctttactgtgagttcaaggcaagggctgcaattttagggtttacataaagagtttgccttccacagacttggtgggattcattccctacccctccaccttcttccagaatctgtctttataccctctcagctttcccctcctctgctccctctgtggtaccaggggctctgggtcccctgtgtctgtggcaccactgggtaggcatagctgtcccctgcattctacccatgttgccaagatgtataggcagtctctcatcagtccatgcatctcatcctctcctgctgtgatgctgcgtgaccccccagagggtcagaccggcttgttcttctttgggtctagagtctcccaaggaggcaccgccacagactgtggcatcacggttttgttttacctgatctcaaaatgactgatgcaactgggatgtctttgctgttctttacatggtccaatcccatggataaagccatgcctcgctgggtggtataacctcctgcacgcacgatgattaatctgtgcttgctcccttcctctcctctgtggctcactgtctagatagagcttgacttcccacccctagccaatcacccacttttgaagccaagaagacagcttattttattctttatttcttcgccacaggccttcatcagagtacaagacctccgatatttagagctcatcagcagcattgaggtaaaagatgaagcatttttccttctcaagaaggcatacttggggttcctgttttaggggcagcccttctaacaggcaagagccttgaggacatgggaacagagctcactggcgtctgggcatctgggccacagccttgctccgggggcagagtggccacactgggggagacaacagcaggtagtgtgagctgttgtgtgatagctgggtgaggcacatgggttccggatctctccagggttgggtttctagtctgtgaaaagggattggacctacctcacaggctgctgtgaggattcagtaggttctcaggaactggtttgcatcctcctggtggcggatagctggtcaccatcctctcagactccagtaatctgatagtgttggaggagtttcccaaatgcacatgagctgagctccattccccagaaatggacctggggagcaaggcccacagtctgaactgagcgccccagagttctggagcaacccctagccctactgtttctggctgagaatattgaccttgtcatccaaacccaataggcctgcagtgtgctaaggaagctggttgtaggtatgccatttgctgggtggtggtcaacactatgctttttttttcttttttttttttttttttctgaaacaaggtctcactctgttccccaggctcaagcgcagtggcacgatcacagcttactgcagcatagacctcccaggctcaaatgatcctcccacctagcctcccaagtagctgggaccacatgcatgtgccaccccgcctgattaattttttgtatattttttagagcagggttttcccatgttgcccaggctggtttcaaattcgtgggctcaagctattagcccaccttagcctcccaaagtgctagcattatagacttgagctaccatgcccggcccttagacactattcttaatttctgtgtatctcagtgctgtctggctgtctgttaaaaggcatatacattttttctcctgaacatatttattgtgaaggtatgggaatgtgagatacatttgaattcccagttggaaacagtgaggaaatagcaaatgtcttgtccctctcattcatttccccataataaacacctgtcatgggccagcccttgtgccgagctcagtgggcacagagctgaggaggagagaggctgacaggagctcacagcctgctaagcctcataacgtaatctgctctgtgccacatgcgtgatttatgtgaatgctgttctagatcctcacattaactgaatgaggcaggtactgttgctctccctattccatgcaggaggaaattaaggctcagcaagacgatgccacatccccatgggtccatagccaaaaacttggtggaattcaagcccagtctatttcctaagctcatgctctctcggccacataccctccctacccgcgtgttgtaaggggcatctgtatattctggggtttacctacccgcgtggtaaagggcttgttcggagctattgctcaaaatgcccagtgctgctgactttcacttgtaaatccactggcctggatctgggggtcttcacctgaagccaaggagcataattttcctctctacaaaagtaactgctgtggggtccaactattacttgtcacatcttactggggtcaaaatgtagtcctctcctcgtatgctatgagctgggaagtgcgttaaagtaaactcctaagattgtctcttgaaaaaaagtaaagtgcctttgagtgtgctctatatcgactgcctgcagacttatttgcacacatctgggtgctcagcataattccagagaactgcagatccttagtgggtgccttttggataggggagatgttcttgtcctgctgacggggggaaagaacctgcccatgttgacatgcacctgctgagtgccatagatcgtttttattggtcatggtgatatcctggggcctagaatggatatggcctgaatttcatgtctagtaaaaccttttttgtttgtttgtttgttttttttttgcagagatagagtctggctatattgaccaggctggcctacaactcctgggctcaagtgatcctcctcttttgacctcccaaagtgtagggatcacaggtgtaagccaccatgtccagccaaaatcaatcttttatctcacggcaagatttcaattcatttccaactattaggagttagtttgtttgatgagcctgagctgtgtgcaggtttttagaatgataatttctgtcagtatggaagcatgttgcctccagctgttaaaactttcaccagcttgtctaagagtttgattcaatgtcttatcgtcctccaatatgctgctctttctagaaaacaagcaaaaggaaactgctagggctcagggtttgggtgctactgagtgtttacaaatactcgagctgtagacaagcgaatgttccctgacacagaaggaagaagctttatcctagctgtgctaagtgtgtgtgtgtgtgtgtgtgtgttgttggggacatcacttgcttcaaaagactacattgtgtgatacaaggaatatctggagtcagacagaactgcgtccaaattccagctctgtctgaccctgacctgttcctcttcttgagtctcagcgtccttcactctaacacttgggtagtgagacctaccctgagggtcactgagaggaataaaggggccatgtgtgtataaagtatatacccagaacctagtggatgttcagcatgcgggatttcttaccttctctttagaagtagggatatcgtaagacttgtcatcctattttattggtctccctcttgggcagaaaccctaaacattctcctgctctgtcatccccatgagccacaactctgccaaacggggcctgcggatttgggagatcttgggagcttaggggtcatggatgagtcagagcacacactattcaaactattccgtcatagccttggaatacacaggaaagcaaccctgaggaatttccattaaacaaacaaaggtttgcatctttttttgatctttgcttgtctggtaaaagcctgcttttgttgtcaagccttcccagcgggaacctaggggagagagacaacagccaggagccaagcccaggttccagtaggaaggcccaggggcctcacttgaaatagccacatctaacctttgtaaaggctgcttcctgcccatggctgcagaggccatttcctttgcttctaatttttccaggagaggaagaagcggggagagaccaacaatgacctgtttctggcagatgtgttttcctaccaggggaagttccatgaggccgccaaactgtacaagaggagtgggcacgagaacctcgcgcttgaaatgtacaccgacctctgcatgtttgagtatgccaaggtaacctaccctgtcccaggcccaagctccagcttggagcccactggtattctcacgtgcggtgtccaagttattttccccaagagtgctgcggacaaaaactagcaatggtctcagaaaggatgtggggaaactggtaaacaaaggacccatctacagccactggttgaaactcacctaaaactgacctttaaggctgacaccaagggggcagactatggcagttcagaccttcatcagtgacagggctggatggctgtgggtctacaccagcacaatcccttcattgagttgagggctcagggcttcagggctgtcccccacaaatcctctcaatccttgtcaggagccgccaagaatcggtgtcttcaggcaggagccggtcctgccgatcatgcaggacgacatggtgcctgccagccaagtttcccatagcacctgctgattgtcctggacttctcactgggcttctgggaagtcaggcagagcctccgccctcccatgttagcgcagcatgcctcacgcctgccggctgcagagtggctaccatgtggttgcagtgggtgatggcagagattcccttttgcattgggacggcccccatgaaccttactccccagcagagctgggccttttaaggcaggtgtaggagaggagcttcctggaccaggctcctgatggcttctgtgggaaggagttgcactaaggagcccagagcagtcaagacatttgcagttcagtctaagcaaggttcaaagaggcttcggtacactgggcaatgagggtcttccttccatcaaggggctttgttaacctgccttttctggaagtgtcaaaagtggctctcagtatgttatgaagtgactcatcagccataacctattggtgggctactaatggtagttctccagctcacaagttcaagatggaaaatcttccccacttttttctgcttttctattcctgaagatggctgtgctcttccaccacctgttcgaccctggggctgaaggtgtgtttggtggcctgtgatgttgcccaggacctattgttcatcaggacttggacgagctcctgggccccagcctgtcttttcaccttagtgatttcttcactccgtacctgagacccagggtgttcaggctccctctactttttcctcgtcacctttcctaccctccctcaggccccaccaaagacacctagaagatttcataacacattcatactgagatcaccagagtcagtgcatctctgcttccggggataacaaaattttaactcaggatgaacccttaagggatcaagaccctagaggtagaatttagggttgggaacccctgaggcctcctcaaggaggcagctgtgctgcagtagaaaatgcctgaccaggctgggcatggtggctcaaacctgtaatactagcactttgggaggctgaagtgggtggattgcttgagctcaggaggtcgagaccagcctgggcaatatggtgaaaccctctctctaccaaaaatgcaaaaaattagctggtgcctgtagtcccagctactgggaggctaaggtggaaagattgcttgagccccagaggtggaagttgcagtgagccaagatcacgccactgcattccagcctgggtgacagagcaagacccatgtcaaaaaaaaataataaaatgcctggccttggtgccccagagctggtgtgagtgcagtttctttctgtgggatgacctggggaaaggctcttcggtttgccaaacctcccttcccttctcagatggtaatagcgacagctcagtttagtcatgagatttgcacagaataatgtataggaaagcgcattagaaatgccaacctgtagaaagattaggaagatgagaggggccacacgtgaccacagagtggattttcatacctctctccctggctggccccactcctgcccctgctctgaggcccctccttacactgtggtggacttcgtgtgcccacagcctcccaccagaactgcagcccatttacacactccatttgctccgtctctctatgaaggtaaatactctgggacttgtttttggttttagtttttgatcactattccaaggaggttggttccttttcaatcccccctgcccccacctggtagtctgaatttgagaaatatgtacctacacattatgtggggggtgggggagatctagtcctgattaacgtggcatatttttgtttacttgaaaattgcttcccaagattcaatctggttttcagaaaattttaaaattacattcccacgtacaaataaattgtatgctttctggataagtgacatgtttatatggtgataaagggaattataatgctcttaactcttatgtagtatgttcttatcaaaatcaccaagcatgagaacactgtttagtctcattcatcactcagcacagcctctttctgtccacttcagggccaagtctttgccatggccccagataatgtgtaacttagcttcaggaaagcaaaaagcctttgaatttccagtttgctgagccttgaaggaagcttttagacccagcttcaatgaagtcacagctccctgagtgaccagctggcctaggcttatggctccctctcagcctctcacccttgccgtggtcacccctggtcccctgagcactcactgaagtccctttgaaggacatttctagtctcctaagatgcctgttttcctccagctgccaccctcatttcaccagccaggtaggcagggtttccagcttcgtgctggcatagagaatccgcgccatagcagctgccagaaggaaaggtgtgtctgtaaaggcccaaactaggcggggacagcggctgctttccaagccccttccctttgtcagctccagggagaaccaaaggccagccagggggcctgtcttctattgggtcccagcatcagggtatacaatgcgctttcctccccttcttaaaatgtatcatatattaggccgacctaatactctgaaagcacatttaccctgaaagcaaatgagggaaaaaagcgagctaattgttcaagtggatttttagcatacattgactgtacttttctgacacatgagtgttaatcatggggaaaggagtgctttttttgttctcagtgaggctgacacaaagtactctccacagggtacattattcctgagacaaaccacttcttaccagtaacatagacctgggctgtaagtgctcccagtttccctttttgaaaagctccacctttaaaagctgcctcaattctggcaaactcccacgtgtgtattttgggtaactactctgaaaagaggtggtgttctgaggctgtttctcacacattgtagggccagcccagagaagctgggcataccacttcagaggtatgctgaggccgaaggaacacaggccctaggcctgatctctgagcctccaggaccacagccatctcttccttctcaggtcctctcctgagcaccttccctgcctcagattcccccatggcctcctgctgtcccactgtcggatcaggttctcacccctgcagacctgacctcagcacaggatccctaaccattcagctgagaagcaactaaccagagagatgtttgcttgttatctgttccaggaaagtaactggggcaaagacaatgtgatgattctctagttcagggcacagaatgtttgctggtgactcagagagggcatggagggcacggagggccggcaaacactgtaagtcattttgtttgtgtaagtttaggggaacccatgctcagcctcactctgaagcatgtggtatcacccatatgatctgaataagatgacaggtctcgatatgtggaattgtgcaccaggttgtctcattgctgtttaggaacagtcctgtattgaccaaactatgtgagagagagacagcctgatcatgaacccccgaccctgcagacttcatgtgcagtgccccaaatagtctagaaagtgttgtttagccgatgaacaaatgcccatttgtgagacgggaaggaagcactgggggccagcgtccctgatgctgtcccaggatcccccaggaacacctgcagggcagcctgagatcactcttcccgagacctgggactcccccaactcagcccctcagggccgggccctgcctacctcctggttgcctgcttcagccatgtggagcccgcccttgctgctagaaaagcctgatgtaacgctggcacaggaagttctgatccagagtgtttttgtttgttgtgcttcctcaggatttccttggatctggagaccccaaagaaacaaagatgctaatcaccaaacaggctgactgggccagaaatatcaaggagcccaaagccgccgtggagatgtacatctcagcaggagagcacgtcaaggccatcgagatctgtggtgaccatggctgggttgacatgtaggttttggtccctgccccgagaagcatttggcagcatgtcatcacatgtcacctcttgactgacaagggaaccaatagtgcttttctaattatctaaagctaatgtgatagtggctaggttcttcaggagacacagagattgcacaaggcagtggctgccttccaggagcttgtggagtcactaggggaagggatggtggggaccagggaagaggagacaccgggacatcacagctgccatttgctgagcgctcactacaacccagacgctgtgataaccttccaggcattaggttttccacctatgccatcagggctggtgtctcctcgcccaccttgcagatgatgaaacagaagctaaagggacaagttattcccaaagtccagatagctggaaagttgtagagctgagctttagcctctgatctgctggatgtcgatgccaactacgcgtgtaatggtaggaacaaaaacaaaacaagttccaaatccatcagggaagaattcttatgggaggaaccatggatatcttctcttaggagacactctttccatgaagggaccttaaagaattccaagaggtaaatagagatggcgggaaaggatatgcaggcaggaagtacagcagaaacacagcgagttggctctggttggaataaaagacgtgtgggaatgggagggtgaaggacatgggctgtgggttgggggaagtgggctggccacactggaagggcctccgatgccaaacggaggtgcttagatttgccaatagtgagtgaccacctacagtcagacaccccctcaggcaggcaggtagaatggagaccagataactggctagtgcagtagagcaggagggaacttggtagctgagggcatgagagagaagtagcagtgttagaaccaagtggcccatcccagggtgttggggcagtggtgagtgtcaggctggctttgctctgtggctgctggtgggttacaccattcgtcaaggtggacaacagggagaggagggggttggggtggggcagcactgagacaggatggattcagccttgggactcagcacaccggaccttgagggggaaggctttgtcctcccagtcagtgagcttcaggctcaagcatgtgcacacacacgtgcacatgctgctgcggtaggcaaaggacacgatgggacaagctcctgagggtggctcaggctgggtcctaaaggctgttgattcttctggaaacaacgttgtggtctacaggtagcagtggcccagccaggatttggggatatggaagaggctggttaatgattaaattgtttccttgggtgctgccatatattaataattggtgtgtgggcccctcacaaagggaccttgatggatgtcctaccaccccatctttttcttgtccgatagtaatttttttaaagacagaggcacagattttgttccccacattattctttaaatgaaggggttcatatagaagagagccaggcagatttagggtgctctgttctctcttctggtttttcttgtcactttcatttgtaagtgctatagtatcaggttaccctgagggtacttgagtaattcaagaaacacattaagcatgttctgcttgctttccagatgtggctataaaaggtgtctttcctccagggacgttgggtgtgatgggtgggaaggtttctaaggctgtaagggctgtctatgccacctttccctaaaaacgtgtcctttttctgctgagcagtgttatttttagatgccattattattctaagtgtagactgacaggcctccgtgccttgcctgtctccagacagggattcgttacagctgcttctccttcctttctcaccaagactagcctgggtagaaccctttctcctgggagagttagtttgactccaaattccagcctgaccagagagaacaagcgcattctatccaggcctcatgtccccatgagtgatgggagggctgctcaccatggggaagcagtggtgagccagtgggtccctgcagctcctccctctttggtcagcacgttggccaggaggacagggaagacttcctgcaggcctttgtccagagctcagagcaggccccacactcacctcttcctttagagggcagtcattgaggtattcttatgccttggcatccacttttccgtgagaattcctgcacccgtggtggaaagagtgctgggcccagtcttgggctgggtgcttcaccttccccacagactttattcttctcatctgagagatggaaataatcatgcccacctcttagggtggtgaagattctgatttcacgcatgggaaagctcatggcgtcatctgggtacctggtaggggattaggagataattgtttctataccctgctggatagctcagtgacttccgagaaagacacacaaggtggctgacaggatcctgtaaaggccacctctcccagatcctggtgatgtttctggagtgtgtattcatgcatttaataactacccactgagcaactcccatgggccatggcatagtatcaacactggggaccacagaatgaatggacatacggcttgccgttgacaagacccagagcccaccctcctacctgccccttccctctccaggttgatcgacatcgcccgcaaactggacaaggctgagcgcgagcccctgctgctgtgcgctacctacctcaagaagctggacagccctggctatgctgctgagacctacctgaagatgggtgacctcaagtccctggtgcagctgcacgtggagacccagcgctgggatgaggtgaggggaaagcaggcctcatgggctggggccccacctgagccctgggacacaggcgggtgggtacaggggccctttggggttcagatggagagaagctgccctcgtgatggaaggaacattgggctggcagtcaggtaacttaacctcgaattctctgagccacagaatcgtggagggcctttccacttgtcccttcattcagtcattgagaaaatcgttactgacagccagctctgccagggtggtgacaggcaccggggatgttagtgtgaacacgacagctccagtgcctgctgttgggctgagctgcctctgaccagcaccacaggctcagacacatggctgatgtggagatgcacctgcgtgacatttaaaacctgctgggtagcattttggcagaaagcaccatctgtgctttccagatccagactgtgagagccatttcaggggccagttttttccctcccttctctgcccccaccccacaaccactacttctctctggtgtcaggggctgtaaagaattagccaggtcagcgagaaaggtggccagcctcaggctggcagaagcagctgatgctgccccttctatggctcaacccccaccctccagctcactggctccctgttccctgcagagaaatccatccccgagaggattaggagctgtgccaagatcctcccccgactcacccacccacccatcatggtccattttagagtgaaagcaaagccttcactgagaggagccgtctgactgttgtctgctctctgaacagctccattggtgaggtgatgaggtcagtcatgagaaaaggtggggctagggacagaggcaatggtggcttctcaagagaaatttattagatttcccaagcagcatagattagagcatcttagaatgactcagacctcgctgtgcatcaggcagactttctcaccatggctcatgtccggttctcctggcctgacaggtggttctggggcttaggtgagaagcagtcagtgggtccatacagcacgaagcccacagtcatctttgacaactgataagaagtggtgatgatgataatgtcaattctgtttccttaggtgtcgcccgcaattaaaagaaatctgtttgcagcactacaggagcccacgcaaaccctcaaaataaaatgtttccgattctgtgccgcttctgtggtccagaaacagactgtgttgttactgaatccagtcgcttgcatattgctgttaattgccttttgttttcgaagagctgatttgtttttgcatttctgtgggtagttttttgggggaggcactctccccctctgagttgtcaggctggcaaaatatgatgtccctaatggattcagccaagtacagtgttttcatgggggctgcaggggcagctttattaagacttcatttgctccttcccccaggcctttgctttgggtgagaagcatcctgagtttaaggatgacatctacatgccgtatgctcagtggctagcagagaacgatcgctttgaggaagcccagaaaggtaggcaacacagactgtcaccttctagaaggagcaggagaagttactgccaagacatacatttcaggaaggctaccaagcccttcccatctgtagatcccaagatagatgacttcatcctggggatgtgattgtttggtggtgaaagactgtggagcatggaaagaccattggccttggagtcacaccctcctgggccacactcacttgccacaggcccttaagaggtgctgcctcctctccaagcctctgtggttactgagcaaagtgctgtgcactgcagtgtatcttcccgtttaatcctcgcaacagccctatggtatagctaccatcattatgattcccattttgcagatgagaaaactgaagggtaaagaggtgaagaaatttgcctgaagtttcatagctaggaagtggcagggaggtaatgtgagccagggtaccatgaggacaataagggaggattgccacacagtgtgaggcatggtctctactgagaatagaaactcagcttctatttctggctcagataaacgggtgacttctgctcctcaagaattctgttggtaaaatgggctgcacacagcgtacaacagcatctgaaataggagttaaagcaagtatagaactttcgctgatgttattaatcatattttttaaagttgacttccctctctgtgtcaggccctggctgagcacttaacctatgtaaccttgaatcttgccaacagctgtgcaaggacgaagaggctaaatgtgccatgccaagtcacaaatctagtcagcagcagagccagaattggaccagtacctctctgactggggaacctgatttttctgttttgctgcctatttagccttctaatggaagttgggtgtttgatgttccatagcatctgatttacgcttctatatggtaaccgttgccctctctggacacattgcagaacaaatgtctccctgttggagcccctcaaccgaaagccctcattgaaggttagcgcattctctgctgcttcagcatttccagagcacccagttgctgaagtatctgcatgtttgggcaaaacacatcaacctatccatctgtctgtgtctgcccttccaagaatccatcaccatagtaacttggtactcagacaagaggttgtagatgagaacggaacaaaggccagaccttctccttctctgaaggcggaggattaggatcatttgagtgctctcatatggcaagtgtcatggctacaagtgcttcactggcagccaccaacatctcaaggggctggccacgtagtaggtactcagaaaatatctgttaaacagtataggaacgattgagagtttttttgcttgttttcacaaatggttgtgataactgaggcagatccttcaaagtggtcattgaaaagcagtcatttgaagacaaactgaggacttgagttgggcttggttctgggaccttgggtgtgacactttacctccattttgcaaagcccatttcattgctcataaaaagggggataattttccttcttcataagtctgtggtgaggatccagtgaggtgattagcaacaaaagcattttacctccaagtgcagtaaagtggcaggtcctgtttctatcaccttaggagtcacaaaactttgccctggaatgagcagggggcagaacctcactgaagatgagcaagtttcactcttagactttgccctggaatttggcccctccagtttttcctttctgcatgcttttcaaagtcagtcgccttttcccagccaaaaaggaatttatctcactgtactttttccaggatgtagccttggttatttagagaagcgccatcccagcaacgaagcactgcagatgctccaatgagtgtcctacttccaaagcagccctgtgcaagccccacagagctccatcctgcctcctgtgtgacttcctaaatagcatgtgcttttttcctccctccaccactcctacagcgttccacaaggctgggcgacagagagaagcggtccaggtgctggagcagctcacaaacaatgccgtggcggagagcaggtttaatgatgctgcctattattactggatgctgtccatgcagtgcctcgatatagctcaaggtgtgtaaacatcagccagaccactgttttcccaagccccactctgacaccaagataaacatcagaagagctgggacattttaattaaagccctgggcttgtttattgggtgtattgtccataagcctgccttgcagtggcgtaatctggtgtatcatctttttccagtttgcccatcagaatggtatgaggaccgtcctggggttatggttggcaggtccagccctgcattgctaattcagagcatatctctcccctgctacctgggagcccatagctggacctgggtgagcactgggttttaaatttttttaattaaatgagaagatgaacgagagatggctttacagtaacacactccagattcttactcatcccagccaggaaaacagtttcaatattgctttctttcacaagacttcccatgatgtactgaaggagtagtggaagtggaagagacaaggagatgttcttctccactggacaaggccacatgcaggggtgggaaaaacactggcatggaagctgcaggtgacttgtagcaagtcacaatccttcctgagctctgcatgcccatctgtcctgtgggagtcccttgtcctggtccctttggttgctgggagcctcacagagtcatgcttacagtttgaaaattgtcaagcctaggtgtaaggtcgcatttttctgtttgggccagtgccttatgcttctgataggagcagcagagggaagaggcataagatgagcatgaatacagttggtgtctgcctgcctttgtcccagcaggctcttccgacacatcttgggtcttgctgcagctgtcgctcccccaggggaataatctgggagggtgcagtgagagatctggaaaaaatatcctcaaactccctggccttatgccctgtccacctaagaattcaccatcctggagtggccctactcctaagcagagtggctttcccctcactacactttgtccctcaccctggcacagacactgtgtggtgggagaactgatgctgggaaaagtactgttgcctggcccctcctcctggggccagttggcagccacagacactgtttgacacgtttcccctcccacccgctgcacacagcagatcctgcccagaaggacacaatgcttggcaagttctaccacttccagcgtttggcagagctgtaccatggttaccatgccatccatcgccacacggtaaggtggctgggtcaccagcacctgagggtaccatctcctgagctaggggtcccgggcatatctaaagagcagcagactggatggaatgtaacccactggtcacagtgaactgctgaggaatcttggtctcctctgggaagaaaaagtttgagtttctttgattgactgtttgtctgccatgcatcaagcagtgggctcctgaattgtgatccagagctggaatgggccttgctagttcctcagtgcaggctttgatgactcagggaaactctgcattaaccagcaagaggggtgggagttccatgaggccctctccttcagtagggcgaaggcccagattaaccaaaggctcgagatccctccctggccctgtcagtgatttgtgtgttcttcagcaattcactttccctctctgtccctcagtttccttctctgtgaaactagagtgttggcttggtctccagaaacccaagtagttctttttagtcactccctgattcctttgagaaagccattttaaatctctctggtggcaatggggaacaggtgatgggttgtcaacagcctcttcatccactgtatctcctcaatcacccaacagatgttgagcacttagtacctagtaggcaatgtactgagggcttcattgtatcaagtcatttcctcctttcaaccacactttgagggaaggactgtcacccccatgttacagatgagaatgaagccctagacagagaggtctcagaggttattaggttggtgcaaaagtaattgcggtttcagactgaattttaaatcattataactaggctcaaacacatctttattaattaaaataggaaccattatgatcaacacatttttgccaatgagaaataagtctgtttatttctgtagcataaaaatccatactttgggatttgacgaactcttggaaagcattttctgcatcctgctggttgtggaagcattttccctgcaaaaagttgttgagatggttgaagaagtggtagttggttagcaagaggtcaggtgaatattgcgatgaggcaaaattttgaagtattggttgtgtgatgtgcagtcaggtgggtggagaagaattgggccctttctgtgaaccagtgccagctgcaggtgttgcagttttcggtgcatctcctcgatttgctgagcatacttctcaaatgtaatcatttcaccaggatcagacaactgtagtggatcagaccagcagcagaccaccaaacagtgatcatgacctttttttggtgcaagtttggctttgggaactgctttggagctttttctcagtccagccgtggagctggtcatcacggttgtcatgtaaagtccactttttgtcacacctcacatctgattgagaaatgttttgttgttgttgcatagaataagaaaagacaacacttcaaaacgactatattttcattttctatcagctcatgaggcacccacttatcaagctttttcaccttcccaatttgcttcaaatgccaaacaaccgtagaatggttgacattgagttcttcggcaacttctcctgtagttgtgagaggatcagcttcgatgattgctctcggttgttgtcaacttccagtggccggccactatgctcctcatcttcaagcctctcatctcctttgcaaaacttcttgaaccaccactgcactgtatgtttgttagcagttcctgggccaaatgcgttgtcgatgttacgagttgtctctgttgctttatgacccattttgaactcaaataagaaaactgcttgaatttgttttttgtctaacatcatttgcatagtctaaaataaacagtaagtaataactcattagcaaaaaaacataaagcgagaaatgcccgttgaaatgatgtataacataaccacatttaagaatgtattctactatcaaacagcaaattccagagccaatatgtgagtctcagtagtctggcactggagcctgtgttcctagcctttccctccctgtctccttttagagaaagcaggctagtatgttggtttagtgggtaaactcgagagtcctcacacacaaatgacactgtgttacttatcttctctggccttcagcttctttctctataaaatagggataacagcactatgtacttgatgggattgttttgaggattagacgagttaatattggaagagtacctagcacagagtgaccctaggtggcagctatccttactgctgctccaggcaaggcttcacgccagctttccctgacctgctccctccagctgggcatctagcatttctcttttttcagagatgaggtctctgtcgcccaaggtggagtgcagtgtcatgatcatagctcatggcagcctcaaactgctggactcaagtgatcctcctgcctgagcctcccagagcactgggattacaggcatgagccaccacgcccagccttcccgccgttctttgacctctcaaatgccctgccttccaccttgggcatttctttccctctaatctgtgctgacttctcagcacattttttgcctcttgggaaagtctggcaagaaggactcctgacaggctctgtgcatgccgtcagtctagtgttacatctcttcccacagcagggtcagtggtctcaagggacctcatcttcccttacagtctttggctttcctgaaacgagaccccctcagggtccctcatctttatcaggtgctcacctggagagaaaccaccacaaaaggagcccagactcaacttaggctggaagtcagggcccagctcagcctcactttgcccaagccactccagagcctggctctcagctccttccctcagacttttctctcgctgctccctgtcctcttcctcacctggggcatggggctgagggctcctgtctctaacagctgagctctgctccaggacctacatgggactaggagctaaggggcctcagaccagctggggccctggctcttatcccagctgaatcttattaattgggccattccttcattcaataaatgcctactacgtgacagaccctgtgatgagacctggtgacacggtggtgaacaaaacgttgtccctgcagtcagtcccagtctagcaaacaggacaatccctcaggggaaacgtttagaggcctgtgaagagacttcctggaggaggtgtcctctcagccagaaggagggagagaataaaaatggggcaagtgaagtggaggaggattaggaagggtgtttgtggcaaaggtcacagcctgtgcaaaggcctggaggtgagtggtagtttgtggttcagcatccagggcccagcagagcagcactgattcagggcaagactggaaagggaagttcaggtccttcctggatacatggcatctttcccagaggaaaggactcccctgctacctattctctctgggacgttacttagcttccctacctagtgcagtagaaccacaggcagagttcatcttgttcttaccctggaaaggatgtggtctcaggttttcttgggttcttggagctaacaaaaggtatagaaatttacgtgtgaactaaatagaaaatgctaagctctgaactgaagaagtgtagagcaaagtgagtcctcaggagttcagaccaattaggggttaagctttggtggctcagtgatgagtagggcctcacaagacccttcttaagtgctcacaagaaagaggagttactggcctgctgtaatcctcaccatctaaagctttattagaaatgggcaatctcagtttatatacagtgtgccagatgccttcaaaataaggtattcttaaccttttgtagaccctcacacagaaaattccttatttgtctgctgagcttctggcagcctctaggtacgaagaccaatcactaatctgtgctaactgcctcctgttagtgcctatgccaggagccagggaaatgggtcagcagttgaggaactccgcatgtgtgctcgtttggtggcacatcagtcaagctgctgttggaaagcacagaagaggcatgtgggttcatgctggagagggctaaatgcctctgttgaaagacaggcttatatgaatcagtggttatgtcctaagctgcatagaaggtcttctcttttagagctaattggagacaacttgagtagttcagagaaatggaataattaccaactccagaggcagtacagcttggaagaaagacattcttgggctttggaatcagacctgggtttgaacagcagctcagctctgttctagttggtgacttgggcaaatcatctatctaggtgtcggtttcctcatcagtactgtgaggataaaaatgcataccacaaggttattatgttaaagaccagatgagacagtggctatatggcgctcagcacacagtaggagtaggtgctcaataatcagagccgctcttgttgatgtcactcagaattattggtgtctgccttttggcctggcccagcagcagctcttgaagaactcaatccctgtttgcttttctctcactgcaggaagatccgttcagtgtccatcgtcctgaaactcttttcaacatctccaggttcctgctgcacagcctgcccaaggacaccccctcgggcatctctaaagtgtatcctttctcttatccctcctccgtcccaccaccgttcttgtctaatggccccaagaaattccttccagagcactttcctggcagaaccttcctctctcagcaaccctcagggaagacagagaactcaccctcccgctgctgtttggctatagaggctcagcagggaggcccaggggcccaggccaagagaagatgagttttcagggctctctgagctgaacccagcagtgggtctctggccaacacactgtcccaatccctcctagaacccacagatgagggtgtgactgaaatggaagaagcaccaggccttcaggcttggaaccttgggcacttctccagactggggaggagggagtgtttgttcagcccaggtatacatagcaccttctgtgccccaagccctgggccaggcaccaggtggcaaagctgccatcaaagagggaggtcacaagttagggtctggtttggtggatgtgtgctgtgtctgagggtggaatgaagctgaggtcagggccatggtcagggaagtttacctggaggaggagatgtccatcatgcaagctgaggcagccagggaagatggccaagtggatgttccaggggaggacccagcatatggagaggcaagcaaggcatgtgggagagggtgaggggaccctgggtgggaggggccggagaggcagcaggacccaaggcctgagagcctacctttgggttttcctctcttctgtagccatcgagggccacagtggtaccataagcagagcaggtgcctgaagggcctgtgcagccagatactggatcattaccaggcaatgatccagatttttaaggtcttggatgtcaggagacataattgtccctgttcttttctaaatctcactgtactctcagctccttcccagccgcagccccaccttccctctgtaaggaaaacccactccactggagaagacccagagctccttgttgtaagaattggcctcgctagaggattccaggcccattatgtacatttcaggggaaataccctcaaatcaaggggtgccttcctggagtcagacctctgctgcatgcgtctccgtctttccccgtaggagcagtcagggctatgcctgtgggggctgagcacctgtactcatcctttccagcaagttctgtttgagtcaacagcttgatagaacctctaccctgagccttaccctgtgccatcccctggggacctggaaatggctcctgacagtccctgactttgaggagtcatgctggagacacagaaggaaactctccacagaactgctgaagtggacggggctgcactgcagacggcgggagcaggaacactgggagagatgcgggaggaagggcaggagggcctgggggcagccaacatcggaggtgacctgagaggagagcacaaaggctcgtcagcctctggctgaggagcttcaagggggccccagagcacaggctgccgctcagaaactgcccaccaggccctcggggaagggtgtgcagacagagtggggtacacccaggggcctcagagcagggttgagggtggctccccagggagtctggaccaggccccacctggcagggtgagagcagagtgccctttgtgccaggcatcctaggagggcctggctggcaggtttggtgaggcaggaagagccattttggcctagtcagggtataagatgagccatcagcaggcccagagatgctaagcaaggttaaagtattaatggaaactacgctgtttttatctttggaaaaattcctgggccttgccatccgagaagtacactcacctctcacaagcgcacagagccttcctcacggtctttcctctgccttcccggcaccagcacaagctgtgttccagcctggggctcactccaaggacaggcagtgccagctcctgggcctggtgttgcccctgctgtccttaaccctgttcacggcaggaaaatactcttcaccttggccaagcagagcaaggccctcggtgcctacaggctggcccggcacgcctatgacaagctgcgtggcctgtacatccctgccagattccaaaagtccattgagctgggtaccctgaccatccgcgccaagcccttccacgacagtgaggtgaggatgcagcacccttgggcaggtggcttctcctctcccttgaggccatctcatgccttcttgcctggcctgggttccgtttgaagagagacagctgcagctccctctaggctctgtgccccctgctcaagcctggccatgccagctcccctgtgcttccctgtccacctcctgttctccccgcagtccacctggcgcccgctcacagcccccggccccggcctcagccctcagcctggcctcccttgctccttgccctcccctaggcaagccccacacctctgtgcccaggtggctctgcctttaccccaggcctggccccagagctgactcttactctagaaacctctgccctttctggaaccaggctgtagttctccagcaaatctaccccacactcccaacccacattccttcaacccagccagcttccttctttcacacatcctccctcaagctcagagcaaggacttggttcagacagacctgggttcacatcccggctccaccctctcctagctctgtctccatctttctgcaccttgggttccccctttcccacaggtagttgtgaggctaaatgagccagtatagtccacgtgctccgcacggtgcccggagcatggtaaatggctggctaatggtggcagcggccactgtcattcctgccaggggaaaagtgccgttgagcgctgcctgtgcaggtgtcttgggcacggggacccaagtgacagggcttgggtatttcggcaggcctttatcctgcttccccatggcatggagctcctgggcccggcgccccttccctgcctgcccacccgggtggcctttcctcttggcagccaggccccaggggcctgaagccagagtccagggggaggaggacacgtgcctgccccggcccctcgggagtccgtggctgttttgtaggagttggtgcccttgtgctaccgctgctccaccaacaacccgctgctcaacaacctgggcaacgtctgcatcaactgccgccagcccttcatcttctccgcctcttcctacggtgagtccctgcatcctgagcatgtgggtgggacagcctgtggacagccaggctcactccactgctctctggcctcaggacgttgggcaagggccaaaggcctctgaatgtccctgtttatgaaatgaggacactctgacgcccacctacctgacacaaggagtcactgtcggtgttcccagagataggacccactgctgcccaaagctgaagcacccactctgggaacctggcgcagggctttacataaccaaatgccccagaaagagagtccgatggctttgcattcagaccaggaggctgagataggttatcaaggcccagctcctttgatgttgacagaggatcagaagccccttcccaggagctgagcagaggccacacacacacacagacacacacgcacacacagactgcccctgcacacacacacatacagaaactgcccctgcacacacacacacagactgtccctgaacacacacacagactgctcctgcacacacacacacagactgcccctgcacacacagagactgcccctgcacacacacacagagaccgcccctgcacacacacacacagaaaccgcccctgcacacacacggagactgcctctgcacacacacacagactgcccctgcgtgcacacacagactgcccctacacacacacagattgctcctgcacacacacacacacacacacagagactgcccctgcacacacacagagactgcccctgcacacacacacagagactgcccctgcacacacacacagagactgctcctgcacacacatacagagactgcccctgcacacacacacagactgcccctgcccacacacacagagaccgcccctgcacacacacatggagactgcccctgcacacacacatggagactgcccctgcgtgcacacacagagactgcccctgcacacacacagattgctcctgcacacacacacacacagagagactgcccctgcacacacacagagactgcccctgcacacacacacacacacggagactgcccctacacacacacacagaaactgcccctgcacacacacagattgctcctgcacacacacacacacacacacacacacacacagagagactgcccctgcacacacacacacagactgcccctgcacacagacacacagagaccgctcctgcacacacacagagactgcccctgcacacacacacagagactgcccctgcacacacacacacacagaggctgcccctgcacacacacagaccgctcctgcacacagacacacagagaccgctcctgcacacacacggagactgcccctgcacacacacagagactgcccctacacacacacacacagactgcccctgcacacacacacacacagaaactgcccctgcacacacacagattgctcctgcacacacacacacacacacacagactgcccctgcacacacacacagagactgcccctgcacacagacacacagagaccgctcctgcacacacacatggagactgcccctgcacacacacggagactgcctctgcacacacacagagactgcccctacacacacacacagactgcccctgcacacacacacacacagaaactgcccctgcacacacacacattgctcctgcacacacacacacacacacacacacacacacacagagactgctcctgcacacacatacagagactgcccctgctgcctcttcttgcttttggtgaagctgccagtgggttgagaagcaactctgtggtcaccccacctgcctggcggcaagtcctttgcaaggcctccagccccctcagccctttctctatgccctccagacgtgctacacctggttgagttctacctggaggaagggatcactgatgaagaagccatctccctcatcgacctggaggtgctgagacccaagcgggatgacagacagctagagattgcaaacaacagtatccatgcccttggccagagcctgtgtgtgcggctgtgtgaggggtctggggacaggcgggaagtaggagggcccagtcccaggggatcgcgggccatgctgagcctggccctgtgttcccagagagattggagaggcccacatgggacagggacagggatcagagatgggcagacagctggccagggcctaaggacccagaagtggcaagtggcaccttggtcttcccgtgtgggtctcccaccctcccctgacccctaaaaggcactggctgtgcctctgtctgtgcatagctcctgcatagccaacatgggacatgatgtcatgatgtcggtgttggcccccagctcttccactcaagtcactttcgcatgcaagtgacagagtccaaaactgacaagctgaacaagcaaagggtgtgcaaggaagccccaagcaggagaggaagcttcctggcccagcgctcagtctggtcggtcacaggctggctctgcctctcttggccgcactgtcctctgggcaacttcattctttggcagccccgtggtgcccccataacacagagatgtcaggagcagtgccagccccacatcccctcagccttatagcccccagaaacagccagctttcctctcagctgtggcagtgaaagccccggggcacagctcagcctgccccttggccaggaggatgcaccagggcagttgtccagggcaggccacacttgcaggctggacatgggaggggcttctggcagggaacagcacacacgtggcctgaggcctcgctcccttgcactgactgagtctgcaggcctgggggctgtaagcctgccttccttgcagctcccaggtgctgccacccccaggggccacactgggaggagggaagctcagagagctgcttgctgaaggaaagacggacccatctctgccacccaggctccctcaggtgccacagatgatatgtgctatggtgctggcaggtgggtgctgtgcccactccaacttggtaccagcagtccccatgtcctgggcctccctgcaggacccctgctggcctctgttaccagccccaccactgtgggagaggggcggtttccagggacctccaggtgagtctgacccgccctggggtcagcagggactctcgcccctgtctgctccatcacaagtgcccgcagacccccagcagccactgaatgtttctccaggatccctgggcccatcccctccgtgcctacccgcagtggctcacagggcccgcatgtgcttcccactggccctgggagctatggtgtgtgtggcctgcgaggggaatgggtgagggcagcagggccagcagagtcccttccttctgattccttggcctgagccccctctgttcctccacctggaaaactcttccactggtctggctgcccttgagtcttctcacaggggtgtagggtggaggctagggtctgtctccatctctgcttctgattccatccttgaccagatccctccaggctcccagattctgcggctagtggagaccaaggactccatcggagatgaggacccgttcacagctaagctgagctttgaggtgagggtgcctctctgggtgacctgcaggagggcagcctccatcccttctcctgtgcacatggggaccctcagctagcgcagtggtggaggaggattggccagaacttccagatgtggtggcacgaaggaggggcaggaccccttcctgtggggtgtgggagccatggctgcccccgagggaccatggccaagggcgcaggtctgtggacagggaggcagcttcagctctggtgggaggagcttgccactgttagggtcacctgggtttaggaagcaggtcctctctcaccactgccaaagattccaggatcataatccacacagatgtctcactgtggctgagtgaggacactgtgcctccttcccgcccaccctgcagcaaggtggctcagagttcgtgccagtggtggtgagccggctggtgctgcgctccatgagccgccgggatgtcctcatcaagcgatggcccccacccctgaggtggcaatacttccgctcactgctgcctgacgcctccattaccatgtgcccctcctgcttccaggtaggtggccaccctggtagctcacatgtgcttctcttggccacttttcccttgcccaaatgtccctctgggaggcgtggcccctgggaggaggggcacatccatggctccaagttgggacagaggcttgtctgtcctctcccctgcttgcattccatgtgcatctaaagtggacttcactggcccctgcgctgtccacatcctccccaaatcctgggggcccagcaagcgtgatgtgcccttgaccttcactcagaaaacaagaaaccccacagccccctcccatctccccttccagccctcaaacaaaggtgctgcaggtctgtgtccagccctgaccactgccaagccccctccccttgagaggcagtgcgtcctggccccaggcgtagggctgatgagcactagggcttcagcctggtcttacagctgtcttcccttagatgttccattctgaggactatgagttgctggtgcttcagcatggctgctgcccctactgccgcaggtgcaaggatgaccctggcccatgaccagcatcctggggacggcctgcaccctctgcccgccttggggtctgctgggctgtgaaggagaataaagagttaaactgtcagaatgtgtttcttgcccagatgaagtttgtgttttgtggggggggccttgtgtaaccacggaattcctatttatggcatttcatgccttgtaaatagcaccaggagatgaggaagagaatgtacatatattttctaaggaaaaaaatctgttactttca

SEQ ID NO: 1202 - DNA, 16557 bp, Homo sapiens
acagccagcagcctgccgggagccaaaacgaaagcactccgtgctggaagtaggaggagagtcaggactcccaggacagagagtgcacaaactacccagcacagccccctccgccccctctggaggctgaagagggattccagcccctgccacccacagacacgggctgactggggtgtctgccccccttgggggggggcagcacagggcctcaggcctgggtgccacctggcacctagaagatgcctgtgccctggttcttgctgtccttggcactgggccgaagcccagtggtcctttctctggagaggcttgtggggcctcaggacgctacccactgctctccggtgagtctggaaccctggggagacgaggaaaggctcagggttcagtttttggctcagcaaagccttagcctggctcctgtcactgctgccactgccagaactgccctgtctggtctgtctggtgctgatggtagaagagaagaacggggaaggggcaagagctgggtctgtctttctctgggagggtctgggaatacggagccccagaaaaaggtaggtggaggtcttaggcagagaacagtgcctagatggtgggggcacaaattctgactctcctttctttccttcccagggcctctcctgccgcctctggggtaagtatccctacttttaaaaagaatttcccaggttggccgaagggagcagagctgtcccaggcccatgccctccatgcccacctcagcctaggacagccaagttctttggctctctgggtatgtcaggtgccaccaaattctgggcttggaacagcttcagctcccacccgctcctccacacacagacagtgacatactctgcctgcctggggacatcgtgcctgctccgggccccgtgctggcgcctacgcacctgcagacagagctggtgctgaggtgccagaaggagaccgactgtgacctctgtctgcgtgtggctgtccacttggccgtgcatggtgagcaagtcatcctgtgacagtgcatgtgtacacgtgagtgtgtctggggtgggcatgagggccaggggatctctcaagcagtgctaggcatcctcagtgttctcctggaggacaccagcagaaggacccccaggccagtgtggtctccccagcccctgcttcccagcactgggctttccagaaggaagccaacgccaaagccagccagcccagagcagggggcctcacccagggccttgctcttgggtccttctagggcactgggaagagcctgaagatgaggaaaagtttggaggagcagctgactcaggggtggaggagcctaggaatggtgaggagaacctggctggcccaactgccccatgccaaggcctggcctgccgctcctgggcctgactgacccctgccctgttgcccacagcctctctccaggcccaagtcgtgctctccttccaggcctaccctactgcccgctgcgtcctgctggaggtgcaagtgcctgctgcccttgtgcagtttggtcagtctgtggtatgcaaaataataataatcaccttctaaacctaaaatctataaaactttttcacatgcattatctctttgaggattacaaaagaattaaatttattgaaacccttcagtaccaggcattacagccagtgttttacaggtatcaacttatttaattctcacaacagccatgtgaggtgggactattcttttgattctgatcagcgctgtgggcaagtcccttcagcctgttatgcctcagcttttatgtctgtaaaatggggatgagaatagttctacttcatatgcttgactgcgagaaatcaccaagcgtttttcagggtgcttctactattttcccctcctaccagcagtgtatgggagtcctagttgcttcccatctttgccaacacttgatggtgtaattttattttatttttaaattaaatatatttgaattttaaatatatgggaccctccatgaatttgcatgtcatcctcaggcacgggccttgctaatcttttctgtattgttccagttgtagtatatgtggtgccaaaacaagcataagtgttgtaattgtcataatttttctgcatatgtagtggtttgccattgtggttttaatttgtatcttccaatgactgatgaagttgagcacttttttcacatgcttattggctatttgtgtaacttccttgtgaaatatctcttaaagtttttttgtttttgtttttgtttttgtttttgccacataaaaaaacaatagttctggccgggcacagtggttcacacctgtaatcccagcactttgggaggctgaggcgggcagatcacgaagtcaggagattgagaccatcctggctaacactgtgaaaccctgcctccactaaaaaaatacaaaaaattagccaggcatggtggtgggcgcctgtagacccagctactcgggaggcagaggcaggagaatggcgtgaacccgggaggtggagcttgcagtgagccgagatcgcgccactgcactccagcctgggcgacagagcgagattccgtctcaaaaaaaaagaatagtcccacctcacatgactgttgtgagaattaaattaagttggtacctgtaaaacactggatgtaatgcctggcactgaataatttcaataaatttaattcttttgtaatcctcaaaactacctgatgaggcattattagtatcctcattttccagatagataaaatgaggcttggagaggggaggtctgtgggctggatgcacttctctgtactcttggaccaaagaaagagtcctaccatacataccatggtatacttaccatggtgtaagtaccatggtgcagggtgttggggcttctccctgccttaggaggccacatgtacctggaaggtctatttccactggggtcaaatcactcaaaccctttgactttccctccaacctccagcccccagccaatatcctatctggagaattgtagactgggagaacatctgcttggtccatgtcacaagcagttgtaaggaacactgaggcactgggttgagtgtgagaaccacttctgtggggaggggtgtgccatattgtgttggggtgtctcatctccttagctttggccaggtgatctagcacagcagggtgggtgcagggatttaaatgtctagggccttttcccgccctggtgacactcttactgaggacatttgctttagaattgaggccccttgaaagaaaggtgaatagtagatttcaggctatacagtataaatacagtcattagttgggggaggagggcagtgagcagagtggtccctgcagatgatcccacagcccttggcctggattctgagccctgcaccgccagccttcctcacccctctcctcacagggctctgtggtatatgactgcttcgaggctgccctagggagtgaggtacgaatctggtcctatactcagcccaggtacgagaaggaactcaaccacacacagcagctgcctggtaagtggacccccaagtcctggccccctagcctctgtcccctctggccattccccctcctgatttcaccctcttctagctccatccactctccggcaggggtctgagctgctatcctccccagagtcagtccctcggaccttctctctctgggtgatatggctttccagcccctggggaaggttctttgagcattggatagatgtgggtggtatgtaggggatggggagccattcctaatgcccccctgggagccaaattgcccccacttctttccttggcccccagccccactggaggctcttctgtgatctctcctcagactgcagggggctcgaagtctggaacagcatcccgagctgctggggtaggggctagggccagtgggccgggggtagggaggggcagggtctggagtataagaaacccttggagtccacttcagatatgggctaccacatctcagaagctcacagaacatattcattcattcattcattcattcatttgttcataacacattaattgcagtatctgtgctaagcactggaaatagaaagatgaatcttgggtcaggctcagtggctcatgcctgtaatcccagaactttgggaggccgaggtagaaggatcacttgagctcaaaagttcaagacgagcctgggcaacatggcaaatccccgtctctaccaaaaatacaaaaattaacaggacatggtggtgtgcatttgtggtcccagctactcaggaggctgaggcaggagaatcacttgagcctgggaggcaggggctacagtaagctgagactgcaccattgcacaccagcctgggtgacagagcaagactccgtctcaaaaaacaaaacaaaacaaaacaaaaacaaaaaacttgaaataaaagctaagaaagtcaagggtctaacttttttcccacgtactatttggattttgttttcgttttgtattttcttttttattgtgtataacatacatacataaaagtatgtaaagggtactgattttcttttttttttttttttttgagacagagtctcgctctgtcgctcaggctggagtgcagtggtgcaatctcggctcactgcaagctccgcctcccaggttcacgccattctcctgcctcagcctcccgagtagctgggactacaggcacccgccaccacgcctggctaatttttttttttttttagtagagacagggtttcaccgtgttagccaggatggtcttgatctcctgaccttgtgatccgcctgcctcagcctcccaaagtgctgggattacaggcgtgagccaccacgcccagccaaagggtactgatttccatgtccagttcttttttttttttttttttttggcggaatcttgctctgtcgcctaggctggactgcagtggtgtgatctcagctcactgcaacctctgccttctgggttcaagcgattctcctgcctcagcctcccaagcagctgggattacagacgtgcaccaccacgcacagctaatttttgtatttttagtagacatggagtttcaccatgctggccaggctggtcttgaactcctgacctcgtgatcctcccacctcggcctcccaaagtgctgggattacaggcatgagccgccacgtccggccaatttgtttttatatatgtatacacttgcataactagcacccagatcaatacataaatactgtgaatacatcacatactgtgatgttttctgaactactaaatgttttcaacttcattttctttttgccttcttaaaattaaagttggcctgcctctttggcaactcattaaagactattcaacaccagagttttgaaaacacagatgtgtatatcatggatttcatttcttccttcattaagtagacattgattcatttattcaacagatatttattaatttctgtgtaccaggcaaatccctggacactggaaatattaataaatcaataaatgaagatgacaaaaaacccgaccccacggagctggtgtcagggtcagggtgggggtgaggaaggacacaacaaacacatggagatgtgaagaatgcagtaagttagacagtgattagcactaaggagaacatttgtggaagggctggggaaggttgggagttgtagaggtcagggatggtctcattctggtgagcagagacctgaaagaggtgagggaggagccatatatttgagggaagagagaatagccagcaaaaagggcctggggtgggagtatgtcaggggtgtttaagaaatagtaaggagggggccgggcgcggtggctcacgcctgtaatcccagcactttgggaggccgaggctggcggatcacgaggtcaggagatcgagaccatcctggctaacacggtgaaaccccatctctacaaaaaatacaaaaaaatcagctgggcatggtggcaggcgcctgtagtcccagctactcgggagcctgaggcaggagaatggcttgaaccccaggaggcagagcttgcagtgagccgagatcacaccactgcactccagcctgggcgacagagccagactccatctcaaaaaaaaaaaaaggaaaaaaaaaagagagagaaacagtaaggaggtccttaataactctgcagcagagttattaaggacacaaatgccataggctgtgcgcgatggctcacgtctgcaatcccagcactttggggaagctgaggcaggaggattgcttgaggttaggagctcaagaccagcctggccaacatgagcgaaatcccatctctactaaaaatacaaaaactagccgggggtggtgacacacgcctgtaatcccagctactcgggtggctgaggcaagagaatcgcttgaacccaggaggtggaggttgcagtgagctatcgtgccaatgcactccagcctgggcaacagagcaagactccctctcaaaaaaaaaaaaggacacaagtatcaagaggtaaggtcagaaaggtcacagttctgaacagaggaaaatgacttgttttaaagaggttacaagatctttctgcagagggagaagcagggagaatagctcttctccgaccacacactagggtctccacgggcttggctttgggcagctgctaggagcaaagtctggtctgaaatgatgacacacgctctgccctccgagagcctcccagtctagggggtttgaaggaaactccaaagggtcagtcggggatgcagaagaggtgaggaagtctaagctgcgctctctttgcctctcccaccagccctgccctggctcaacgtgtcagcagatggtgacaacgtgcatctggttctgaatgtctctgaggagcagcacttcggcctctccctgtactggaatcaggtccagggccccccaaaaccccggtggcacaaaaacctggtgaggcctcccccttcccaagtccattcccactgtaggccgatgcctgtgcaaaggacgcagtgccatatcagagaggatccttgaagaggactcaccccaagcaagggaaaattggtgggggaacttctgccttcctggtttccttgactttggcctcctcctcttcctccttatcttctccaacctccttcctttatttgttccacagactggaccgcagatcattaccttgaaccacacagacctggttccctgcctctgtattcaggtaggagcagagtctagctgggtgccagaagaggagtgggaagatgatgatgggggtgatccctgccttcctggtctcaccattcttcaaacccttcattgaggtggagactgtggctccctggggtggctggccctcccttgacccttgctgtcctatgccttctgtctattacattccctgaatgctctccctgatcctccacagaactcctgcttattcttcatggccccattcaaatgtcaccttctccttgaaacctttccctactcctccagttctgtctttgtgttcccctggcgggcagagcatgtgctacgaacttggactggtttgaatcttggctcttgccatttgctagctgtgtaaccttgggcaagtcacttcacctctgtgagcctgtttctcatctgtaaaatgggaataataatagtaacagcctcatggggctgttataagaatgtgtgccacacccaggcttaaatatgctggctctttcctcttcctctgtacatttatttatttttttagacaaggtctcactctgttgcccaggctggagtgcagtggcacaatcatggcacactgcagcctcagccccatgggctcaagtgatcctcctgtctcagcctcccaagtagctggaactactggtgagcactaccatactcagctagtttttttttgttttgtgtagagacggggtcttgctatgttacccaggctgttctgaattcctgggcttatgctatcctcccacctcagcctcccaccaagtgctgggattataagcatgagccactgtggcttgccctgattgcactttttttttttttttttttaagacagagtctttctctgtcgcccaggctggagcaccgtggcgtgatctcggctcactgcaagctgcttctcctgggttcacgccattctcctgcctcagcctcgctgagtagctgggactacaggtgcctgcaaccacgcccagctaattttttgtattttcagtaaagacagggtttcaccgtgttagccaggatggtctcgatctcctgaccttatgatccacaagcctcgtcctcccaaagtgctgggattacaggcatgacccactgtgcccagccgctgattgcacatttaattggtcatcaggtctcatccatcttacctctgacattaatgtctctcattttctttccccctcctctccatctcagtccagcttagggctctatcatctgttttctagactgtttcaacacctccaagctcccctcccttcccatcactttcctggcattctgggcccatattctgcccccaacggtgccttttcactctattttccccatgattccccttcatgagaacattgttacatccagtggagctacttaccaagatacagctagctccctgccttttctcaggtggttcccattacctcaaatgccctcacctccttcccaaagcttttccccaaccacccggcctctcctagctccaaatccccttgcacttctatctttccttgtccatttatcacttcatttcttttattttcttaaattttttttttttttttagagacagcattttgctctgtcacccatggtagagtgcagtggcatgaacacgtctcattgcagccccaagctcccaggttcaagggatcctcctgcctcagcctctgcagctgggactgcaggcatgcgccaccatgcctggctaattgtttccttttttttttttttttttttttaatggagtttcactcttttgcccaggatggagtgcagtggcgtgatctcggctcactgcaacttccgcctcccaggttcaagccattctcctgcctcagcctcccaagtagctgagattacaggcacacaccaccatgcccagctaatttttgtatttttagtagagacagggtttcaccatgttggtcaggctggtcccaaattcctgacctcgtgatccacccgcctcggccgcccaaagtgctgggattacaggcgtgagccactgtgcccagcctgttttcattttttaatgttttgtggcgatgggccaccacacccagctcaatcacttactttcttatttgggcatctaatttcttcttgtacacaacagatgctcaataaatattatgaaatgaatgagtgttttactaatttatataaatattttatccttactacaagtgtgagtttgtgatttccttgaaggcaagcaaatcatatctaattcaaatgtaatagctttgcaagagccttgcacatagcgcctacttgttttttgtttttttgtgtttttgttttttttttgtttttttgtcttttttgagacagagtctcgctctattggcaggctggagtacagtggcgtgatctcggctcactgcaatctctgcctcctggattcaagcaattcttctgcctcagcctcccaagtagctgggactacaagtgcatgccaccatgcccggctaatttttgtattttcagtagagacggggtttcagcatgttggccagatggtctcgatctcttgacctcgtgatccgcccaccttggcctcccaaagtgctgggattacaggggtgagccaccgcgcccagccttgttttgtttttaaacaaggtaacagtatgaggtcctcactgttgaatgagtgaataaatgttactgcctaacacagccataggacacagcagatgttcatgagatgtatgctgtgatttaaatggcttcattgccaaacacagtgcctgccacatagtcggtgttcctaactaaaggcttgatggataaattaatgtattacctctagtgcttagcatagagctatgcacataataggcactcttgaaatgtctgttgaaagaataaatgaatgtgtccttagaacttagcacattccccaacacatagcaggtgcttacacaagtgattgtggaatgaattaaaattaattatccaccaggcacagtggctcacacctgtaatcccagcactttgggaggccaaggtgggtggatcacgaggtcaggagtttgagaccagcctggcctaacatagtgaaacccagtctctactaaaagtacaaaaattagccaggcatggtgatgtgcgcctgtagtccctgctacttgggaagctgaggcaggagaatcacttgaacccaggaggcggaggttgtggtgagctgagatcacaccactgcactccagcctgggcaacagagtgagattccatctcaaaaaataaaaaaataataaaaatttaattatccaaggtctcttgtgcttgccatactgctaagacacaatggtaggcactcattaaaagtctgttgaatgggccaggcgcggtggctcacgcttgtaatcccaacactttgggaggctgagacgggtggatcacttgaggtcaggagttcgagaccagcctgatcaatgtggtgaaaccccatctctactaaaaatacaaaaattaaccagttagccggccgttgtggcatgttcctgtaatcgcagctcctcaggagactgagatgggagaatcgcttgaacctgggaggtggaggttgtagtgagccaagattgcaccactgcactccagcctgggcgacagagcgagactctatctcaaaaaaaaaaaaaagtttgttaatgaagatgttgccagtgcccagcattatgtttgctggaagaatagatgtgagcacctccaggttttgtaaaaggcaggaagacccagcaagtgtttgtgaaatacctgctgaatgagtgcatccccactgtccagcagagggccaggcacatgcccatggaggggacctgagcagacccccatttcctttccaggtgtggcctctggaacctgactccgttaggacgaacatctgccccttcagggagggtgagccgaccggcctggggctggggttggggtgttgcgagcgatgggtacctggcctgcggtgactgtgccctttccttgcagacccccgcgcacaccagaacctctggcaagccgcccgactgcaactgctgaccctgcagagctggctgctggacgcaccgtgctcgctgcccgcagaagcggcactgtgctggcgggctccgggtggggacccctgccagccactggtcccaccgctttcctgggagaacgtcactgtggacgtaagtgaagcagagggcacctcccgtggtgaggggagagtggggaaccgggggtccccttttgtgatcccacccattcctctctttccacagaaggttctcgagttcccattgctgaaaggccaccctaacctctgtgttcaggtcagaaaggggtgcatagtgctgggctggaggctggacctgggcagaccccccagccaagggggtcttagttcttgggccgctaaagcatagtggttgccagcttcctctatgggagttccactgcctactttagtagtgcgcgggaccctgggcaactcacttcacctctctgaacgtcagtttcctcatctgtttaatgcagatgataatacagtaactacctcatggagtggttgtgacaatgaaataagagaagtgcttccccttaggaatcggtacagactaaatgctccataaatgtagccacttttattattgctatccttattctatttccatacctgtagaatgggttgctctacagtttcaaagggtgattataagaacattcactcatccggccaggcgcggtggctcacgcctgtaatcccagcactttgggaggccgaggcgggcagatcacgaggtcaggacatcaagaccatcctggctaacatggtgaaaccccatctctactaaaaatacaaaaaattagccggtcgtggtggtgggcacctgtagtcccagctactaggaaggctggggcaggagaatggcgtgaacctgggaggctgagcttgcagtgagctgagagggcgccactgcactccagcctgggtgacagagtgagactgggcgacagagtgaaactccgtctcaaaaaaaaaaaaaattcactcattcaagattttttgagcagcacaagtcactgttttaggcacttgtgatagaccctaacatctctaccctcatagaacttatattgtaatggagaaaggcaggcaacagacattgtaaataaatcatatagtatcttaaaattgcatacaaataccatgggaaagggataaggtgggactggggttgcaatttttagcagggtggtcatgtgagaaaggaatctctttgagaaggttagatgagaggggaaccatgctccgtaagacataaaaacagctttagggtcagaagacgctttatacagatgatctcacaaggctggggcagagaaagatgtagtgattcctaatcacccagccttgaatccacatctgcctcaggtcagattgagtgcagattcccaacccaacaggccttctgttgcctgccccattctggtctttctgcctttggcttttgcttttcttagtggccctaaccatggtctcttcccagcaggtgaacagctcggagaagctgcagctgcaggagtgcttgtgggctggtgagttgggcctgggggcagctggggcagggccacctcctaggggtgaaggtcagggcatgggaggcaggcaagtggccaatcccagcaaggatgggtcttggtcagagtggcctctcaccccttccagactccctggggcctctcaaagacgatgtgctactgttggagacacgaggcccccaggacaacagatccctctgtgccttggaacccagtggctgtacttcactacccagcaaagcctccacggttaggactgggcgaccctcctccacagatctctccaaatgcatctcacatctggcctcaaattttcactccatccaccctgtgccggtctctgggaacatggggggtgactcagaccagggccatattcagcggcatcaccaaagtctcccagtcccctctacctcattctacccagctgtagcctggtaggtgctgccctaagggtgctacctccaggtaacagtgcccccatcctttggcttggcagagggcagctcgccttggagagtacttactacaagacctgcagtcaggccagtgtctgcaggtgagctggtggaagaagggccccacctcaatgcctaggggcaacaggcctaaaactagcactcacctactgtctatttaggcttattttatgttcagccctgggaaagttaagagtagaagaagcacagttcctatccccaaggagcacactgttggctagacacccataaacagataaccacacctacaggtgctaagttttgggttccagggagagcttccgggaagaatttcttcctataagccagatttggtatggaagaagtcataccctagtcagtgggcacagcacaaaggcagagcagctgcaggaaccttagccgggagatatgcatagttgatgctgggaatttggagatcaggccaccagagcttggtgaatattggaacacctggctggtgccctggatttggttctgtttgtatcttacagctatgggacgatgacttgggagcgctatgggcctgccccatggacaaatgtgagtattgtaagaactgcctttcctttctgtaccaggagtggggatcttgacagggaccactcttgggcacagcacatgcaatggccttgtccttccctgagatcagataaacagagggtcattccttcattcactcaaaaaatgatgagagcttgcagggatcgcaggaacaccaaaaatataaatccttgcccccgccccacccctagaagactagcaagacatgagccagtcacttacatttaaagtgggagctactgaagcaccaccaagtgttcagtgctgtaaatgcatacaatgtggacctgacctgggtggggtgaggggtgaggggctcagggggaaggttccagcaaaactctgaagactgagctaggggaagggggtagagatacagggtcttggacaggcaggtttctgtcatgagataaagatgcaggagacatgtaggggatttggatcttatgttgagagcagcaggagctacgatcaaatttttatatatttcacacacacacacacacatatatatatatatatatatatatatatatatacttatttttttatttatttttgaggcagagtctcactctgttgcccaggctggagtgcaatggcgcgatctcggctaactgcaacctctgcctcccgggttcaagcaattctctacctcagcctcccgggtagctgggattaataggcgcctgccaccatgccctgctaatttttgtatttttagtagagatggggtttcaccatcttggccaggctggtcttgaactcctgacctcgtgatccgcccgcgtcggcctcccaaagtgctgggattatagtcgtgagtcaccgcacctggcccaaatttatatttttaaaagatctctgaggctgtcatgaatcaattcaaggcaaatcaattggaggtaaaaaaaaaaaaaaaaagacagggcagggacaccaggtagttgcagacacccaggacagcaagatcaagggcccagcaaccctagcttaggggagaaaaacagctgacattttagcacttaagatgctcggcattgtgttaagtatgtattaacacattgtgttaagctttatatgtattaatatatttagtcctcacaccaaccctatgacacaggtacaactttacagaggagaaaactgaggcagagggtgacattacttattcaaagacccctaaacagatggagctatattcatccactggctctgacactgtgctgtggactctgggcaaatcatttcttcgttttttgttttgttttgttttgttttgagaggagtctcaccctgtcgcccaggctggagtgcaatggcgcgatctcggctcactgcaacctctgcctcccgagttcaagcgattctcttgcctcagcctcccgagtagctgggattacaggcgtgtgccaccacgcccggctaattttttgtatttttagtagagacggggtttcaccgtgttagccaggatggtcttgatgtcctgacctcgtgatctgcccgcctcggcctcccgaagtgctgggattatataaaggcatgagccaccgcacccggcccaattcatttctgttaagtctcagtttttcttctctgtggagggtaagtttctaactcttcttctctgggtctcccagacatccacaagcgctgggccctcgtgtggctggcctgcctactctttgccgctgcgctttccctcatcctccttctcaaaaaggatcacgcgaaaggtgagcgcttcccggctccccattcccctgggggaggaccagagtggctgtgggagttctccgagggaaagcggcggccgagctcactggctgcctccgcccctctcccctaacagggtggctgaggctcttgaaacaggacgtccgctcggggggtgagtgggagcaagcgctgggcggagggccgcccccggggagccaggcctgtgccagctcacctcttccctccccatctgttttctccggcagcggccgccaggggccgcgcggctctgctcctctactcagccgatgactcgggtttcgagcgcctggtgggcgccctggcgtcggccctgtgccagctgccgctgcgcgtggccgtagacctgtggagccgtcgtgaactgagcgcgcaggggcccgtggcttggtttcacgcgcagcggcgccagaccctgcaggagggcggcgtggtggtcttgctcttctctcccggtgcggtggcgctgtgcagcgagtggctacaggatggggtgtccgggcccggggcgcacggcccgcacgacgccttccgcgcctcgctcagctgcgtgctgcccgacttcttgcagggccgggcgcccggcagctacgtgggggcctgcttcgacaggctgctccacccggacgccgtacccgcccttttccgcaccgtgcccgtcttcacactgccctcccaactgccagacttcctgggggccctgcagcagcctcgcgccccgcgttccgggcggctccaagagagagcggagcaagtgtcccgggcccttcagccagccctggatagctacttccatcccccggggactcccgcgccgggacgcggggtgggaccaggcgcgggacctggggcgggggacgggacttaaataaaggcagacgctgtttttctacccatgtggccca

SEQ ID NO: 1203 - DNA, 17976 bp, Homo sapiens
tcggaaggggccaggagacactggaaggtccggacggcagggaaggggacggggttctttccagtcccacccgtgtagggacacctctccccctcatcccccgatgtaccctcgctgaatctgggatgggagagacgaaccgagtctaggcatctgcgtagcagcgccggggagagcggggagcccagggcggagcccagtcgactcccggattcccctgccccgcccccggcacgaggccccgccccggcggccccgcccctcctcgggactcgaccgggctgcgctcactgcccagccggggccccgggagcctccaggctcccgcccgccctgagctgcggcctccgcatggaggggccactcactccaccaccgctgcagggaggcggagccgccgctgttccggagcccggagcccggcaacacccgggacacgagacggcggcgcagcggtacagcgcccgactgctgcaggccggctacgagcccgagaggtgacgcccagggcagagcgcgcggggcgcatccggggcgggcggccgaggagggcgcggcggctccgggaacccggcgacgctgcgggggaggggcaggccccacaaacccttcccctattaccgcctcagcctctaacttcccgaaacgccacgctcccggctttggttgggggatgcagacgggcactgtgcgaagggttaggtgcttcgttgcacgggggagcggaggagagggaacaggtcgtaaaaaccttccctaaaatcttagccctagattggacctcgctacacacccgacgacaccccgttcaggtggctccaactcctggggttcaaacagtgcttgctggagtcctgtccgactgacttggcttacccctccttagctgtttcctcctagaactatcttcagtggtcttactggcaggtgttggtgtccagatggatcgccttcgcagggctaggtgaggacactctcccctcctcaccatgcactgagatctgagaggctgccagtgcagctcacctcaaggtctctccgaagacgcaggcccccatgctggggtctgtaggggaatgagggacactggaggaagagtagggtagtgagctgggccccagggggactggctgaaaaggagacagcagctaatctctggattgtatcgcagcttgaaatgcaatcccactgtccttccggtccagaggatttggacttctttctctgcccatctgctggtgttcagcagcttggggaggtgacctggcagctgggttagatgggggtggtctgggggaattagcccggcagctctgcccaggggttggccgcttatgtaagaacttttaacggcttaaggggctcctcggcagtggggctgctgagttaggcccccctgtcctggcaggctgcctctctagaattgactcaggcttaggcaactcccagcctttctcctgtcctagaaatccagctcctggggttcaggccgcagggcgatagggaggggccacaggggctgaatgagccggttggggcttgacagaggcagtgcttggttagagtaggggttgcaaacataatgtttcagagctcaggccggagccatgtgagtgcatcctttctccagattgcacttctgcatcaaggggccatccctacccccacccccaaccgacccgcaccccccacttgggctcagggagcctgtgtaaacctgagccccagccaggtggtgtagtgagattcaaaacctgctggccagacctccacctgccttcgccaacctggagctgtgggaagaggacaggattctgtgagcagtcctgggtttgaatccagtgttattgctctctggcttgaacttggacaggctatgcccccgacccagctcaacagtgctaatgttactaccttttctgcccttcccccatcttcccctcaagagtgttttgaaatcttgttccttcaaatagccccaggcctgatagagccctcggggttccctgcctggacctcagtacccagctgggcactgttgccctgctaccctgaggaaggggcttggacctgccttcctatccccacagctgctaggtgggggtctcagggaacaacagcccttcctcggcttcggaggccgactggttgcctcggtgtctcctccccatggaggaagcagctggggaagatcaggaagagggtgtatgagagtgggggttgagggtggattagcggagtctctggaaaagcacagcctaacccagggctgagcccagcagcttagagtgatgaggagcccaacacaggttaaagtgggaggtgtgtaggggagcaggagaggggagtggggccatgaagtctgtaatcactgggaaggtgaccctccccatgcctcagccaggcagcctaagaaggctggggcagatgtcacagtcaggtcacctgagatggtaaaatccagctgctctcctgggccctggctctggttgaatcctgaatagtactctagccattcctaactcatactgtaggggacagtgacccagagcaggtcctttagtgacccagtaacccagagagaccactgggctggtctctgctgtgtgccaatctctgctctgtgcctgcagttggcatgatagctctgttcttctgtggccagaaaggtaccccagagcagctctgaatggtcaggcactttctgtggctggtctcactgctctgctccacgtggccagtgaaaggtcctagtgctggtgctcctcaggacgctcccctggtcccccatgtggcccgggctccctgcatgagcccaagaatgctgaaggttcagaggtgcttcccacacatcgctggcaatccggccccagcctcccctctgcacacagatggaacagtctgtgttttcctggcagggtcccgggggcatcaatgggggaggctgggcatcccagggaacctcgtggcttggaggccaagcctcccctgggcctagctgccatcacactgctgagaagtaaataaacccagcctcccagggccacagccagccaccaagccagggaggggactgtgtcccacaccaccttattctcttctccccaagtgagctgtgggagccacaggaggacacagggaggaggctgtggagtctgggtggggggacccactcttggtctgggaagagcactggcagttctggtcccataagagggaaggggatctacttcctaccaccccacctttccccatgtgaacctatctgtacccagtcactgcccccatgtagaaatctggatcttgctgggcacccagggccaccaacttctgctttggggatttttcagaagttccctagcccctgttcttatttgtatgcacacttgtctaagccaggcttatgatcctcccccatcttcccaccgcaggaccctcccaaataacaaaccgctctctgagattaaaagccctggtaccaacaccattttctcagccggagatagggcggtgagccgaagcactgggccatgaatcagaagcagtacccctcccttcctttccgaactatagattttgcctctgtcaagggaatgggtacccaatacttgtcaattaatagattgtggagttaatgtgctcatttatgaaaaatgctttgtaaactgcagagggccccaaggccacccaaaggtcaaggagtgtcattatgaagaatgccggctccctaggatgtcgggatggggcatagcgatccaacctcaaagtccttagtgctgggtagctgagagcccagaccggtttctcagggctccgggccttgatcagggtccgcggaagagtattggggattggggaacggcagaaccgtgttagaggtgccctggggagaagggcaaggtgggtggccccggctgggggagaactcgggggtggggggggtggggggtgtgggggtgtgggggggtggggcctctgctggggggtcctgggtggctggatgtagagcggcggagggggcgtgtcccggcctgacccggtactctcccccgcagccccacacctcctacccggtccgggcttgcggggtcgcagcgccgctgcaggcagctgggggcgtgcgcgcggcgcggctgagccctttgtgcggcgcgggcggaggcggcggtttccgcgggaggggcgagaagggcgggaggggcgggaggacagggcggcgccctggcccgccctgccgctgccgcagcccccgcccccgcccccggcccgcccggcccgcggcagcagcgtggccgcggcgcggcgtcagcagtagcagcagcagcagcggcggcagcggcgggcggccgcgcgggtgtttatgtcgggtcgcggggtctcgcggcagcatggcggactacctgatcagcggcggcaccggctacgtgcccgaggatgggctcaccgcgcagcagctcttcgccagcgccgacggcctcacctacaagtaagcgccgggtctcgtacccctaggtgcgcgcatccacgcgccgcgacccccgggccggccctgcacgtgcgcggctcccccggcgttccctgcccggtgcgagtgcctgctgtgggcgctgggggctgggcacgggaaggaaggaggcccgcgccggagcagacggacgtggcacggcgacaccgcggccctcagagccctgacccgtttctggccagatccgggttcggcctgtccccttcctcctctcagcggcatggaggggccctcgggcgtgtgggaactggagatgtgggcattatggggagacttttcccagccgctggtccaggacgccccctcccagcctcaccacgagggcagagggtccccggagccaagcttaagcagccgcttccgcatggccccaggagaggcccagccaggtggttggggtggcttcttttccaactgtctagtccagcgctttttccagttgtgtccctccctgcccacaggttggtattggtgcccctcccaaggcgcgaattattctgtgactgctacccctaagcccaccctacatggggttttggaggaggacacagacccacccgtctgcctctggcttcatttgccttttccgtggtccctaggccagttgccctgcgtgctgcaggcctggcactagctctgcctcctggctgcaggactgtgcccctgccaggaaggagcatcagaaggggcagagtggggatgctggccagtcaaaagcatccctgccttgtctcctgccagccctgccctggcttgtaagcactcctgcttggccagcagtttccctaaacaccaggatacccagtcactcctgaggagtgtctcctcctgcctgcccgtaggcgacgggtgtatagaacacctagaaaatgctatgaggcccagactccagcatttcttctgtggcctctttgctatacagaagaagggctgccaaaggctgggagcagccgaaattctttgtttttttggtggtctttggtgatgagattgaaagcccacctttgatacagttgtcattgaagtcttctaggagaacaccctaggggaacgcctaggagtttctctaggccttagggcagattaatgacccacccccctccaccctgtggcttttccttcctgcgctagggatgcctgctgctttgcttagctcagttcatagtgttcctgaagtgtgggatatttgcttttgggtgtgtctctcaaggcctgctgtgattttagcaggttggggcccctgagctgtgaccctgcacctagatgtacccatgcaggcctgcacttcccttgcggagtttgctgtgaccgtggcccaccctagtgttggtagctgccatgctttggctggggacccagtgtcctggtcccacctctaaggcctctttcctcccctttcccgtcctggccatttctgttctgctctgtcagaacatgccctgcactcagccccctggggtccctccatgctgttccgagccctgtgtgactcagcagcccaggcaccggggcatgcggactgtcctgtgctgggtcatgttcatactgtgttgagcgccacaaaattgttctcaggtttgttcccaatgtttacttattttctctccccatcaagattgagaagttttcaaaggcaggcactgtgtctgctgtgtgtggcgatatgggaacttctgtgtcgcttgacaaactctgagacttaaaggcaatggatattttgggcctattaccttgatggtaccccagtagacctttcgctgtctttggctctagctctgggggctggagtttgccagactctagtgaggtgcacgaggtgggaactgccctgatggggcagtagggatggggggctgtagcctctgctcctctaggcttttctgtacccccctgctgcctcctctggcatggcaggctctgcccctttggggcacccctccccactaataacactcacttctctgtcttcacagcgacttcctgattctcccaggattcatagacttcatagctgatgaggtggtgagtacctcttcctttgacaaggggagggggctgtgtatgtggtggaagaggctgacttcttgctcaggggcagggcatggagagatggagagacttttcttgggaatgggtggataggatatagtcctttttttttttttttttggagacagagtcttgctctgtcacacaggctggagtgcagtggtgtgatctcagctcactgcagcctccacctcccagattcaagtgattctcctgcctcagcctcctgagtaactgggattacaggcacatgccaaaaccccccgataatttttgtgtttttagtggagacggggtttcaccatgttggccaggctggtctcaaactcctgagctcaagtgatccgtccgcctcagcctccgaagacgctgtgattacaggggtgattccacccagctggtatgggtggatatagcctttattgttgccagagaaacaggcagagatcaaagggttatacctgatggggcagaggcagctatgggaacacaggagtgtcctgagtgaggcctggcccagggctgggtggctctctgtcagtgacagagcctgtgggcaggttcagaagaggcctgggaaggggtgggcttgggagtgggaacggtgggcttgggagtggctgccttattgtagagaccataaggattggattttgtctggaatgctgaacaaggacatgatagaagccagtgaaattatggagatttgaaaccggtagacagacttgttcactgatccacaatgtacaagaactggcaagagggtttaaaagagttacattttggataaatacaaggaaacgcagtgccttgctttcccagaggggctcatcagtgagccgaatcaatgaacaattaacatatgataaactcagagaagcccagatgggtagtgatgatggtgtaagtcatttcaagaaaaagtgccatgattcaatgatgaattcatatacattaaaaaaaaaacatttcttttctgttgctattattattgctatttattctggtctgattctcatgaaaggccagagggcctgagtgtgcctggatcacttacatgtgagggaagttcacatccagctggtgtttagccagagctgacccagacagattttcagggggaaattcgaatgattctggttgtttcccttatgacaacaaccaggaagcctgcttggtgcagctgttcagtttaacaaagtttactggccagtgtggctttgtgtcagaccctgggctggctgctaggaagggagggattgaaaagacccctaccagctgggcgtggtggctcatgcctgtaatcccagcattttgggaggctgaggcaggaggatcacctgaggtcaggagtttgagaccagcctggccaacatggtgaaaccccatctctactaaaaatgcaaaaattagctgggcattgtggcgggcatctgtaatcccagctactcgggaggctgaggcaggagaatcacttgaatctgggaggcggaggttgcagtgagtcgggattgcactactgtactctagcctgggtgacagaatgaggctccatcagagagagaaaaaaaaaaaaaccctgcctggccggcaaggatctccttgtcctgtggcttctgtcaggaaggctgtggcccttctgtggcatgacaaaagagaagatggtgttttctagatcatggggccagaggtctgaactagggttagtgatgggtttcagggactttgaatctaaaaaaattacatagcaaagtctgcacaaatgtcttggggactgggatccactactgttggcctgaccctcagaggggtatgtgctctggcctttcctccatgggcaggtggcttttaaatggatacttgcaatcctgaccactctcctgagctccagaccattcgttgcttgctttcctggatgcctaaaagactcttttccatgcctacccccacctcagcccttgtcacccagaatccattctccaccttggagcctgagtgacctttttgaaacataaatcagatcatttctctgtcaagaccctccagtggcttctctccgaatcaaatctgagcttctgtccgtggtcttcacggccatgcatgctgcccctgccttcctcctgcctctcccttccctccactcccctggccttctttttctttcttaagtgtgcctccgaaagaactggaccctgaggcgggtttgcactcagtccctcagccgagagtgacagcccctctgacttctacttaatcggctcccactggtcacctcccaggaaagaggctttccccagtcaccttgttgccagtggtcgcttggcctttttgtttttctctgcagccttcatcctgactgaagtcatcttgagcatatgtcctgtgtctgtcatttttctttccaagtagaacataagctccattagatgagctgggaactcatccaccttgttcactgccatgtccccagggcctgtcctggtgccggtgcatgtaggagctcagtgagtgagtgtccagtgggtgataaactctttacgtgggctgtgcctccatcctcaggacctgacctcagccctgacccggaagatcacgctgaagacgccactgatctcctcccccatggacactgtgacagaggctgacatggccattgccatggctgtgagttacacacctgcatggggactccagggcacacaggaactgaccatggtgggctgtgctgaggggcagggctgaggaggaatgggccccggctctgaccacacttcccttctacatcagctgatgggaggtattggtttcattcaccacaactgcaccccagagttccaggccaacgaggtgcggaaggtcaaggcaagtaccaggcctgtccccagcaagatgccacctggcagtccccacctcagaggccctcccagcctcccctgccagccctgcactgctacactccctgcgtgtccttcctctcagtggagccttggggccgagccctcattttcccactggctcctcatcccactgagggtcctggcttctctgcagcacagctgcatcctctgttccctgtggccagcctggacatcatccctggctttcttccagccttttcctcccccatctctgcccgcagaagtttgaacagggcttcatcacggaccctgtggtgctgagcccctcgcacactgtgggcgatgtgctggaggccaagatgcggcatggcttctctggcatccccatcactgagacgggcaccatgggcagcaagctggtgggcatcgtcacctcccgagacatcgactttcttgctgagaaggaccacaccaccctcctcagtgaggtacctgcagggcaggggaagcagggctgggtgtagagaggaccctcacgctggggcctcagactggtgcctgtgaccagggaccagagggaggcctggctccttctctctcacctgccaacctgcaggcaaatgttcctggccccacaggtgatgacgccaaggattgaactggtggtggctccagcaggtgtgacgttgaaagaggcaaatgagatcctgcagcgtagcaagaaaggtaccagggagctagttgaaaactcaacccccagcctgactccctgtccacagtcccgttgttccttcacagccttacaggttatcccagcaaccagactgagccctggggaaggttcgaataacctcaggcaggccagagcacaactcctgccatccttctcttagcttagggaagcttgcccctagtgcagcatcttcatagtatgtttcccaaaactagtcctatgcgatgctcatcagaaaaaaatcctgagcaataactcctttctctatcccctatcttgcataaagaattgcacattcacttattaaaggctctcagaagtcctgcagttaaatttatttgacactagagctgtttttataatattttccagctagaaacaactttagcttttttttttttgagacagagtctcactttctcacccaggctggagtacagtggcgcaatgtcagctcactgcaaccctcgcctcctgggttcaagcaattctcatgcctcagccttctgagtagccaggattacaggcatgtgctactataccagctaattttttttttttttttgtatttttagtagagatggggtttcaccatgttggccaggctggtcttgaactcctggcctcaagtgatctgccctcctgggcctcccaaagtgctggaattacaggcgtgaaccaccatgccctgccacaactttggcttctatttatttatttttgagacagagtcttgctctctcatccaggctggagtgcagtggtgtgatcttggctcactgcaatctctgcctcctgggttcaagcaagtctcctacctcagcctcccgagtagttgggacaacaggcacacaccaacacacccaggtaatttttttgtatttttagtagagatggggtttcaccatattggccgggctgttcttgaactcctggcctcaagtgatccacctgcctcggcctcccaaagtgaggaagctgtgagccaccacacccggccaactttcgcttgttagaaaaaaaaaggaaaaattaaatattcaccaggtccctgttggctatactgggaaatgcttccctggtccatactggagggttctttggtgtctgtattggacagggcacatgcttctccctgcaggacagcatcactcctggctaggagatttcggccactgtggcccagcaggtgaaaggctgccagtgctcgggctgcccatcccaggccacggggatgcccatccacagacccccaggaacctgctgggctgaaagatttctttgctccctgttccttgggaagagggctaggtccctaggaacacttcctgggggcggtgctgtcacctagtggctgactggggtacttcagtggaatctctggagtggtccactttcatcttcaccctcctaaacatctcccaaacttctccccaccaagcctgcttcatttcacccctgcattccttgtcagggaagctgcctatcgtcaatgattgcgatgagctggtggccatcatcgcccgcaccgacctgaagaagaaccgagactaccctctggcctccaaggattcccagaagcagctgctctgtggggcagctgtgggcacccgtgaggatgacaaataccgtctggacctgctcacccaggcgggcgtcgacgtcatagtcttggtaaggcccccgcctgagtggtgggggagatggatgagtggttcagcagagtggaggtttatgaggacccaggttcacctctgattaagcctgtgcccctcccttgctactcttcctctctctttctgagtgctccctggtgtcagaattaggagggtggcagcaggattgcctgagctcagaggttcaaggtcacagtgagctaggatcgtgccactgcactccagccctggggacagaacgagaccctttctcaaaaaacaaacaatggtttgtgtcatctgagatacaaagaaagaaaacaaacaagttaaaattctccagtggcacagccataagaaagaatgaaatcctgtcctttgcagcaacatggacagagctagaagccattatccttagtgaactaactccaaagcagaaaaccaaatactgcatgccctcacttataagtaggagctaaacagagagtacacatgttcataaagatggaaataatagacgctggggactccaaaatgggagagggtgggaggggaacgaaggatgaaaaattggctatcagacacagttttcgatatgtgggtattaggtacacttgaagcccaattctcaccagtatgcagtattccatttaagcaacaagcacatgtacccactgaatccttaaaaaaaaaattgacaaattgttgcaagcaacaattgcaaatcaagactctcccccaccccccgataaagggaggtagaataaagataaaggcttattgatcccttgtgagtgatctggaccatacatctagattcatctgtattctataactaggaggaagagaaattaggaaggtcactggcaccctctcaacagctcacaacagactgcaaacaaaggcctctgagggccttcttggctcataagttgaccctgataatttagctcacgtttactgagaaccgcctgtttgccaggcactgcgtcaagaccttaatgtatatcagtccattgaggaacagtcgccattccattttcagatgaagaaacaggcttaaagaagttaagtcatttcatttggttagtgagttggtgggaacaggatatggctccaggcagtgtctccttgctttaaggatcagtctgtacaatggataggaaaggccttatgtactctaagactgcattagttgtggttaacctttcagggaagcagtcccctttgagaattgactgaaagttgtcaagtgaatttccagaaaaaaaaaaaaaaaaacaaccagaaggaaagagcattctcataacagttttcataggatttgaggggttcatccactcaggctctccctcctgccttgagaatcctcagctgtctaagcccaagctcttccgtcctttctcacaggactcgtcccaagggaattcggtgtatcagatcgccatggtgcattacatcaaacagaagtacccccacctccaggtgattggggggaacggtgagtgcggggtcgcctcccacccgcctgctcctgcccctccaatgagtaacccttttctgtccttcagcatccctaggtgatggtatggctcctggcatgggtggcagggagcatgatgggctttggtcactgtaggggggttggggggtgctagactggggtcccaagaggctgttgggcaggcaggggcatcccatcctcacattgttcctctgccccatccccacccccagtggtgacagcagcccaggccaagaacctgattgatgctggtgtggacgggctgcgcgtgggcatgggctgcggctccatctgcatcacccaggaaggtgggtgtcaggaggtgagcgagtgcccgctggccccggggcctcgcctttgttccccagatgtatatcaagtactctctctgccaggccctgttctgccatggtaggctccggggtgacccaggcatgggccccaccccatcgggcccactgacttaggggaaggcaggtgtaagcagggtgcaagagctgcagcctgcttctcagagtgcggtcaagggggctctgcctggggcttggggcctggggctggtgtgactgtccatggggcttgttggaacctcagggtttggatttgatttgtgacaaggcagatatttaagacacagagacgacatgtccctgaatatataaagatatgttatacacctgcttcaccatgtggttgggcgtggggagttccacccaattacaaagcccttttgcagggtgggttcctgaacatgaagtgggaaggggggagcctggcatgtgtcccccatgtggttattgaggaggtgctccctggaggctggtatctgacttgtggggtggctgcctggaagacttgggtcctcacttggcctgaggagatgtacccggcccctcctgtgagggcaatttctccaaaacactgagtgatgcatttggcctttcctaccccaaacagctcccccttttggtcctcagagcctctgctatttaggtttgtgcccttcgccttaggtggccaccatggtgaaatgagggccctctctcacccacttaacaaatattcattaggcacctacttgtctcaggcactgttcaaagctttgaggtagagtagggacaaaacaaatgagaggcgccatctctggtttatccagctttgcatccgtccctagacaggtgtggttccttgtagtccccacctaaaacctaacactgaaggaccttggacacttagacttgaagaaatgcaaaccagtatcccaaaggggaccatagtacctaaccctggtaacggtttttgcaaacaaaagccttgaaggggaacttgtgccttgagagcaggtgaggctggggccacctgtctgggggcattgggctctgaaggccgcttctggttcccccgtcagaatcccctgtcatgctcttaggggtggggtggcccagatccctagagtgacactcatcctggtggtatttgccagcacctatgttatgcctcagacacaccatccagccctgtcccttttcctgagtagaggtagtgcacaggaggaagagctgggctggccccgctccaggccccggagttgctgttgactcttctctgccttgtgcaccccaccctcccccagtgatggcctgtggtcggccccagggcactgctgtgtacaaggtggctgagtatgcccggcgctttggtgtgcccatcatagccgatggcggcatccagaccgtgggacacgtggtcaaggccctggcccttggagcctccacaggtgaggggagaatgtgctggggattgggcaggcgagggctggaagctgggggggtggcactagtgggctggaggcactaatcccttgcccactgtagtgatgatgggctccctgctggccgccactacggaggcccctggcgagtacttcttctcagacggggtgcggctcaagaagtaccggggcatgggctcactggatgccatggagaagagcagcagcagccagaaacgatacttcaggttccctgaccctgggccccacctgggcagatcagcccacaacccttcagggcccgctcatgccaccgacttccccagatggcagccagtccccatatggtggttctggaaactgaggcacagggcttaagtagcagacccaggatctgtccctgggccatctgactcagcccagtgaggggtggcctgggggaccttcctgggcggtatcccgtttttgcccttaagaggtggggtggggtcctctgagcttcaagctgctgggctcagtcttccaccctccacgcagcgagggggataaagtgaagatcgcgcagggtgtctcgggctccatccaggacaaaggatccattcagaagttcgtgccctacctcatagcaggcatccaacacggctgccaggatatcggggcccgcagcctgtctgtccttcggtgagtgctgagactgggggtggctcctgcttcctttctctcgctcttctccacccttggtggccctgatctgctccacctaccttcctcctaggtccatgatgtactcaggagagctcaagtttgagaagcggaccatgtcggcccagattgagggtggtgtccatggcctgcactcgtaagtgtggtggcctccttgctgtcacttggaggcagtgggttgggcaggtggggccagggttctgaggtcaagctgaggttccagggaccccatggaccacctgcagcagggacagatgctgctgcaggatggcccctcaccctctcttcgggggcccagccccctgttccttgtcctttagtccccatgcaagcaggccctcccctcccctcgggcctctcccgagcagggcacaggaggtgtggccagtcactgcacctggactcccagcccttgcttgctcaggaagcttggtggctggtggcaggggctgtggtggcaccaggcagccaggcagaagatgcgggtgtgacccctctggcgggtacaagggcagagagatggacgccagggccagcgctggggcaaccgtgggcgggggcagtgctcgttggcagcagtagttgcaggcatgtgccccaccctggtcaggagccctgtccccaggtatcagcgggcgtctaacctgtgtctctttccgccccacccttccgtagctatacctttctgccgtgtaagtaaccgcgctgcccgggccaagcgtagagtagagcaggggcagtctgggtgggacctgggctggaggtgggggtgggtattgggtgggggtaggagggtgctggggtgtaaccatgagatgtggaccctgggtttgggcccccccggccccctaactccaacaccatgatggaggaaaccagcagtgtcccctcatccagctgaaacacatatccctttctggctgcagagagatgcccgtgacctcaggcctaaggctgccccattttagactggacccagtgaccacaagcagcctaggccactgtgcctgcagggctggggctgggtgcggacatgggcagcagaggttcggctccaggttggagtttgctccatgaggatgggccatgcctgcctgagctgtccctccaccctgggcactgaggacatccactcagatgtggcgatggcccaaaggagcatggccatctctgcacccagcatggttcttcagggaatgctggcctgggggaggacagaggcctagggcctgctccaggccctcctcctgcgccgtacggctgagatctcagggcttctcagctctctgttctctcctacatctgggggccctggggaaagggttttgggaaggagcagggtccacacacccactcttgttccccctcttgccttgtccccacagttacgaaaagcggctgtactgaggacagcggtggaggccgaggtggtggaggggatgcaccccagtgtccacttttgggcacagcctccctccataactgagtggtccacagatttgcactacgggttctccagctcctttccaggcagagaggaggggaggtcctgaggggactgctgcccctcactcggcatcccctgcagagtcaggactgctcccggggccaggctgccctgggagcccccctccgagcccagccagccaggctctcaggccctgcgcctgcctcaggtctttcttgctgcagcctgctccagcctggcccccaccccaggggcaggcggcccctcctggcttctcctgtagggcacctccctgcccctagcctcccaggaaatggtgctctcctggccctgcctctggcccttcccgggccgctgcccctcagccatgtggcacttctgagctcctgacctaggccaaggggaggtctctgcccccttccccggccctgggctacccttgggtcctgctcctcaggccgctcccctgtccctggccatgggtaggagactgccctggtcatggccgcctgcctgtcattcctgactcaccaccgtccccaggtgaaccattcctcccttctcctcagctgcagtcgaaggctttaactttgcacacttgggatcacagttgcgtcattgtgtattaaatacttggaataaatcaagcaggtctcaacgcctccacta

SEQ ID NO: 1204 - DNA, 202933 bp, Homo sapiens
agaaggatgtgcggccgaaagcctcgggcggccttttgaggggctcggctagcttcagcgccgtggggtctgacctggctggatatagtgtaccggcccggcaggaggggcggcccggtccgggttgcgcctcctggagccgcccccgggacgtcagtcctggaggaggcgagggtgagtaggagggggcctggctggggaggctcagatcattcggtccgcaccgccttggcccctgctgcagactcacggccttcctggcctaggctgtggcctgagcctccatcattggcctcctcgcccgctgcctcttctttctgctctaattcctgcattataaagtcagagccaccactcggggcctcagttgaatgagtcaatgacttatccctgattgtctctgagggctcctgtaaggagtagatgtggtacgggatgggatagcacgtcgtaaactggaaaactgtgtgagtgattgctgctaaggcgtggatcgctcctccagtataattacgaaattccctagcaaagcagtcgaggatcctaacttggccccaggtagctctgcggcttcttctgcaaacactcagtgaggtccaggagcccacgcgatctctgcttagtacccaggaggcacactgtgcttttgtggttctccctgctcccgcctttgcttcagctttcctgctgcctggaatggccttacccgttctctctctggaatgctatcttaaatgtcaccatctctgagaacttcccgaacaaccaaccctttagtcctaatcagaattactcttcctatgagtgtgactgcagtacctctagttttgtacggttataattattagagcatttattacacgggcttgttgtataattaggcaaggatgatgacacctttgcattttatagcactttatcaaagtggttttgacttttttctataaaaaatgatttattttcttaaaggggcaaaaaatacattttttcttaagaaaaaaaaagagccctgcataatggctttctcagggtgacaaaattagacagtgatagagccaatactcttaccaaggcggcctaactcctagactagtgctcctatctcttgtccacgcccctgacagagcccaaagatagttgaaatgggaaattttaaaagagcagagacttgtaagtatgaactcattattcaagaaattaaactttgatcctgctcactttttggacttagcactcagcctgtgacctttcatccaacaaacatctactgagtactggctatatacctgttactgtgctaagtgctaagaattatgaagtaaaaagtatatatatataatatatataatatatgtacatataatatatataatatatgtatatataatatatatattatatatgtatatataatatatatattatatatgtacatataatatatatattatatatgtacatataatatatatattatatgtacatataatatatatattatatgtacatataatatatataatatatgtatatataatatatattatatatataatatatgtatatataatatatataatatatgtatatataatatatatataatatatgtatatataatatatatattatatatgtatatataatatatattatatatgtatatatattatatgtatatatataatatatataatatatatacatatatattatatatataatatatattatatatataatatatatgtatatataatatatatattatatgtatatatattatatatattatatatgtgtatatataatttatatatgtataatatatacacacacacacatatatataaaacagagatcacatttttagtgtatttttcaaagggtataaagaactttttttgtggttctgatgtgcctaaaactctgatcacttagaatgaaaaatgacaggtcttagagtttagaacagtgcctagcacatagttgtcactcagcttgttgaatgaacgaatgtgaacatggtctaaccttattattttttgcattttacagaaacctagaaagctgacatagcctgaggacacactgctgattataaatacaactgggcctagaacccaagtgcagttactcccctcccatgttttcacctccacctctattttgtagcttctctcaaataaccttaatataatcctggatatgacagtagttcttctgacatgactgttagactcagacatgactgaagtgtctcacaacaccctcttcctccatattttctgccagtccttaactcaaattgtcagcaaaataaagacgtaaggagctgtgctttaccataattaagaaagtattaatatgttctctcaagggcagaatttgaaccaataatccttgtcgatgacaagacaaataccagctcatccgttataaatttatcttagaaaactctcagatccccaggagtaacagcgattggcgtgacctgctttttggtgaaatcagaaaaggacttgcctaccctcatggcagcaattaactggagctgattaacagctgctccctttagataagtacatatgcttgagtttaccgtgattctgtgactccctacgtttctaacagttgttacctctctggtccttgtaggcattcagctttggaactttgataaagcagcttaagggtttaggaaggatgtttaagatcactgatgcaactattcatctttccttcccatcaggtgtttgaattgttgctgcatttctccagcctctgctttcttaaacactcttgtgatagggatctcactatcttcctatgcggctgatacttattttttattttattttattttttttgagacagggtctccctctgtgcccaggctggagtgcagtggcatgatcttggctcactgcaacctccatccacctcccaaattcaagcaattctcccacctcagcctcctgagtagctaggattacaggtgtgtgccaccacagcccagctaatttttgtgtttttagtagggacggggtttcaccatattggtcaggctggtctctcaaactcctgtcatatgtttttaaaaggttcttacaagctccatgagactaccggtcagaacaaaattgtccttattgaaatatggttcattttagtgatacgatgttccaagtaagatcttatggttaagacctctatctaggtatattttcctggtggaccaaggagagaacaaataaaaatttcactttttgtgagaatgacggcaagacctagataccttttaatttagtatttagccaggtgtgatggcacatgcctgaagtcccagctattcaggtggctgaggagggaggatcgcttaactcaggagtttcaggctgtagtgcgctatgccattcaggtgtccactttaagtttggcatcaatatggtgatctcccaggagtagaagaccaccaggctgcctaagaaggaatgaactggtccacgtcaaaactcctatgctgatcgtagtgggattgcacctatgaatagccactgccctccagcctaggtaacatagcaagatcccatctctttaaaaatagttttttaactaatttttttttcagatggagtcttactctgttgcccaggctggagtgcagtggtgcgatctcagctcactgcaacctccacctcccaggttcaagcaattctcctgcctcagcctcctgcatagttgggattatgggcacgcgccaccacgcccagctaatttttgtatttttagtagagacacagtttcgccatgttggccacgctggtctcgaactcctgacctcaggtgatctgcccgccttgccctcccaaagtgctgggattacaggcgtgagccatcacacccggccttaactaatttttttatttttttctgagtcagggtctcaacctgttgcccagtctggcatgcaatggtgtgatctcagctcactgcaaaccctgtttctcaggttcaagtgaaacttccacctcagcctcccgagtagctaggattacagtgcatgccaccatgctcagctaatttttaaaaacttttggtaggcagggcatggtggcttatgcctgtaatcccagcactttgggatgccaaggtgggcagatcacttgagatcaggagttcgagaccagcctggccaacatggtgaaaccccgtcgctactaaaaaatacaaaacttagccggtcgtgatggcaggtgcctataatcccagctactgaggaggctgaggcaggagacttgcttgagccctggaggcagaggctgcaatgagctgacatcgcaccactgcactctagcctgggtgacagagcaagaccctgtctcgaaaagacaagaagggaggaaagcagggggagaggaggggaggaaaggagaggcgaggggaggggaggggaggcgaggggaagggaggggaggggatgggatttgtagaaatgagctctcgctatattgcccaggctggtctcaaactcctgggctcaagaaattctcctgtcttggcctcacaaagtgctgggattacaggcatgagtcaccatgcccagccctaattaatttttttaagtttatttagtgcttaaatccagctaattctgacttcacaattgagtttatgttatactctttttgtggatcgggctcacttttatttgcaatatcaattctaatgtttaatattatgtggcatcatattacttgtattaacttagattatgtggcatcatattgcttgtgtcactgtaaccctgagccctgtgcctaatgttaaatattgtctttgttttttcctcagatagtccctaagaagagtcctagaagcacctaccctctcattttacagatgagcagatgagcaacttgtacaaaagtcacctaatttgccacctaatgccaattccaggactaggactatagctttttttcttttgagacaggtctcactaagatagacagcctcactatcttgcccaggctgctctcaaacttctggcctcaagcaatcctcctgcgttggccttccaaactgctagtattacagatatgtaccactgcacccagccaggactatagatttttctaatcctagtcaagtatttctagtaagccatatttataaaatacccacttggaactgatgagacaggtttcagaaatgtttgctgcatgcgctcattgtctgaatcattgtttcaggttgctccggttgctaagaagactatgaacaagtcagagaacctgctgtttgctggttcatcattagcatcacaagtccatgctgctgccgttaatggagataagggtgctctacagaggctcatcgtaggtaagcagtccccttaagtacagaaactttaaaagcaactgtttgtcctgaggaagtttgttaatgttagttttaatttgcaatgtactcatacattttaatggaaatatgttattatttatattttcttccaacacatgaacaagaaaggaattaagtcctaaaacttaaaaatatgggttaggattaggtgaaaagtacttgagaaatttctatgtatttagcactaagtctagatagatattctaaggtactaagggaatgaattcatctttatgttaacagatctcgaatgaaacagtggataatcttttaacatttaatatatacccaaagtattaaagtttacaaatgatttaatttttaatgatttaaaattgattcaatgttccccctgtgatttgcatatataagtgatatatagagaggtccaatgcaggagttctagaggagagaataaagagaacaaagaatagctaagaattttctagaaccttagcttcctgctaaagcagagcaaagatccatctttctatcacaaatccagatattcacaagttgcaaatcccaaagagaaaaaaataaaaatatattatttgtagtctttattcacaccagtgtctgatgacatcatgattgacaacttgggctacaaaataaagtccaaattacttgaactttcatacctgttccttccgactttgtttttaccctacatttgcagtttctccaggaacttctactggtgtaccgtaacctctggctaagctagaggttacttctatttcccaataagccatgaattttgtctcactttctccatatgttctgtttccccaccttttttctatctgctactctgttaaccttcttctgtgctaaacaaactcctacttatctttaaagacaaaactattgtatctcacactctgtgaagatttctcttcctctgcttatccttactttacctcagctatctacattcactggaacttgacattttccaccacctccaaatcactcaaacattctaccattcaactaaaactcttactttcagctcacttactgatgacaaacaatagttttccatgctcactgagacctccaatccactagcttctctagttttgaccatcagttttccttctgtcttttccttcctcactactcagccttgattctatgtctgttattaaaatccttctcttggaaaaattccctttttttttttttttttttttttttgccttctgttgcacttgactgttgcattctcaactctggatgtaccaaacctatcttgctaagcagttgaatccagctgaaagattgatagcaccccaaattcatgattacccacttcaaataggcactcagtacttactactcatcataccacattttttctgtaatgaatgtttcatacctctcactctactgaatcctgtgactgccagttccccctcctttcattctctttaatgcagtaggcttactagaggaaatgaagacattaagtaggaactccctcatctttcagtatggtatctacaaatctacctcgatctgtacccatcttctctcttcatcttcctgctaaaacagagcaaagatccatctttctgttaaaggccagttcttccacacatgctctgtgttccatcccctcctgtcttctcagggacattgcttctttttttccccctctgattactatatcttcaacctttcttctatgctaaattctttccatcaacacttaaacatgcttcattgtttccattatttaaaaatcccatctctgtttcttcatctccctttaggtattgccattttcaactttccctcacgactgcattagcgcacaggctaaactgctacaaccatgacttgaataagatagaagtatatttcattctcataatattgcaatcccaactctagatggaccaaacctatcttcctggcaactactaagcagttgaacccagctgtgtaatagtacacagttatgtgggcagtctaggttagatagatatctccatttcacaaaaccatttaggtatactgccaggccttggttcttccattctcaacatgatgcttctatttctgggtcaaaggcagatacgttcattatagtcatagcccagtcagcaggaaggaggaagagagagcacagggaaagcaatttgtcagtaaggaggtagactagacttagaccacaaagccacacctagaacaaaagaagctgaaaaaaaaagtcttgccctggatggtatcatgcccagctaaaactcacggtgctcaattgttgaaaagaagaatgaaagaatgaatggggggcaaatattgctgtctgtcaccaaaaccaagattcttgggccagctgtacccattgtccacacttatttaccttaattcactcttttattaaaacaaaatatactttcttattttgaagtatacatatagagaagtgcatacaacttatatgtacaatttaacaaataaacataaagcaaacatccacttaaaccacctaggttaaggagcagcacattgtcagtaaccccagaagcccctaatgcatccttctctccccactagaggaataggctatcttgacttttataataatcattacattgtggttttaccacctacatatacatccttaaacactttagttaattttgccatttttgactttttgctaaatgttccatgttcacttgaactaaaaaatgtatgtatattacatttttgtcattttcctgctcaaaattctttcattattcccattatacttggaataaaatttgacaggttacttgtatctctttacctgtccatcctcacgttttacctcacgtggtaaaacttgccttctttcagtgtctcacacctgccaagccctttttcatctcagggcttttgcctgaaacgctgttctccctattctctgtctgaataactcttagtcatccttgagatttcaattttaaggtcacttcttcaaagaggcctgctaaccatccagtctcaatgaaatctgttcattgtattccctcttggccctctgtagtttttcttcatagaacttgtttcagattatcactgtatatttatgtgtatgaatattttaacatctctctcctccataagctagtggccttcatgaaagtagtctgggtctgtttaattcatcactaaatccacaaaatccagcacagtacttggcacataagaaatatatttgttgaaggaatgaataaatattttaatcattctttaagtatcttttctcccaagtagtctataatcatcttgagggccaggactaaaaatgaattgagttgaattaaattgaattgaggagcagattgggactaaattccatgagaaaaaaaaattttaagtcaggacgtatgaagaaaaagtaccaagtaaaatgaattcattaatgctttaattaaaaatataaccttcaaagaaaaaagtgcagtatgttataaattaaaaacacttatatttttatggctcagtcatacagattaattaatgtgttattattaaaacctgaaaccttgaaaatccccaaagagaaaatccttaaaaaccaaaaagcaatcatgatgtgaagccagtaggtagctaataaacttatttataaattgtttttctgttttctatcatcttgtctgaggaacttcttattaattactgactgagggtgccactcctcatcttttaagaattgtgccattatgttttctgtgtacctttgctctagagtattttccagcatttgtatatttgtgcaaaaataataactgtttcatcttaaatttcaatgtaattttttttctatgcatatgaatgccaggtggtaatttcaatgtattttaaacatctttttatgtatcacatatttgatgatctctaaatatatgctatttctcttttctaaactagtgacatagtactacagatgaattttttttcttgaatccttgttcaccaactgctcagtgaattcattcactttagcattttctgttttcccctctctgtttccatggagaagtatgtcagtgatgtgtttgactccatggaaacagatgagtgtctctttctacatacacaacgaattaaatcgaacactttctgtgctgcccattgtcctggaggaggactggagaggccttctctgaatgaaacatcatttcagtagcaattcttagtgtttaacctaatacagtggattaatgttttaccataacttactgcttctagattcagatgtattagggcttacttctgagccttaaaatataaacatacatagtaaaatctgaatatgctatggttctcatttatagatatttagctttttctcttaacaccaaactcaaataatttgaatgaatactagaaatgtaattgagaacagaatttagtagattcattttaatactatacagtgtagtattggtagaaaaaagtatagattttagagtcagataaacctgagttttaagttctaactgttatttattagtagtaatatcttggctaagccatttaatttttaagcctcagtttcctcatccgtaaactatagattataatatttcacttgtgtgagagttaaatgaaataatgacagtaaaatatctagcatggtacttgacacatagtagacaataagttaatatcctattactgttattgttatgtcagcttagactaaaataatcaagtttttcatagcttcagatgtctcaatatgaaagagcactaaatgcaacaaagattaatattgtgggttttttgtgaaaactaaacaaaataatttgtaaatatgcatggtgtgtaatgatcaatgttgtcattactgccaataatatttgaggtcgcttgcagtggtatcgtgaccaggaagcaccattctgattctactacaacttttgtttcactgtccatgttctgagcagcataatctctctaaatcatttcctctacttgtttatttatttatttatttttgagatggagtttcactcttgttgcccaggctggagtgcaatggcgtgatctcggctcaccacaacctctgcctccctggttcaagtgattctcctgcctcagcctcccaagtaactgggattacaggcatgtgccaccatgcccggctaatttgttgtatttttagtagagacggggtttctccatgttggtcaggctggtctcgaactcccgacctcaagtgatccgcccgcctcggcctcccgaagtgctgggattacaagcctgagccactgcgcccggcctctacttgtttttaacatcttctgacacagtatttagatacggaagtgagcctcataaatgacagagtagaggtactatttcaggttacttcttcccttacctcaatccctaccttaaaagctagagtcattaaatgtttttaaaatgcttgcctacatgcaaatgtgtttataaatatacttaaatgtttatgcatccatcctaacaatagtaataaaattagctaacatttataaagttatgttttatgtgccagccactgtattgtttggcaactcattaacttaacagtgaaataatatgaagagtttggggtattagtattaccctcatttttaaataaggaaattgagatgcagagaggttaagtaacttgtctaagaagtatcagaactgagattaaagccaagaagtctgattccagagtccattcttttaactgctaaagtatgggacctcaatgtatgggtagatatttttgtacacacgtgcactttcatatgtataaataaataggaatgagaaagataagaaagaaagaaccgattaggtgtgaaccttgcatgatgaaatgaatgattatctagatgggatttttcttaacatttttgtgctatgggcccttctggcaatctggtaagcttctggactcctcagaacaaaaatatatgtatatttttaagagctgaaatgcaatatagaggattacaaaggaaaccagttatattgaaatatcaaatatttttaagttgagacataacaatattctgccataattttttatgaatgtattaaatagcaaggtgttggggcaagtcttacagctatgataattttgaaatagcagtgagtgaaaatgatattttaacatacctgcacaaattataagttatagaaatattttataaaatctcaagtcctctcaaaatacagtatgtctcatgttattattattctcattttgcatgttaggacactgagactcagaagttgagaaatttagttgcacagttaataactggcaaagttgagcctcaaaccaaattatctgatgatgaatcctatgttctttccattgttcccatgttgtcactctataacaataagcagagattttttaatgacagcaaaatgccttcccaagattgtaacagtataaaatatgtaaagtaagaagtgggtgaaatcagatgaaataaatacatcttggatgccatgcaaatataacattttagaacaagcaaataagatacaaatagagactactcttgttacttgtattgggcattgtgttgctgtagctattgtgcggactagcacaactataactgcaagtgacagtcatttcctctaactgctagagttggcgctctggtttctgcacataccagcccattaaccatatgtactcttatgcttccacaagccttaaaataactgaatgcggtagagcagtggctttccagtcatgcttccagctcagctttctggactgtgttgagacagagcacaggcagaatgccagccacgttgagcaagcaccaattggtcatggattagaggccatctccacagttgccagaataattagcacaacacagcacagtagccagctgctttctatattaactgttcctgacaggaatgcaaatttaaatgcactgccatccagtgaatattagtttacatcataagctctacgtttgtacaacatgttacaattaccaaatatttccaaacaatacattgttttattggatcatcaaacaagttgcggtgtagattggacaagtattagctgaatgttataagtgaggaaactaaggaagagagtagggtggatagataaaggcacagacctcgctcagttactggccaggaagcccagaacctaatggtaccctcattattcagaaactagccatgaagccactgtccccctagagctactcaagacaggacctaagtgaggttgaatgctgctttttctaatcatttaggggatatatactttctttctttctttctttctttttttgagacagagtctcactctgtcacccaggctggagtgcagtggtgcaatctctgccttccgggttcaagtgattctcctgcttcagcctcccgagtacctgggaccacaggtacatgccaccatgctcagctaatttttgtatttttagtagagacagggttttgctatgttggccagactggtctcgaactcctgacctcaggtgatccacccgcctcagcctcccaaagtgctgggattacaggcatgagccaccacgcccagccgggggatatatactttcaatttcctcaaatagacaaattttgccttataggcacaaaatattggattgtggtgacataacccaataacatcttctcttctgggaaatacatatatcggttacaaagaaacaatgtatgtcagggaacaaagagaaggcttgaagtttccctgtatcttatataagacttaggaagatgacaggattgacctaaagttctgtgtccttgaaggtgagttgcctattaaccccatgatgctgactctgctttgaccctgaggagcctaatcaattaggacaggggtgttcaagcttttggctttcctgggtattggaagaagaattgtcttgggctacacataaaatacactaacactaacaatagctgatgagctaaaaaaaaaaaaaatcgcaaaaaaaaaaatctcataatgttttaagaaaaattataaatttgtgttgggcagcattaaaagccttcctgggctacatgtggcccacaggccacaggttggataagctcgagttaggattatcccagaatgtgagatggcctctgtttctcagcacttactcttgtgaccatagttcctaatcctctcctttactaaagcttctaaggaggaatgtctctctaggcagaaagtgtaaatgaattactgttatcttgctaatactagctactactatctttgcttaacctaacaagatgccagtagagactgccctttaatcatgaaagacaactagagactagtctcattatggcatattctctataagtatcactgactccagaaggactcaaactgataaaaggaacatgctcttatactacattttagttctgttaatgagtttcagtttaaataaatctttatctataaatacagtgatagaatctttggaatcttctagattagatattgaaggctctagtacaaagaatatactgttgtactacacagagtcttgtgcataagggcttctgttattatatgtgttgaatccaatgcaaaatttgcctccatcttcaaaaaagttctgaaaaagaatatctgcctcctctaggagttacacacaacctgaatacatctgtaaggctctttcaaatttccagagcaatgacctttcttgctttttaccagcgaagtaaattgctgaaaagctaggaagtctttctgggttccagcgtatccaagattaaaatatatgtcgaagtattgcaaactaaaacagtagcttagtttcatgcccaaaacaacccaggcatttatctggtgtcttttttgtttgtttgtttgtttgtttgtttgtttgttttagttttaattgatacatactaattgtatgtgtttatgggggtggagtgtgatgttataatacatgtatagattgtgtaatgatcaaatgatgatatttagcatatgcattaactcaaacatttatcatttctctgtggtgagagcattcaaaattctagctattttgaaatatgcaatacagtattgttaactatagtcaccctactgtgcaatagaacaccaaaacttattccttatatctaactgtacccattgacatttctagcattctattttccaaagaaaacactttcattttgtctattcacttcctccattagcacagttcaggccaagataccttggaagtaactggcttccctcttgttcaacccagatgtaattaccctcagctagtaagagatgaatacttgatgattatctgtaacaaaagtggcaacatttttttcacttacaatacatagctggagccatggcatcttttgtagttattgtttttaactaaaatttattgaggtatataatacagtaaatttcacccttgttcgtatacagttatttaattttgagaaatatataatcatgtgatcaccatgaccatcaagataaagaacaattctatcatgccccaaaatgttagaactgtgtccttttatagccagtttctccccacattccacatattccagtccctggtaaccactggtctgttttctgtctctatagttttaacttttccacaatcctatgccaatgtgtcacatgatatatatgccctttgaggcagatttctttcttttttttttttttttttttttttttttgagacagagtctcactttgtctcccaggctgaagagcagtggtacaatcatgactcactgcagcctcaacctcctaggctcaagcgatcctcccacctcagcctcctgagtagctgggactacaggcatgttccaccatgcccagctaagtgtgtgtgtgtgttttgtagagatggggttttgccatgttgcccaggctggtctcaaactccaggcttcaagggatcttccccccatcagcctcccaaagtgctgggattatgggcgtgagccactgtgcctggtgaagtggatttctttcacttgacataaggcatttgagaattttccatgttgttgagtggatcagtagttcattcctttttattagtgagctatattccattttatggatgtactgcagattattttctcattttgcagtttaaggacaattgggatgtttccagtgtttagcaattatgaataatgctgccgtaaatattcacatacaagtttttatattaacttaaactttcatgcttttatttctcctgagtaaacacttaagtgaaaaattattaggccataattattaggctacagttttaatagtagctataccattttgcatttctaccaacaatggctgagaattctattaatagttctacaactaggttctacatccttaacagcatttggtattgtgaagtttgcttttgattgttttcattttagccattctaatagatgtgcagtggtatcgcattataggttaagtttacatttccctgtgtgttaatgatgttgagagtcttttcatatgcttatttagtgaaatgtctattaaaaccttttggccaccgtttaatttctctttttttattttatttttattttatatatatatatttttattatactttaagttctagggtacatgtgcacaacgtgcaggtttgttacatatgtatacatgtgccatcttggtgtgctgcacccattaactcgtcatttacattaggtatatctcctaatgctatgcctcccccgtcccccgaccccacaacaggccccagtgtgtgatgttccccttcctgtgtccaagtgttctcattgttcagttcccacctatgagtgagaacatgcagtatttggttttttgtctttgctgagaatgatggtttccagcttcatccatgtccctacaaaggacatgaactcatcattttttatggctgcatagtattccatggtgtatatgtgccacattttcttaatccagtctgtcattattggacatttgggttggttccaagtctttgctattgtgagtagtgccacagtaaacatacattgtgcatgtgtctttatagcagcatgatttataatcctttgggtatacacccagtaatgggatggctgggtcaaatggtatttctagttctagatccctcaggaatcgccacactgtcttccacaatggttgaactagtttacagtcccaccaacagtgtaaaagtgttcctatttctccacatcctctccagcacctgttgtttcctgactttttaatgatcgccattctaactggtgtgagatgatatctcattgtggttttgatttgcatttctctgatggccagtggtgatgagcattttttcatgtgtctgttggcttttaatttcttttctttcttttttttcttttttttttttttgagacagggtcatactctgtcacctaagctggagtgcagtggtgcaatctcggctccctgcaacctccgcctcccgggtttaagtgattctcatgcctcagcctcctaagtagctgggattacagacatgagtccagccactgcacctggctaatttttatatttttagtagagatggggttttgccatgttgcctaggctggtctcaaactcctagactcaagcaatctacctgcctctgcctcccaaagtgctgggattacaggtgtgagcactgcacccagcctaagtttcattatccatcttattattctattgtaaaagtttttatttattctggaataaaaggccttatcaaatatgtgttttgcaaatatttcctcccaatttgtggctttttaaaaatttttcttaattgtgttttcaaacacaatttctttatttggatgaaatctaatttattaatttttatggattattcttttgtatcatatctaagaaatctctgcctaacacaaaatcaggaagattttcaccttcaattgcttctaaaagttttatatagttataggttttatttattttttatttttttaacaggctttattcactttatttttcttgtataaaaccctatgttgtagccacagctggagcctgagtccgctgcacggagactctggtgtgggtcttgacgagttggtcagtgaattcctgacagggagacttggtaaatacaatcttccagaggtcgggggtcaggtagctgtaggtcttagagatggcatcaaaggtggccttggcgaagttgcccagggtggcattgcagccccgggctgaggtgtagcagtcatcgataccagccatcatgagcagcttcttgggcacaggcgccgagacaatgccagtgcccctgggtgcagggatgaggcacaccagcacagagccgcagcggcctgtcaccttgcaagggacggtgtggggcttgccgatcttgttcccccagtagcctctgtgcacggggacaatggagagcttggccaggatgatggccttacggatggtggtggccacttccttggagcacttaacacccagaccgacgtggccgttgtagtccccgatagcaacaaacgctttgaacctggtgctctggccagcacgggtctgcttctgcaccggcgtaaccttcaaaatctcgtccttgagagaggcccccaggaaaaagtcaatgatctcagattcattaatgggcagggagaagagacagatttcctccagggacttgatcttcatgtccttgaccaagcggcccagcttggtgacgggcatgcactccttatcctcggccttgccttctcgagctccacggcctcagcccgggccccgtccacggccgcaaccccggccccggatgccactgcggaaacctccgcggaagccaccgcggttccccatcccagggccaccagggcctccggccccccgccccccccgcccacctcccgctgcaccggcgttatcagccatttggtgttttctcggagaagaagcagttataggttttagatttaagtttatgatacgttttgaggtaatttttatatatggtgctattatggactgaatatttgtattcctccaaaattcatatgtttgaaaccctaaccctcaatgtgatgatattaggaggcggggtctttgggagataatttaagtcatgagggtttagccctcgtgaatggaattaacacccttataaaaggaaccccagaaagctctcaagccctctttttcatgtgaggatatcagaagtcagcagtctgcaactcagaagagaggcctcaccagaacctgatcatgctggcatcctgatctcagacttctagcctccagaactgctaggcacaggtgcataccaccaagacagattttttctttttttttctttttttttttttttagatatggggtcttgctatgttggccatgctggtcttgaacccctggcctcacgtgatcctcctgcctcaacctcccaaagtgctgggattacaggcaggagtcaccattcccagccaatttttgttgttgttgttgttgttgagacagagtcttactttgttgcccaggctggagtgcaatggcaatatctcagctcactgcaacctccacctcccgggttcaagcgattctcttgcctcaacctcctgagtagctgggattacagacgcccgccaccacaccttgctaatttttgtatttttagtagaaacggggtttcaccatgttggccagactggtctcggactcctggcctcaagtgatccgcccgcctcagcctctcaaagtgctgggattacaggcatgagccaccacacccagccccaatttttgttttttataagcctcccagtctatggtactttgttacagcagcttgaactgactaacatacaaaatataggttgaaagctttgggtttatttttgtttttgtatatgtttttgtttttgtatatgaatgccaaatttttccagcaccatttattattattattatattattcactcctgttgcccaggctggagtgcagtggcatgatctcggctcactgcaacctctgcctcccaggttcaagcgattctcctgcctcagtctcctgagtagctagaattacaggtgcccaccaccacacctggctaatttctgtacttttagtagagatggggtttcaccatgttgaccaggctggcctcgaactcctgacctcaggtgatccacccaccttggcttcccaaagtgctcggattacaggcatgagccaccatgcctggtctttccagcaccatttatttaaaagattatctattggtttgcctttgcatctttgtcagagtcagttaatcatgtctgtgtgtgtctatttacatactctcaaatctgttctattggtctataagtctatttctttgccactaccacattctcttcattactgtgggtttacaatatgccttgatatcatacaatgtgagttcttcaactttgttctttttttcaaaacctttttattcttctacttcttttgccttttcataacaattttaaaactgcacattcatttctacaaagattgctctgggaagtttttaacaaattattcttagtagtaccttatagtggggattaattatgaatttaatttaattttttaataaagtactatattaggtttttattgctgtgtaacaaattaacacaaacttagcttacaaacaacaaacatttattacttcacagtttctgtatgtcaggaatctagacactgctcaagctgaggcttttgctcgtggtgtcacaagactgcagtcaaggcgtcagccagggctaaggtctcatctgagatttaggattctctccccactgcacattggcagaattcttttttttgagacagagtctcactctgtcacccaggctcgagtgcagtggtgcaatctcagcttcactgcaagctctgcctcccgggttcacgccattctcctgccgcaggctcccgagtagctgggactacaggcgcccgccaccacacctggctgatttttttgtattttttagtagcgatggggtttcaccatgttagccaggatgtctcaatctcctgatctggtgatctgcccacctcggcctcccaaagtgttgggattacaggcgtgagccgctgcacctggtccagaattcacttttttaaaggtacttaatatgtcaaccttattgtttctctatatgcacatttatttgttactgaaaattgaaaaaatagcatgttggaattttcttttaatataattcaaatttttaaaaaccagaaaatctaattagttatgctctaatcaaacttctcaatgttttcttttcattctttccccacaagttaccgtgcttcaaattccagatgttgggattcatctcactgacttaggttctaaaacatatgggagccctgtgtggtggcttatgcctgtaatcccagcacatgataataattcagacttattggtgctgctttgggttcaaattaaaaagtagagctaaagtatattcgagttattcaaatacattcaaacttacacagattccttataaattactgctatcaaggtaagaaggaaaagatacaagaagaaaaagacatcactcatgataggttattattggtatacagtctatcctagcatagactgctgcataaatttgccagcaagaaagaaaagtacaagaataaagtttatgactaaatcacctcattgtcataatttcctattctagcattctcagaaggatcccatctatgatacatgtagaaactgcagccacatttgaatggttcaattcttgattcattctgaaccctcttaggcccaatatttgttagctttcgtttaagctgagaaaaatctgttgagtaacaggtatctcagttttaccatcctttctttccacaaataacgatgtcctttttcctctcctcctgtaaggcaaaccatctctgatgtcctggaaggtctttgcttttctatcttgttgttggggtgaaccttctggtggaggggaagggaatttggtacctgggtggagaatcaagttatcaaggttctttattaacgttttggagcagaagttgtgagaggcctctgaatcatcctgggaatctttctttggtgagcatttgtgaagactttgggatcaaggtgcacatttgtgatgagtcgatcaatggtctagtcatagctctaagctccttctggatctttagtcccagcagaatgtgttgctgaactctcaaattgctacaaggtaccctggaaagaactatgtagcccagaaagagcctgaaaacctaaactccaacaaatagtgatgaacaagttgactacagtttttttttaacaattttaaaattcattgcagtttgcttctccaaggccagcaggaaagtgtctctgctgcttcaaatctctacaatttctacctcggacctctagacactcttttgaaagactcacctgattaggtgaaagcaacccaaactaatctctcttgattaacttgaagttaaatgattaagagacttaattacatttgcaaaatcccttcatatttgccacataacaaaatctaatcatgggagtgacatcatagtcctgcccacactcaagaggaagggatcatacggggcatgtataccaggggctggaagtcttggatgccatgttagaattatcctaccacaagtactgttgagagtatctatatcttaagtggactttgaaggagtatatcttccaaggaatttatccatttcacttaaattgtgagtttatagcatatgacattctcttatttgccttttaatatctgcaggctttgtagtgatgtcattcttgatactgggaatttgtgtctgctctgtttttaatgatcaatctgattagagatttattaatttaattttccaagaaacaacttttagcttcattgattttctctatttttttctgattttaatgtaattgctctctgttcttatttttcttatgtacttccttctgcttgttttgggttaaatttgctcttctgttttagtgttctaaggtagaagcatagataattgatttgaaactattcttctattctaattaaaagcattcattactatatatttccttctaagcttccctcatgtgtggtgcaagaaccttacaacaacatgtttttattcatttaattatgctttttaatttcccttgagattttctctttaacccatggattatcttaaatattttgttatttcttgttattattctgttattgatttctagtttaattacactgtcatctgataatacactttgtatgacttcacttctttaaatctgttagtattcattcatgacccagtatattgtatattttggtcaaggtcccatgggtgttttgaaagattgaatttctggctgtcattagatgaagtgttaaataaataccagttggatcctgttgctttatttttgtgttcagttcttctgtgtccttgctgattttcattttagtggttccagcaattattgagagaagagtgttgaagttaccaattataattgtgttttcaagtgtttctttctattctatcagtttttgctgcctgtatcttgaagctctgtgatttagtatgtatacatttaggaattttatgtattcttggtgaattgacccttttattgttatataatatctctatttgtttctggtaattgtcttttctctaaagtttaccttattagatattaatatacttaactccagctttcatttcattagtatttattatagttttgctaattctttgacttttaacctcctatgttattgtattttaagtgagtttctttttttttttttttttttttttttgagacagagtctcgctctgttgcccaggctggagtgcagtggcacgatttcggcttactgcaagctccgtctcccgggttcacgccattctcctgcctcagcctccaaggtggctgggactacaggcacctgccaccacacccagctaattttttctgttttttagtagagagggggtttcaccatgttagccaggatggtctcgatctcctgacctcatgattcgcccgccttggcctccaaaagtgctgggattacaggcgtgagccactgcgcccagcctaatcaagtcttcttttatatctcagcctttttattgatgtatttacatcatttacatttaatgtaattatgaatgttaagatttaagatttccaatttattgtgtagaacactgcatgttccttctatttttcattcctgtcctcctttccgtttcttgaatatttttagtattccattttaatttatatatggtagagctttttgtaatgctttattaagatataattcacatactatacaattcaaaatttaaagtatacaattgagtgattttgtgtattcagtgttggacaaacgtcaccacaaatgatattagaacactttcattatcccacagagaaacccttcaccctttggctgttactcttcaaatttgtgcccaacccccagtcctaggcaactactcatctactttctgtctctatagatatgccagtgccagatatttcacataaatataattatataatatgtggtattttttgactggcttcttttgcttagcataatgttttcaaggttcatccatgttgagcatatactagaccttcattccttttgctgagtaatattccactgtagagctatacaacattttgtttaaccattcgtcagttgatgaatagcttatggatacttgcattatttccaccttttggctctcatgaataatactgcaatggatatttgtgtaccagtttttgtgtggacatatgtcttcgtttctcttgggtacatacttgggattggaattgctgggtcaaatggttacttaatgttttgaggaacttccagaatattttccaaagtgactctaccattttagattcccaccagtagtatatgaggattttgatttctccatattctcattaatacttgttattatgtatattttttattataaccatcctagtgtatgtgaagtggtatcttatattgtggtttttgttctgttacccaggctggagtgcagtggtgcaatctcagctcactgcaacctccacctcctgggtttaagtgattctcatgcctcagcctcccaagtagctggtattacaggcatgtgccaccaccacacccggctaatttttgtatttttagtagagacgggtttttgccatgttggccaggctggtcttgaactctaggcctcaagtgatccgcccacctcagcctcccaaaatgttgggattataggcgtgagccaccctgctgggtctatgttgtgtttttaaataaatctctttgtatagtttgttttcattggaggttttttatttgtttctgagtgtgtgtgtgtgtgtgtgtgtgtgtgtgtgtgtgtgtatgattgttctaggtattagaatatgtatacttattttatcacagtctgtattttccactttgagtacaacatagaagccttatcactaattaggtccctttacccttctttttgatatagttatcttaaaaatcacctctacataaactgagaaccacatcatacagcaaggttatctttgctttcaatcatcgaaacataactctaaaaattaaagaggataagccaggcatgcactgtagccccagctactcaggaggctgaggcagggaggattgctttagcccaggagttcaagaccagcctgggcaacacagtgagaccctcattaaaaaaaaaaaaaaaactaaagaggttaaaaacagtctattatgtttctcacatatttacattctgcttctcttttttcattcctgatgttctatttgtttcatgagtgttcatagttggttgttggagcacttttttgagagttgttttaaaattcttgtcatataattctaatatatctgtgtcatcacagtgtcagtgcctgttgattatcttttcttgtttaaattaatattttccaaacttttgagttgtttcataattttggattatatctttgacattttctgtattatgagactctggatcctatttaaatatcttactttagtaaacggacaatctgtcaaggtttagaatgaacattctctttcaattttgtggttcaaatttcaagttagttttcagagatcttgcagggctcttctggtttgccccacctctgggctgctcaggcccatttagaaccaaggcaatgatctaactatagttcaattctcagagcttttgctatcttgattctgaccagtttcacacatgggctgctcaaaagtgtcctgactttttgtaccaatttaaagaattacttcctccaactttgtcctctccatattcctatctcctactctctaattggaaaggggtaaaatactacctcattgctatcctttgcttaattcggggcattgatagtttgacagggctcctcccaacggtctctatagtgtccagtggggaaaagaggtgcagtttcttttattgtatgtgttttgagtagagcatagtcaaatggttcactcagcagagttacctgcctcccagtctttttactagagagagtagacttctcttgagaactttggcatctgtgcaccttggtgtttctggattataggctactgtagcccataatgggaggcaaaagcaaacaagcaaacagaaaacgcttcagggaacttaccaccaggttgtctctcaagttccaaagttcctagtccaagatgccttcccttctctgcctgtcatttattttgccttttgccctggggattttagttgtaattagcaggaggatgaggatgctatgtacttgctctatcttgtcatcttgtctagaaagggaaatcaactgtgatttttttttttttttttttttgagatggagttttactctcgttgtccaggctggagtgcaatggcacaatcttagttcactacaacctccgcctcctgggtttaagcaattctcctgcctcaacctcccgagtagctgggattacaggcgcccgccaccacgcctggctaatttttgtatttttagcagagactgggtttcaccatgttggtcaggccggtcttgaacttctgacctcaagtgatctgcccaccttggcctcccagagtgctgggattacaggcgtgagccaccgcacccagcctgtaattcatttttgtatcactcataaaacataccacaatgcctagtgtacaattggcattaattaaatatttgtttcaaaagacaagagtgagtgagggaggaacataagtagctctgtatctcaaaatgttagttcagcataatatgattgagtcatcagtttaaattctagccccacctactttcagtgtgaacatagactggttacttaacttatttgagcctcagtttcctataatatgacaatggtaatatctacttcttaggacaagtaaaaataagatgatatacttaagcatttagcacaatgtttgataataaacagcgaatatagttcctacttatattagtaataacaattatcaaatatcactatctgtttcttatccttataggaaactctgctcttaaagacaaagaagatcagtttgggagaacaccacttatgtattgcgtgttggctgacagattggattgtgcagatgctcttctgaaggcaggagcagatgtgaataaaactgaccatagccagagaacagccctccatcttgcagcccagaaggtgagaagtaaaatttccttgaagagtaaatgttttgtgtgatgtctgctagttgattagtggaactatgcaatggacagataataaagaagtctcaaatgcatgactcataggttttatatattttctctaaaagctgtctttaagctgcagagagtaaaagcacagataactatcagcggctgcatttcaggttcctcaaacagtagaatttattctgtgatctaaagtttattgggaaaaaagtgatcaaatttatatatacaatgtgatgaaacaatgttaccaatctatgtatagggaaaaaataaagaccaaaaagaaatactcaaagatattaatagtggttgggtttaaatttggggaatatatatggaatttttttacttttcactgtttaaaattttttccttaatgagtattacttttactataaaaagttgaaatcccagcctgggcaacatagtgagaccccatctctacaaaaaattaaaaaattagctgggcatggtggcgcacacttgcagtcccagctacttgtggggctcaggtgggaggatcacttgagcctgggaggttgaggctgcagtgaactgagttcacatcactgtactccatcctgagtgacagggcaagaccctgtctctaaattaattaattaattaatttaatttaatttaaaaggttgaaatgtcgcttgaaatatgtggcattaagaagcataaaataaatttattttctgaatgtattttcaactttttaaaatctaaaactatgttgccaatattaatgatttcacatttttaaatgtattattaagagctcagatttttaagattaaacccatcaaacagataaaataggaagcttctacatttagttaaagacttattcacctaaaaactatttttcttccataaaattttggtccataaaatagatttccagtgcctggtatttttctttttgttattttagatttctgtattttttgaataaaaagcaattaaaatgagttagatccagcgggaactattagagttattttctatttaaaaatgtgaaccagatatagctaattaattaaggggttagaaaaatacctttcattagttgaatgcataaaaaaaggctgacattaagttatactactgaatatgctagttatatgcgcttctcagttaggtctgtcaggttattttcaaagttacttctcttgaatttggtttttattatagtaatttttttaaaaatctccctcattttcaatctcagttttaactacttctcgggtatttataacctttcacttaggcttgtcagctaatgaaattattcactcgagaaaggtaactccatttaacttgttatcataaaaaagcaaatagttcagattgggaaaagccgcaaaattaagactttgataccctttagatttttcattatgattgatttaggtgtaaaactcagcttcaaaaatgtagagtgaaggaacctagcttaacatcaagtagattatgtggagcaagtgaggatttcagttgatgatccaacagtataacatcctgtagaagtattatatgacaaagatggttgaaagaaggggaatgtacaaccagacatgttagctgtaatcttttcatcagataccatgcattgttttctttagtttttttgtttctactttgattttttaattataagtttttcatagtatcgaagaataaatagaactatgatttatgtggtggtatttacatagttggttttataacagatttcatgttctttcaagtatctgataattatgcatttccttccttactctgtgttgctgtttgtttttacatgcttgccaaaagcagtaatggatccgaattcccagaaaaggatagtaataattctttagtattctcctgtgtccaattaaatctgggtactgtgttagttcatttgtgctttatacaaagcaccagcattcagagatgaaatatagtatgcaccagtcaggaataagatagtaaatgatctacaaataattttcaaataatagttggagataatatgtcccaggcctgtaatactccttgcccccaaagagacacaagcacaaattctctttagagaaaacatcttcaccttaaacttccaagattttcccatattaaataaaccaaacgtgaactgacaatgaaagatcaccaaactcataagggaacaatctactatgaatgagagtcagcagaaacaacaaacagatttagtctatgaaaaacatcagggattggcatcattagagaaacaatataaaataaccactgatggaatgcttaaagatatgaaagaagaaatcagccaagcacagtggctcacacctgtaattttagcactttagaaaggccaggcaagaggctctcttgaggccaggagtttgagaccagccagggcaacatagagagactctatttatttaaaacaaaaaaaaattagctgggtgtagtggcccacacctgtagtcctagctccttgggaggctgaggcggaaggattgcttgagccctggagtttcagaccagcctgaacaacaaagtgagaccctgtctcaaaaaatatatattttatttaatattataattaaaagaaggaatctggcagggtgcagtggctcacacctgtaatcttaggactttgggaggccaaggtgggtggatcacttgaggccaggagtttgagaccagcctgggcaacatgacgaaaccctgtctctactaaaaacacacacacatacacacacacaaattagttgggcatggtcgtgagcacgtgtactcccagctacttgggaggctgaggtggaagggtcgcttgagcctgggaagtctgcagtgaggagagatcataccactgtatttcagcctgggggactggagtgagaccctgcctcaaaaaaaaatgtaaatacataaaaaaattttttaaaaaaacaaggaatcagaaaaataagaaaccaacaagacactttcataactaggcatcaattctggccataatggcttattttaaactaatttgcctgtcaaaaaaatctgtaaaaactgaataaaatactatatacattgtttgaaggcattgagaacaatcagcacaggcaggatctaagagactacaatcattcaaagaagagaaacacgtaaagtgagtaccacattcatcctggccttttcctttatgacattttccaaactggaatgcaaaagaatacaaccctaacaggaagcagcagccttaccaggctgaagaaactgaggcagagtttggagataatagtggctggaacttgaaagtcaaaatcctggagaggagggaattgcagagaaagaatgcaagaatctggatacaaattcctcacaagtttttaacagattcctaaactgtgcttgtatagggtggtgctctaagaaacctagtattaaacaacagctgggagactagacagctgagtagagattattttaaattatcctatattttcttttatgtttaaatctcttaatatataacacattgatttttgtatggggatccattctcattttaaagcatatggataactaattttcccaacacaacctagttcattaatttttggccatttagtatctgctctctgtcagttccaggcttttgtactacgaactccctatgcatttctgtttttttaaatgagggatcctgaatactagggagcctttgggaaatttgaaaataaaagttacatgatcagtgtattttagggggactaatatggcaactaaagctactttggaagagaaagagtggagatacatagattgctattatagttcaggccaatagagaggaattgggtttaagagatacattatggaggcagaagtgttcattcaacaagcgtttgttaaatatctactatgtaatcatgattatacaactagagagaatatgaaaaaaatgaattacgtatgttagcttatagatggatgctctcagtacccatccctattaatcgtcatttccctttgtttagtgaaccttctgatatattggatatcaaatatcctttccaagtattgtctgtcccacttaattctggtatccatgaatgcagaagtgtgctatttatgtaatcatgaacactcatgtatatgtgtataccttcattcattcaacatgtgttaaaactattatgtaacaggcatcatgttaggccttggaacacaaaggtgaacaacatgattcctgctcttaagttgcttacaaagatcatggatgaagatattaaatgataattaaagctgattgatctaccttgtaatacataagtgttttataaaatatctatagccataatagtcattgttattattgacatgagaagaccaaacattctcatacattatttattatgtttctagtttttgtgtgtgtgtgatagtgaactgtattatgttatcttttcttgggttcattagtgggaaaagctcatattcccaaagcattttgctcacatctctattagagccccattaccttatattgtaattattgcttacttgtctcttttctactaggctggagctccaggcaagtagctctttttgtttgtttttgaatctctctgaatctagtaagttctgacatgtcttggttgaatgaattttattttacttttatagaaagtcattactaatacaaatacgagaccttttgtttattggaaacatttatctactttaaaaatatatatgtttgtggaaaaacttattgaactgtgctgcttggcttagttattttggcacatgttcacttctctggaaacaaattactgttagtccaagaaactgaagaaatggtacccatgagaataaaattaatctcaatatactgaacatctgcacctaatttgtttttcatttagaaccatcagtttaatccaagaaagcaattggtcataccttttctgggcttctcacaaaagatatctaattgttagaaatgttttgctccagggaggctactatttctctgacttctactgatacatttgttaataaggataaaaaagctttagaaatattagtatatgttaatagttatgcatgtttaatcttccaggaggttatttatttggcttcaagaagcttaagactacccactttgacaaattatatcacagtaaacacaaaaattaaagaaccttctggttgtggctgcattgtcctttttttaaattcataaataattctcagttcatctatgaaaattgaatgtttattttcagttttcaaggtacgctgtttccatgttactgatttacaaaaaggagaaagaatacctctgaaacttttcaggaacacttataccaggtaacactattaggttttcttattttgcagatgcacacacaaacacaacaaacaatccacgccccagtccccttcagctctgtattccccctcagtacatatatagctctaccataactcatcaccacagtttattggagattttgtttatctaggtctcacgcccagtaaagctatttgaaggcagtgaccatgtcttatttgatttcatagttacagtcctagcatagcttctgccacttaataaagacagtaatttatttaaggaatacatgaatgaatgaatgaatgaatgaatgaatgaatgaatcagtaaatgtgaatatcaaatagatttaatatgaagggcatggccttcaagactgttgaaatttaaatgaataattatatttattccttttcactatccactccctgcccttacaattttgcaatcaggattttttaagattttctgtgagcttaatttcttaataaacaatgctcttgtatgcctcaatttcttcatctataaaatggaataatacatcctatcttctatgtagggatgatgagtccttagatataaagcattctgtttgttggagaaatttattctcaaggactacattatcaatattattgctattagtcacactacaatgtaggtgcaaacatcaaattactgtttagagatcagcagatgtcagagatagaaaggctctttgggatcttcttgtccaatttgtccttggatgaggaaactgaactctactccttttacatctcttctctttaaaaattactgtactcacattctctttgcctttgcatatgcctggaattttttttttttaattatcttaagcatagagataagaaagaacagggcctggtgccatggctcacgcctgtaatctcagcaatttgggaggatgaggcaggaggatcacctgaggtcaggaatttgagaccagcctggccaacatggtgaaaccccatctctactaaaaatacaaaacttagctgggcgtgatggtgcgtgcctataatcccagctactcaggaggctgaggcaggagaatcgcttgaacctgggaggcggaagttgcagtgagcggatattgcaccactgcactccagcctgggcaacagagtgagactccatctcaaaaaaacaaaaacaaacaaaaaacaatggagaactgagaaaacattaggtacctaatacctcgaagagatcaaactcagtatttcttatttttgcttcagaatttttaaacaaaactatagattcacttgaagtcttccatttatcttccaaaacccttctttccctgtctcctcagtctgtcttgattttgttggtttcaattcccatgcatatgtttctacctttactttatgtgtgtgtgtgtgtgtgtgtgtgtacatgtgcacatacactattatgggtaaaccatattattttgcatctttaaattaatggtattatactgtgtgacatttaccaacttgctttttcaacttaatattatgtatttgaaacttcttcatgttgaaacatgtagccctatttcataaaagattatatccagatgcctaaaagacacatgagatggtacacaacatcattactaattagaagcaaattaaaactccaatgagatactactacatgaccagtggaatgtataaagtaaaaaagtctggcaatcaatattgattgatggtgaagatatggagcaactggagctccccaacatttttgttgagaatgtatattggtacattcactctcgcaaactatctgactatatctgccaaagctacacacacacacacacacacacacacacacacacacacacatacacacatccctcatctcaattcatgctcccagccccggtaatacctaagaaaaataagtgcctctttctactagaagacatgtatgagaattacatgatagttttatttagaaaagcaaacattcctttttttaacttctatttttccataagttattgggggtaaaagtggtatttggttacatgagtaagttctctagtggagatttgtgagaacctggtacacccatcgcccgagcagtatatgccgcaccatatttgttgtcttttatcccttgcccccattccactcttccccccaagtccccaaagtccactgtatcattcttaggcctttgcatcctcatagcttagctcccacatatcagtgagaacatatgatgtttggttttccattcctgagttactttacttagaataatagtctctaatctcatccaggtcattgcaaatgctgttaattcattcctttttaaggctgagtagtattccattgtgtatatctatacaccagagtttctttatccactcgttgattgatgggcatttgggttggttccacaattttgctattgtgaattgtgctgctataaacatgtgtgagcaagtatctttttcgtatgatgacttcttttcctctgggtagataccgagtaatgggattgctggatcaaattgtagttctacttttagttccttaaggaatctccacactgttttccatagcggctgtactagtttacattcccaccagcagtgtagaagtgttccctgaacgccccatccatgccaacatctactgtttttttattctttgattatggccattcttacaggagtaaggtggtattgtgttgtggttttgatttgcatttccctgatcattagtgatgttgagcattttttcatgttttttggtcatttgtgtaacttctttataaaagcaaatattcttaatagtgcagacaacccaaatacgtaccaacaggtgaatgagtagctaaattgtgatgtattcctacaatggaacactgcatgaatgaactgctgacacgttcaaccacataagttaatttcatagacattatgttgagtggaacaagtcagacacttataaaaaatttatttgctgttcatatcaacctcaggaacaagaaaaactaatctatggtgagtcaaatcagatttgtggttacctaaaagatgggtaatatactgagaagaatatgaataagctttcaggggtgctgaaaatgttctggatcggtgtgtgtgttggttacattaaaaggtaccagtctgtatgcttaagatttatgcactttactgtatatgttatattctcaatttttaaagtattatttaaaaaatgataaaatgttcagaacttggtagacattatttgtagggaaggtaagggaggacggaaccaagaatggttcctgacctagactgttaagcactcaggtcaaatttcccccatccttagcctcaggagctatatgaaagccctgtgtctatgctcttatccaggggttcttagatgaacatgcagcagaatcacttggagaacttgttaaaacatagacgtctgggccccaccaccagtgtttttaattcagcagggctggtgtggggccagagaatgtgcttatctaacaagctcccaggtgatggtgatgatgtaggcaacacactttgagaatcactactctattctgcttataccatttgtctttgctgcattttcaatgctattggctccataacctctagatacctatcctgttttactggggactcttttgactggtattcctagctcttgatgacatgactcatagaggtaggatatactagtccaggtacaattttgagaggaagttatcgagttcagttgtgaaaaatggaattttaggcttcggtgataatgactagtatgaattgtgatagtttgcatctccaaagtaaggtcttggctggagttattagtatacatatagaaaccatagaagtagttgaagggctcaggtatggtttatagatgggaagaggactagaaatagaaaacaccaatatttaaggtttatttacagaaaataaacttacaaaggagacagtacaagataggagaagaactagatcagagtggtgttatggagccagagggacaggtttcaagcagaagaggatccatttgtttcatcttttttactatgatgctaagatttgaatagttccttttccactaaatgactcaataaatggatggatataaatatgataagaattaaaaggcttccactggatttttcagttagaaagtgaccttagcaagagcaatggtatttagtggacacacaagctagatatatatcactgttgagtaaacaggaaatgaggatatggagacagtacgagtgattgattaatggggttattgatcaggaaaagtatggacggaagaaattgtggtgggaaaatttttaataaataataatctctcccagtataaccgtcacccactttcaataaatattaattcataaacttgtttctgtagacttcaaactgttttattatatattctattatttcatccataaatatttcagtatatttataattcatatatccccacgatatcattgtaccaaaaagaaattagtgataattctgtaatattattaaatacctaatcagtgttcaaattttcctgattatatctcaaacatttttttacagttgatttattcaaatcaggacctaaacaaggtctatacattgtatttggttgataagtcttttaagtctcttgtaatctaatagatgagagatatttgaacacgtttaaatgttaaggaaaaggagacatcaaaaatttaggagaaagaatggattattgatggatcaaagtcgctggggagatgggaacagaaaggacagtcgggtctgggcacagtagctcacgcgtgtaatcccagtgctttgggaggctgaggtgggcagatcacctgaagtcagaagttcaagaccagcctggccaacatggtgaaaccccatctctaataaaaatacaaaaattagccaggtgtagtgacacacgcctgtaatcccagctgtgcgggaggctgaggcaggagaatcacttgaactcaggaagcagtggttgcagtgagccgtgatcgcgccactgtactccagcctggtcagcagagggagactccttctcaaaaaaaaaggacagacagttggaaagtttagatacacagtaggaaagtttgttcaatgaatgagtatgctatgaacttagaatgtatctgaatattcttgacaatcaattataaaatatgaaaactggaagggccttggaaattattcttattttacacatgggaaaacaaggagttctaggttttcttttgattagagggagatgttttgtccctaaagcaggggagactggataggaaaggaaaccttaggaatataggggaccactgctgctcctctcacacctccccagaccctaacacccttggttccattaaactcctaaacttgggcttcaggaacagaggaagtgagaaagctagtgtttaatgataacttgttttttcactgcataacaaggaccttgttattttctggtgctctgcagagtaaatatagcataatgaaaaagaaatggtatctggtatcagaatttataagatctatattcgagtcataattcaaagacatttggtactctgtgaccttgagcaggtagtttaactctctaagcctctgtaaaatggagataatatttctaacatacttacatcataagattgtaagtatgaaaatacattgaaatactgattgatgtgtatgccaaagaccctgaaaggcagcaaagttatacatagtgtttacaaatatatatgagtatgaaacatctgaaaaccatataaataatctcttttgcaaatataggtactttttccaattgtatttaaaagttgatgtgattaattgatgtgattaagaaaatggcatttcatttaaaattgtagctgaattcaattctcatattttttcaatgaaccaacaaatactaaatttaaacattaaggttctactgaattttttgtaggatttttttgctgttttttaactttaaaaagagttaaactttaaaagactgagagtcaacgtaataatatatgtgtataaagtgctttatttataagtaactttaattgagaataacagcaagtaggtatagccatctagtgactttaactttctttttaaaatatatgtaactcctcagccaggcatggtggctcatgtctgtaatcccaatactttgggaggctgaggcaggtggatcacctgaggtgaggagttcgagaccagcctggccaatgtggtgaaaccccatctctactaaaaatacaaaaattagctgggcgtggtggcacgtgcctataatcccagctactcgggaggctgaggcaggagaatcgcttgaacccagtgggtagaagttgcagtgagccgagatcgtgccattgcactccagctagggtgacaagagcgaaattccgtctcaaaaaaaaattttatatatatatatatccttatacatttaaccctcagagcaacatctttttattctttaattggaaacattagatttgagttgaagaaacattatcatatacttcaaccattaatgtttctgtacccagcttctaccctttccggctctgtcatttgctcaaacaaatctgtcttatttaaatcaaaagagttgcatataggcacttttgataaagagtctttaaccttgaaattttattgatttcgacttttgtttttaaattatttttattgatggtttccttttttttttttttttttcctttcaagagagagtctcgctctgtcacccaggctggagtgcagcagcacgatctcggctcactgcaacgtctgcctcctgggttcaagcgattctcctgcctcagtctccgaagtaacagggattacaggggcctgccaccacgcctggataatttttgtatttttagtagagatgggtttcaccatgttggtcaggctggtcttgaactcctgacctcaagcaatccacctgcctcagcctcccaaagtgctgggattacaggcgtgagccaccgcgcccggccttattgatggttttccttgtcaaaacattatttaatcaaaacagatgaaagcatgtagggagagatttcttttacaaacatattttgtgcttctttgttttatattatagggtacagaaatgacttatttgttgttgttgttttcatgatgcacaatgtgacctaatttacctaggcttactcttttctcagttctcgtacttctgtgtttctctgattcattgatatattgaccacttgttcatttcagaattttctctggactttgatactgcagtaacttatttttctgctactcctttgatagttcattgttttctttattaactcctttcctttaactcccatttctgccccaagataaaagtctttctatatattctacctttcagaggtctcatctacttctataagtttcggctattttccctcaaatatttgtctctagccctagcctctccccttattccagacttatatttccagctatcttctagaaatctctacctggatatcttcccaaaatctcaatttcagcatatctgaaacaagaccttaccttttaacctgtaatcagtcccgtcatctgatttttaaaaacaatttattgaggtgaaatacacatagcataaaattaaccctttttttgtggggggagatagagtctcactttgtcacccaggctggagtgcagtggtgtgatcagggctcactgcagcttcaacctcctggattcaagtgatcctcctgcctcagcccccaagtagctgggactataggcacgtaccactacgcccagctaatttttgtattttttatagagacaggggtttcgccttattgcctgggctggtctcaaactcctgagctcaagctatcagcccgccttggcccaccaaaatgttaggattacaggcatgagccaccgcacccagacaaaataaccactttaaagtgagcaattcagagaaattttgtacattcgttatgttgtgcaaccactacctctatctagttccaaagcatttccatcactctcaagtaaaaccacttatccattaaacagtttgtctccattgccctctctccctagcccctggcaaccaccagtatgcattctgtttctatggatttatagatatttcatgtaaaaaggaatcatatatgacctttgtttcatgcacgtctgtgtaaagagaccaccaaacaggctttgtgtgagcaacaaggctatttatttcacctgggtgcaggcgggctgagtctgaaaagagtcagtgaaggaagatggggtggagctgttttataagatttgggtaggtaaaggaaaattacagtcaaaggggggttgttctctggcgggcaggagtgggggtcacaaggtgctcagtaggggagcttttgagccaggatgagccaggagaaggaatttcacaagataatgtcatcagttaaggcaagaataggccattttcatttcttttgtggtggaatgtcatcagttaaggcaggaaccggccatctggatgtgtacgtgtaggtcacaggagatatgatggcttagcttgggctcagaggcctgacattcctgtcttcttatattaataagaaaaataaaacaaaatagtggtgaagtgttgggacagcgaaaattttgggggatggtacggagagataatgggcgatgtttcttagggctgcttcgagcggaattaggggcggtgtgggaacctagaatgggagagattaagctgaaggaagattttgtggtaaggggtgatattgtgggactgttaggagaaacgttcgtcatttagaattactggtgatggcctagatacggttttgtatgaattgaaaaactaaatggaataagagaaggagaaaaacaggtattaaaggactaagaattgggaggacctaggacatttaattagagagtgcctaaggaggttcagcatagttctgccagcaaagattatttatttacttcaagagttaagagtggcagtttggggatagctccaggagatatcagctgtgatggcttggagaaacagtgtaaaccagcagtgtaaacaagagcagggcatgtgtgagtagttgagaacagtgaataggagtatgattagacagaagatagtagggatgacaagttttttggggcacagtccaagttggtcttggaatgatactggggcctaataaaaaggagcatctatacaggagcttaaatgagctgtaccttgtaacattctgaggacaggcctgaattctgagaagggaaagtggtaaaagtattgtctagtcctttttaagttggtggctgagcttggtgaggtgtgtttttaaaagaccgttagtccattctacctttcctgaagactgaggaccgtaagggaaataaaggtttcactgaataccaagagcctgaaaaaatgcttggctgatttgactaataaaggccggtctgctatcagactgtatagaggtgggaaggccaaaccgaggaattatgtctaacagaagggaaaaaatgaccgcggtggccttctcagaccctgtaggaaaggcctctacccatccagtgaaagcgtctacctagactaagaggtattttagttttctgactcggggcacgtgagtaaagtcaacttgccagtcctgggcaggggcaaatctccgagcttgatatgtaggaaagggaggaggcctgaacaatccctgaggggtagtagaatagcaaatggaacactgagaagtgatttctttgaggatagatttccaggatggaaaggaaatgagaggttctaagagacgggctagcggcttgtaacctacatggaagaggttatgaaatgacgacagaatagaatgggcctgtgaggctggaaggagatattttccttggtctaagaaccatttgccttctgtgggaagagattgataggtggaagtttcagtgggggagtaggtgggagtgactgacgtgaaggagaaaaactggctgtgagggacagaagttggaatgctagctgcttgtctagccacctaatcagcgtaagcgtcgcctagagcaatgggatctgatgccttttgatgccccttgcagtgaatgactctagcttcctttggaagttaagcggcgttgagaagcgtttttattaaagagggattaatgatagaggacccttgtttagtgaggaaacttcttgcatggtggtgcacgatatgaaaggcatatttagagtcagtataaatattgacgcatagtccttttgcaagagtgagggcttgggttaaggcaactagttcggcttgctgagaggtagtggaggggggcagagcggtagcctcaatgatagatgtggaagatactatagcatagcctgcctttgctggtgagtggcatttaggcctggtggaactgccatcaataaaccaaatgtgattagggtgaggaacaggaaagaaggaaatacggggaaatggggtgaatgtcaggtggatcagagagatacagtcatgagggtcaggtgtggtatccagaataatgtgggaggccgggttgaagtccgtgccaggaacaatggtaattgtgggagactcaacaaagagtgaatatagctgaaggagccagggagcagagagtatatgcatcaggtatgaggaagaaaatagattttggaagttatgagaactgtagagagtcagttgagcatactttgtgatttttagggcctttaaaagtattaaggcagcggcagccgctgcatgcagacatgagggttgggttaaaacagtaaggtccagttgtttggacagaaaggctataggacgtggtcccagctcttgtgtaagaattctgaccttactaaccatgcctaggaaggaaaggagttgttgttttgtagaagggattggggtttgggagattagccggagacgataatcagggagagcacgtgtgtttttatgagaattatgctgagataggtaacagatgaggaagaaatttgggcttgactgaagtaatgggggctgtctgtgaagccttgcagcagtacagcctaagtaatttgctgagcctgatgggtgtcagggtcagtacaagtgaaagcgaagagaggctgggatgaagggtgcaaaggaatagcaaacaaagcatgtttgagatctagaacagaataatgggttgtggagggaggtattgaggataggagagtatatgggtttggcaccacggggtagataggcaaaacaatttggttgataaggcgcagatcctgaactaacctgtaagccttgtctggttttaggacaggtaaaatgggggaattgtaaggggagtttataggctttaaaaggccatgctgtagcaggcgagtaatagcaggctttaatccttttgaagcgtgctgtgggatgggatattgacattgagcagggtaagggtgattaggttttaatgggatggtaaggggtgcaggatcggtcactaaggagggagtaggggtgtcttatacttgtgggttaagatggggagatacaaggggaggatgtgaaggaggctttgaactgggggaaaaggcagcgatgaggtgtggctgtagcccaggaatagtcagggaagcagataatttagttaaagtgtcggcctaataagggaactgggcaggtggggataactaaaaaggagtgcttaaaagagtattgtctaagttggcaccagagttggggagttttaagaggtttagaagcctggccgtcagtacctgcaacagttatggaggcaagggaaacaggcccttgaaaagaaggtaatgtggagtgggtagcttccatatcgattaagaaggggacggacttaccttccactgtgagagttacctgaagctcggcgtccgtgatggtttagggggcttccgaggcgatcgggcagtgtcagtcttcagctgctaagccgagaagatctgggaaggagtcactcagagagccttgggccagagttctaggggctctgggagtggctgccaggtgagttgaacagtctgattttcagtggggtcctacacagatgggacacggcttaggaggaatcctgggctgcgggcattccttgtcccggtggccagatgtccggcacttgtagcaagcttcttggggaggaggttctggaggaactcctggctgctgtggttcaggtgtttggaagttcttgtgtgctggtgatgtggctgggatatgtctcacagtggaggcaaggaattgcaacttttttctattattgtacaccttgaaggcgaggttaattaagtcctgttgtggggtttcagggccggaatttaatttttggagctttatttaaagtcaggagctgactgggtaatcaaatgtatattgagaataagatggccttttgaccttttagggtctagggctgtaaagcgtctcagggttgctgccaaacgagccatgaactgggctgggtttttcatatttgatgaaaaagagcctaaaggctaactgatttgggagaggtcggataaagaaaaaggagcattaaccttgactatgcctttagctccagccactttcctaagaggaaattgctgggcaggtaggggagggctagtcgcggaacaaaactgtaagccagactgggtgtgaggaggggagatgatagaaggattatagggtggaggagctgaggctgaggaagaattgggacttagctcggcctggcgacaagcagcctggggaggaggggaaaggtcagatgggtctgtagaaaaggaagactggaaagactcagcgacgcttggggttgggactgaggggacagccaggagggaaagaaggaggattggggaggaatcacattgggaacagagactagggagggaacaacgtgtagaagaatgcctggacgtcaggcacctcagaccatttgcctattttacaacaagaattatctagatcttgtaggatggaaaaatcgaaagtgccgttttctgtctatttggaaccactgttgagtttgtattggggtcaagcggcattgtagaagaaaataagttgtttaggttttaggtcaagtgtgagttgaagaggttttaagttcttgagaacacaggctaagggagaagaaggaggaatggagggtggaaggttgcccatagtgaaggaagcaagcccagagaacagagtagagacacggagggaaggggtttgggggttcttaccttccagaaaagcaggaaaggggtcggggcatggagatataaggggttggggtgcagagataagaggtcagggcacagaaataagggatcagggcgcagagataagaggttggggcgtggaaataagggatggggtgcagagataagaagtcagggcatggaaataagggattggggtgcaaagataagaggtcagggcatggaattaagggatcggggcacagagataagaggttggggcatggaaataagggatcagggggttcttgccccctagaaaagtggtacttgccactaagggtgaaggagaaggggttggggggttcttgcccccctgaaaaagcagagaaggggtagagacacagagagaaggagttgggaggttcttgccccccagaaaagcagtacttgctgctaagggtgaaggaccaaggcaggcgtccccgtgtggtcagacacctctgaaacgtgggtgagtaatcaggcagtcgtccccacgtgattaaacaccaagggaagactgtcttccctagtctgtgaccagcgccggagttttgggtccacggataaaacgcgtctcctgtctctaccagaaaaggaaaggaactgaacttaagagaagggagagattgaagggtggtaccaagattgaaaggagaaagtggttgagggatagtgagagaggttggagaagagattaagaagaggcggcttacctgatttaaaattggtgagatgttccttgggctggtgggtctgaggacccgaggtcgtaggtggatctttttcacggagcaaagagcaggaggacaggggattgatctcccaagggaggtccccccgatccgagtcacagcaccaaatttcatgcgcatctgtgtaaagagaccaacaagcaggctttgtgtgagcagcaaggctgtttatttcacctgggtgcaggcgggctgagtctgaaaagagagtcagtgaaggaagatggggtggggccgttttgtaagatttgggtaggtaaaggaaaattacagtcaaaggggggttgttctctggcaggagtgggggtcacaaggtgctcagtaggggagcttttgagccaggatgagccaggagaaggaatttcacaagataatgtcatcagttaaggcaagaacaggccattttcatttcttttgtggtggaatgtcatcagttaaggcaggaaccagccatctggatgtgtacgtgcaggtcacaggagatatgatggcttagcttgggctcagaggcctgacactttgtgtctggctttttttcacttaggataatgtttttgaggttcatccaagctgtcacatgtatcagtacttcattcatttttatggttgaataatattttcttttataaaaccagtgacactatatttaattattaaattttttaaatgagtctagagtttaaaagacagtttgttaggtgaaattaagtgatttagaaaggaaagagaaaataacagaggtagtatattagaataagcttctagttgacaatatatagctaacatatggatgaataatattttctgttgtgtgtatataccgcaatttatttattccttcatccaagtgctgtttccactattgtgaatagtgcttccgtcaacgtaggtgtacatatacttgtttgagtacctgttttcaattccttcatttgattgtccttcatcaacttatggtactgtattcttttagtcactggagtttaaaaactgcatggcatgtagtaggtgctaaatatatgttggttgaatggatttattaaattaatgtgttgaattgttatcattctcttctttcccctttacctcttctgtctaatcacatgttaattcaattatagacttaactctgccacaaactgtataacattgggcaaaacacaactatatgcttagttttatatgcttagtcttctgtagacctctataggccctctacatactcagtcttctgtaaaatgactttcttgaaccacaaacataaagtcaaagacaacctgggaaatacatcttcacttacaacagagggcaaatatgaattgctccttggaattggtaagcaacctagagaaaaatcagcagtcagtttacattaaaagaaattcaaatgaccctcaagcatatgaaaatatgttcaaatatacgtataaaagtcatgcagattaaaactgtgctaaaatattttttctcacctattgcctcattgtgttggtgaggctgtggataaataagttttttcatactctgctcctgggatagttatctaaattgcaaatgcatataccctttgaccaggcaattccatttctggtaatttatcctaaaaataagcctgcacaagtgaaaaatgatatatatagaaggttttttatggcagcaatatttacaaaaacaaggttggaagcaacccaaatgcccatcaaaaggaatctggtttaaaaaatatggtacatttatacaatggaaaactagggaactgtgaaaagaatgacgatggtgtctattaaaatgaaaataccttcaagatgtattgttaagtgaataagagatgggttaaaaataagagtatgtaaaattaagactataaattgctaagaaaatttaaaaaataaacaaggccaggtgtcatggcttacacctgtaatcccagtaatttgggaggccaaaacagggggattgcttgaagccagaagtttgagaccagtctgggcaacaaagcaagaccctgtctctacaaaaaaaaaaaaaaaaaaaaatttagccggccatggcaacgtgcacctgtaatcccagcttctcaggaggttaagtccaggagtttgaggctgtagtgagctatgattgtgccactaccctctagcctggacaacagagtgagaccgtgtctctaaaaaaaacagaaataaaaaaccaaaaaggttaagaatataaaaactttctaaagacatataagaaactaataaaataatttatccagagtgagggtagaggaaggaatgatgcagactagagcagaagtaggagaaagcttttattatgtacctctttatattattttttgaaccatctgaatgcattttatgcaaaaattttaaggtaaaagtaaattattttaaaaatgatggcagcaaaaaggttaatagaaatagacatgtttgagcaagactgggaaatggcagaaaattccaagggaaagagatagacataaggtaacttcaagtttacaaaggatataatgccataggcaacaagcaccagacaaattactctagtgcaaagaaaagtaattaaactgtgcagcaacatttaaacagctgaagcataagtaaaatattagcacaggagaagaggcagtagaagaattagattttatgtttaacacattaaaatgaaaagattttaattaaagctgttatttaaagctacaaaaacattttaaatgaagaatatatattgtaaatcacatccattctttatatattctcgacctctacttcagtctttctataaaaccaacacatgtacattccatccatgtcaagaaaagtcattttttatcttagtgacttacatggtgcaacatatgtatgaaaacaactttagatctgggatttgactgtgttatgtaaatgaactaatattgttaaagtgacagtagaactcccataatcttgtctgaaggtaacagactgccatgtatcaaatattgtcattgtttttcttcaactctttttgttatataggtaagacatgttcactgtagcaaaaaaaaaaaaaatgggttttgtgccattactcataccttttgctttagttagttaaacattttcagtggatactactaggcatctctgtggctgtatccactcattagtccattttaaaacaatttaataagtgcccattctaccacaagctatgtagcgaatgggtatctgaagagtaagcaagtagtgatagtttatgagtttttgactgttggtatgcttccaaaagaaggcaccaaaagacatttgtgatgcccacattacttagaaatgtagggaaatcttagtatttgaaactcttatgtcctagaatcttaagaaacctctggattgagatggtgatgttaggcagctcttgcagttgacttcaatgctagctaggctactttctccaagcagtgagaaagtcctaaagagtcttgcttcattttattccaacttctggagtttttaaaccagcattgtttgtgttcttccatatgtagaaactatctctaaacctatcctctcattttccagtttagaaggtgctttcagatatttaggatcttattagttactttcaaattagtattccaatcaaaacgagttgaaataaaaacctgtctgtcctttaacactttgattatagtttatgtacttctatttacatgggtaaaatgtatagtcactaggaataacatgtcaacacatcttgattgaaatcgccactttgaatttttctatcatgtttctagtatgaaaaaaaacttcatttagcttcatagtagcttcatagcagttggaatagttgtatattatgtgttttctgtatacataaactgaactataatttgaaaaagttcttcaaggtcaccttgtcacttgcagagtgacaaattatcctgatttgctgattctcatcttagtgttcctgatactgctgcactgggagaaaatttacatactttcctaaagcttactttctcagacttcttgttcttctggccttgagtaattcccagatccagttttcctgtcaaacctccaaagaagtactgaagggtttctttctcataggtcagattcaggatttgaacccaaagcttctttctttaaatacactgttttttctttatcatacctctcaaacatagtagagcagccttgaagattttgttttaaaatctacatggctgtggaattttgttttaaatatgattatgtttcctacaatcatcttcattttctaatcatcttcatctcttctctgactcccatttttaccaagtcatgaaaatacaagcatctgctttccatgaatagatcagagatctcacaagcctagattcccatggaaaccaatcaaaaactaaaaggaaaagaaagagtatatattgaatttcgatgaaacctacagcttgtttttcattagactcatgctggtttcttttaaactctgggcacagggccagcaaatatttttatggctggtaaaaagggacttcaaatccatttactttcatttaaccgtttaaaaattaattttgtatataacatcaattctaaagaaaatttgagcattaattttctaattaccttatgtcatagggccattatttgtttatgtaatttcctcttcttgttttttctcctacccatagtttatgactcataaaaggatgagagggaatcaggatgattattattcctatagtgtgaatattgtcaacacttgggcacgacatttttcctatgaccaatcataggaccaataaaggaggtctctttgtacctcctttagctgttaagctttcacaaggtgcaaatgatcatttacaaatgtgacaacagatgataactaaaatgccaaagtgagggggattaagagaaccagagaggggatggctggggaggacaggttgtaattttaaattaagcaatcaaaatagtattcagtgagacaggttgtaattttaaattaagcaatcaaaatagtattcagtgagatggtgacatgtgaagcaagacttaaaggaggtgagaactttagccatgtgaacacctgagggaagagcattcattccaggcagaagaaacagtcagaacaaaggccttcagatgggagcatgcctagaatttttgcaaaataacaagaaaattagtataaattagtcttcatgcctttaatcccagcactttgggagaccaaggcgggagggtcacttgagcccaagagtttgagaccagcctggtcaacatagggagactccatctctacaaaaaaatttttaaaaattcgccaggcatggtggtgcatgcctgtggtcctagccactcaggaggctgagatgggagtatcacttgagtccaggaggttgaggctgcagtaagccataatcacaccactgcattccagcctggacaacagagtgagaccctgtctaaaaaaataataataaatatatatataccttataatgaatgagcaaaaggaaagcgctaagagatgaagaaagagaaagaatggtggcctgatcctgtagggccttataggccattgtcaagaatatgttttcactctgaatgagatgaggagggtttgaggaaagacgtgacatggtctgacttatgtatttataaaagaatcattctggccaagtgaagacattttcctccagttttagtactatctattccttcacccattcctcatataatatgctttcaagtttccttctcatcctgatcattttcaccagatatgcacatatttgtctaaattcccttgaaaatgtgatacctacaacagaatacaatgccagtctgatgagctcagagtgttacatgactataactgttgacattttagcaacaaaatacagctgattcatatttaagatttttcaaataaaaactctaaatctgctttatacttacaactgcctaaactacgtcctatattaatatggccgtggttgttggacccaaaggcagcatcttattgtatccatattttgaactttcccagacatacttaggtaaaattgaccattgtatcctttgttcctccagtaccttgtgtactcaaccactgttataccaccttttacactgaaatatatttatttgtttacatgttttatttctccacagatgatgaacatcttaatatgtaagagtgtcttagtcatcttatttccaatatctagtagtacttaacgacactcaatcaatgcttgctgaattgaattgggttcatcatgtaacctacccaggtcctcttgattcttgagtcggccattcagtatagttgtcatctctcccacttatgagtcaccaagattctcatcctaatctttgatattaaaatagatactgcttatagaaaaccttaatcattgaaacactagtactaaaataaacttcactaatttaaaaagttgttttattcatttattatacttgtctaaattatgtcgtcagtattaactcagcctcttgaaaaattttgtataatctatcagaatccacttgctcaccattccaattctgatgggtatgtcattcatttattcattcattcatttgttcaacagataaatttttagtatttaatatgtatcaggcattacactatatctcaaagtattttaaattcaacctttgtctaaatatgtggtctttcagattttataatagtaaaattaacatttcaccaatataactactcattttcaggcaatttattagacatatactcatagtttatcttaaacaattacagatttcagaagatatggtttgggtccttttattcaagtctttcctgtcactttgtcagtcatctcttttcaagccattttcttttaaggaatttgggctgaaatattagactgtactttgaagtaatgactgtaaacttcatgtatgtaactttggttatttcagtgttgtacagattgttaactaattgtgtgtgtgtgtgtgtgtgtgtgtgtacaggtgcacacaggtgcatgctttaaattgttatttaattggattataatgcttacacatattgtaaaatgttaaacataccaagaaggtttgcagtgaagaatctcggtgtaaggaaaactttctatctgcaagtcaaaatatagaagtgataggaaaaagactaataaatatggctacatagtgataagaaagactttttccttccagaaaatgtggcaagcaaagttaaaaaaaaaaaaagacaaattggaaacaatatttgcaaattatatcattatcaaaggtttaatactcctcatatataaggtggagaagaaaaagaccaatgatcctataaaaatgagtaagagtatatctagatagttcacagaaaaggaaatggcccttcaatatatgaaaatatgctcaatattgttcgtcataaaagaaatacaaattaaaatcacaaagagataacatgcttcatgtctcagattggcaaaactccaaaagtttgacaacatgttctgatggcaaaactgtagggaaatgagcattcacatatccctgaaggaaatggaaatggtttccttagcctgttttgtgttgcaataacagaataccacagactgggtaatttataaggaaggaaatttatttctcccaattctggagactgggaagtccaatatcaagttatcagcatctgctgagggacttcaagctgtgtcattccacagtggaaagcagaaggacaaaagagggcaagaacaagtgagggaaaagggggaccaaactcacttatatcaggaacctactcccatgaaaacagcagtaatccattcataagggcagagccccaatggcctaatcacctgttagggatcccacctcgatactgtcataacgatgattaaatttcaacatgaattttggagggacattcaaaccatagcattggtataacgcttatggagggaaacataacaatatccagcaaaattaaccagaatatgcatttacctttgatctgtcacttctgggaatctattctatacatatgtggtaaaaacaagaaatgtatacacagggttatttaattgcagcattatttgtagtagagaaagcttgaaagcaaatgcactttttttgttgtttttgtttttgagacaggatctcactctgttacccagactggagtgcagtggcacaatcatggctcactgcaatctcgacatttttgggcttagtgaatcatcccaccttaggctcctgagtagctgggattataggtgtgtgccaccacaaccgactaattttttttttttttttttttttttttttgtagagatgggttttcaccaagttgcccacactagtctcaaacttgggctcaagccatctgccctcttcagcctcccaaagtgctgggattacaggtgtgtccaccgtgccctgcctgcaaatgtacttttagagagctggctacataaaaagagtatattcacacaatggaatgctatgcatctgtaagaagtaatgagaaatgtttttatataacattataaaatgatctggaatgaaaaaagcaagcgcagaatattgtgtatgatattctctattttatatataactatgaagtgacctccaggtttattgttaagagaaaaaagtaaggtgctaaagagcatgtgtaaccttttttccaggaaagaggagaaaaatattttcttatatttttaaaagatagaagagtaaatgaaaaatgaatgaagactcttacctaaagggagaaggagataatgtagaggacacagggatcgaagctagtcttatctgagtatatcttgttctatagttttgattttggaacttcgtaaattatttccataattataaagtttaagtgtctacagcctggatgcagtggctcacgcctgtaatcccagcactttgggaggtcaaggtgggcggatcacttgaggtcaggagttcaagaccagcctggccaacatggtgaaaccccatctctactaaaaatacaaaaattagcagccaggcctggtggcacagtaatcctagctactcgggaggctgaggcacaagaattgcttgaacccgggaggcagaggttgcagagagccgagatagtgccattgcactccagcctgggcaacagagtgagactccatctcaaaaaaaaaaaaaagaaaatgagcagtccttaaagattgatagacaaataaaacaaagacacctgtgtattaagttggtagcttaactgcagagagaattattcaagtgaatttattattttttatttttattttttatattttgagatggagtctcgctctttcacccagggtggagtgtagtggtacaatcttggctcactgcatcctccacctcccaggatcaagtgattctcctgcctgcacctccctagtagctgggattacaggcacgcaccaccatgcccagctaattttttgtatttttagtagagatggggttttaccatgttggccaggctggtctcaaactcctgacctcaagtgatccacccaccttggcctcccaaagtgctgggattataggcgtcagccactgggcccagcccaagtgactttaaaacatagtaaatttgactctgcagtcctggtaggaaacatcctaaggacaaagacagctacaaagaaatcctaaaatgtgttcagtaaacatactgttagtaataatactgttactgttatcttgacacaacacaaataagtggatcactatataaaggtaagatgaagcaagtgaatatgtcaatttcattagtaaccaagattttcaataagaagtatacaaatataaactattgatatatgtgtctgctaaaaatttatatttctgaatttcatagcactagctactgaaaaagcctagaagtaatgactaaccccatgaaggatcacctccatcacccagattgtgtctctcaataccactaaaaggaatcagaactccttagagaagtggctgcttagaaattgggacaagtaatatatgaaatgagcctggctcatctggtcatgctggatggcaagatatctaacaaagcctactggagtcatgtcaaagggccacagaagccgtgttaaaggagcttccaaagatggacaatttgagtagcaaaaatacagttgcttcaatggaaacaaacatgttaaaactccatgagttaggaatactttttttttttttttttttttgagacagggtctcactctgtctctcagtctggagtgcagtggtgcggtctcggctcactgctacctctgtctcctgggttcaagcaattctccagcctaagcctcccaagtagctgggtttaaaagcatgagtcactgcacctggctattttttttgtatttttggtagagatggggttttgccatgttgcccaaagtggtctctaattcctgacctcaaatgatctgcctgcctcagcctcccaaggtgctagtgtatttaaaatacagttgtttttatgtgtttcagtttaacttcccctccttcccatccttattgatttaactttttcaaaagttgaaactacatgaaaagataggtttacaagtttcagtcacttccatgtcctgtctgtctcattttccctgtcttttgaggacaatcaactatattgatttctggtttacccttcatatgtttcatatatgtatgtttccttgttgcctctttttcttctaatatatgctcttgtgcttcagatagtattaagatttttaaaccagataaaaaaggaagaaaaaagcagtaaaagtttacatgttccttgactctagattctgtgactagaaatggaccttataaaccactcaaactaatatatatgtatatatacatatatatatatacacacacacacatatatatatagggatattcattcatcattgtttataatggcaaaatacaggtaaattattcattgttaaatataatctatttttcatacagtggaatactttttagccactttaaaaaattaatctatatgtactatcatggaaagatctccagggtatactgttaactgaaaaaaaagctagctgcagaagaatatgtatagtagaaacctgtttttataaataaataatttttaaaataaccacagttatacatatgtatcatatagattgcaaaaatttaaagaaatagtaaaaatttcttttttttctttttttttttttttgaggcagagtctcacactgttgcccaggctggagtgcagtggcacaatctcggctcactgcaagctccgcctcctgggttcacgccattctcctgcctcagcctcccaagtagctgggactacaggcgcctgccaccacgcctggctaattttttttgtatttttagtagagacggggtttcaccgtgttagccaggatggtctcgatctcctggcctcgtgatccgcccgcctcggcctcccaaagtgctgggattacagcgtgagccaccgtgcccggccaagaaatagcagaaatgtcttatagtggtattatgagaaaactcatagtttaaattataggaaaacattttcacaagaggcatgcattattttagtctgaaaaaagttcaaaaacagactttttaaaaattctaaattttattttgagccagactttcctgccacccttcaatggtgacaattccttgcaattcctgcagttccttacatgttttattttctttgaaatttaactgagtttcagatctttggcttcaaagaggagactaaatcctgttttccttcatttcccaaatcatttttcattatctcctacaacaaaatgctaccttttctgacacttttatggtctccttttaaatgtttctaatgcagaagaagcttacttgttctcaccacccatttgttaaatttattttcatatctcttagtatttcttaatgtggtgtatatcacagaacatttgtcactcaataagggcatagcatatccaatttttcattccagtttttattattctgccatctgtattgcttttatttgggaagtttcctatttgtaaagaatgatagtttttctttcctcttagtagatctatcttgtttatattctcatgtttagtgaagacctcataggatatattttagctgatcaggggaattctattatctcttttctgtagcataaatattacattccattcttaaaatattgatttgattggtaatgcaaaaagctttagcactccagaaaaaaatatattttcatttataactttcaatgacagagttcttattacacttcaattctctaagtatattgaataaagagtagagaattgttcttggagttggacctatattgattctagtccctgctcatttatttattagctctgtgacatttatctctttaattctgagtttcctcatctgaaaatgagaataataatgatacctatattaccacattcctatgagaatgaaatgaactggtgcccacaaacttcttacttagctcagttcctggcaccaaaatagtgcccagtgaatattaactattataattatcatctagtccatgctctggactaaatactttggggaatacaaaggtgagcaaagttaactctgatggagtagatgagctgtatttatgctatagtttgaatatttgtcccctccaaatcccgcgttgaaatttgatccccagtggttggaagaggggcctaatgggaggtgtttgggtcatgggagcagatctctcatgaatggcttggtgccagaggtaatgagtgaattctcgctctattagttcatgtgatagctggttgtttagaagagcctggcatccttccccgttctctctctccctctctctctcttgcctgctgtctaccatgtgacatagctgctgctccttcaccatcccccatgattagaagcttcctgaggtccttattagaagcagatactggcaccatgcatttagtagagcctgcagaaccataagccaaataaacctgttttttaaataaattgcccagcctccggtattcctttataaaaatacaaatggactaagacaatctacaaagaattcaagtataaggtagaatgcatatgtgctagagaagaatacaaacaaaatggtatggaaagatagaggaagggaatattcaatgagaagttttagggaaggtttcatgaaggagagagaatttgaactagatattgaaaaatcagaattaattttcaaaggcttggagataaatagtatattctgcagagataaccaagtaaatgacatacagatagtcaatggctctgagtggctctactagctacatctttttatgttaataggttttttacttttttcagagaaaattatatccagcatttttaatctttagactaataacaccaggtagacacaaagctattcctggaacattgctttattatagataggaattccataaccaattacctcctatttgctagaacacactaacacaaatacataaaaaatacagactaaactataatagaaggcagttttctctggtgtttgtagcacctctcttctactaatttaaaatatcttcatcactgaggatgcctcctattaaaatgttatatctgagttatactaataactatgaaattaccaggtgtctctgcttgagtagttggaattaatttttttgcctcataactctggagacttctcagaaagtgtagctaaaggtttattcatcaaaatccccttctaatgaatcgactctgatgattctgctgttgtcagaatggatgttctaggaagttgtcatcacacttgaccgtaatgaaaatgctgccctggaccatctccccaaactatgtgtcctcagtattgtgggaagaacccacttcatgatttctaaccagggtagcctctggaagtacaaatgattgctgtaaaattatgaacagagcagcatcaggctttgctctgatgtatcttatgaagcctttctacttccaaatgaagactatgaagagaaccttgaaacaatgcccttctgggagctcattcagcaagcatattctgagggcatattctgttccactctctacgcatggaggattcttgtggtgaggaagacattcttcattggttttaaagagctcaccatttagcacagtcagccgctgagacaggactgctagataactacagaggttatgcattgcaccatttgtacacctcgtacaaccctatgaggtagccctcagggttcaaatggaatgcatctatattttgaatacagagtgatatataataacaagaaatcctggatgtctaattgactgtcttcccaaacagcatagcagattacctttttagtctcatcatttatgtgcagattatgaaacacatttattagtcaatagagtcccttcctgcatttatacattctcctcataactcagttgttctacttcacttccataaggctgacttgcaagtctgaatttatagttgtgttctctttcctaaatttagttcagttatctccctccataatttacatttaaatatcccactgtaacctaaaacatagcttcctttgttaatttccccgttgttacgaagaaaagtattattcctcagtaatttgggctcaaaatattaccctaatctttgactccttctgtcttcctcagtcccaagacacatcaaaggctgatcaaagttagccgggcatggtggtgggcacctgtaaccccagctactcaggaggctgaggcaggagactcacttgaacccgggaggcggaggttgcagtgagctgagatcacaccactacactccagcctgggtgacagagtgagactctgtctcaaaaaaaaaaaaaaaaaaaaaagctctgttgatcttgtttgtcaatcatcccacatttattgttttcttcccattccctttactaccatttagtctaggcagttgtcttcttatgacaaaaatttcataaattggctgggcatggtgtaatcccagcacgcctgtaatcccagcactttgggaggccgagttggggggatcacctgcaataaggagtttcagaccagtctggccaacatggtgaaactctatctgtaccaaaaatacaaaaattagctgggtgtggtggtgggcacctgtaatcccagctattcgggagactgaggcaagataatcgcttaaactcaggagacgagatcgcaccactgcactccagcccagcctggacgacagagcaagacttccatctcaaaaaaaaaaaaaaaaaaaaaaaaaaaacctcataaattgagtgttgtgctccaaaagaatttgaatatgatctactttaattttgtcagtctgccagaagtgggccttataattcgttccttaggagaactcacgaaaggtaggaaattgaggaaatttgggtgttaggaaggttttgaagttagtttacaaagaacataattggagccccagtgactaagaccataatgctgttgagtggctggccagatggatggatggatggatggatggatggatgggtgggtggatgaacatcaattttctagaccttggggcagaaggttaggattggattgcaggagcaagacagaaaactgaattacattatctggtcaggcttcgcttaggttgatttaactcttgctaatctcactaatgagttagacttaaatcttgccttgattagagtcaaggtaagccccaaaactgaaggaaggagagcataccctacagatagagaacttcaactgggaaaattggaaggtcacaaggaccccagaagataattatcaatcccattcattgtttgtcaactaaaaaaacttcaaactaaaacctccagagtaataaacagttagacttcctgcaaggagcatctcacacagaagatagagcctggaagaaaaggctgggaactgacatgaagcaccatgtaggccacaaaaaggagccggaaataatagactaaatggtataataataagtaacgggctggtagcacaatcaactagagttcagaaatgcagtctatgctctaactgatttcctttcctgaaatatttcatatttgcttgggtggctctatagtcatttgggtccatcatggaaatttgtatcattaatacacattttctgttaatacgaataacataaaagtggcttagatgacaagcacatctattattttacacatcaagcagtcttacataacaagaggtaatatccagggttgattaactcagtggctcaatgatattagcaaggacctgggtttttaaatctttattctccgctgtaatcaggatgttggcttatactcttaagctagctttccttggagttaatttcaaggtggctgcctaaatttcaggcattgcatatagaccacaatatctagaagcagaaaaatcaaatacccgtatcttgtttatcttttcaacatggaaaatcttctcagaagccctgtggcagatgctctttccattcctttgattcccaggcctaatcctatcccttggcaaggaaaatgaaaacttcctgattgctatgtcattcaaagtcaccttggcgggcaccagtaatcccagctactcaggaggctgaggcagagaattgcttgaacctgggaggcggaggttgcagtgagccgagatcatgccactgcactccagcctgggtgacagagcaagactccatctcaaaaaaaaaaaaagtcaccttctgagtttggcaaggacccagccttctctgaaggacatatctacttaaaaggagaccaaccaatatcagggttctgttggcctaaaagcctagaagaggatgggcatatatattagccaggcaatccatggtgtcagccacaatgtctgttggacacttacagagccttgtgaacctaactactttcaaaagcaatggccataggctgtaggtcaccttcatggaattccatctagtggcattgccctttagctctaggctacaagaaaaccagctctacagactctttcttgccactggggtgaccctaacttttaccctaacttgatgttctttctatttttttttttttttttttagcaaatgtgcatatttcctcccaaatgctcccaaatgaggaaacagtcaaatcacttagctgttccagtaacaaacgcgggcaccacctcacatgttgttaccccacaaacttaactgagaagtgtagtgataaaaagcaatcatctagtctctgaattcagaatttaaaaagcaatgatctgaaaattgaaagaattcatttaataacaagatatttattgagcacctactaatcataaggtactgctctatatatgtgggatatagcagtgaacaaaacaaaacaaaaatccctgacttcaaagatcttacattttgttggtgggaaacaaaccaataaacaagcgaatacatttttaaagtatatattatatcagatggggatacatgctatggaaaaaaaataagacaggtgagggtgatagggagtgtagggatttgcaaatataaatagggtgatcagggtagacctcacttaagaaagtaatatttaagcaaatacttaaagattatgaaggaacaaacctttctgggagagaatatgccaagtgcaaggtccagaaatgggcacgtgctttgtatttacaagaaacagttagcaaggaggccactgtggctctagtcaagtaaggatgagttcagagatcacagaaggcctgtatgctatttaatgattctacttttacgctgcacaagagggtatggttattgaagtgtttgagcacagaaaatatgatctagcttatattttgaaaggttcattctaactgctgtgttgaggatggactgtcaaaggatgaaagcagaagagagactaattaggaagctgagagttgatgttggcttggaccagaatggtagtggcagaggtggttagaagtccaattttatttttttctaatttgtttattttaattgacaaaaattgtatatatttatgtgtacaacatgatgttttgaaatgtgtatacattctggattgactaaattaattatgaggtagtacatatgttaattatatataactacctcatatttatacatggtgtcaacacttaaaatctactctcttagcaattttcaagcacataatacattgttattaactctagtcaccgtgttgtagccaatattaaatatatcttgaattttctgcaaattatagatgtgaaaggaagagtcaatgactttgacactaagttttttttttaagcctcattttttaaaatgttttcttaaggagaacttcaaacatattcaaaaatagaatagtaaaatgaccctccatgtatcatcactcagcttcagtaattaccaggtcatgctaatcttatttcctgtattccttcattaacttctcctcttcccatgttaaagcaaatctcagatattgcagggatatcattatatcaatatgtatttctaagaggaaatgaccttttaaaatgtaatcatgatagtacttttcaaaaaatgtaacaagaatcacttaatatcatagtatcataaaatggccaattgatgttccaattaccattgtctcataaatgtcataaatgtttttgtttatttacacatgtttgaattggattccaaataagagctatatattgtgattggctgatatgtcaagtcttttttaatctatagtttcaccctccatctctctttgtttcttttggctttttctttttttttttttttttacaactttttggctattgtggcttaacccctgccctaacttgatgtcttagtctagactgattgcctcagtaagatgattctcccttcaggtgtgataaacctattcctcagtcctatgtatttcctgtaaattagctgttggatctaaagacttgatctgattattgttcaattttttttttcttttttaaatttctcatttttatgggtatttagtaggtatatgtatttatggggtacatgtaatgttttgatacaggcatacaatgtgtcatagtcatatcagggtaagtggggtatttatcacctcaagcatttatcattttttgttagaattactgttcaatttttggcaaactgttttattattatggtacattcattcttaggagggacataatgtttcactgtgtctgtttttatgatgttaacaattagtggtgctcagtgcctagagcccattgttcattaggagttgcaaaatgctgatactttaattctaccatctatcctacagttattagctggaataattcattaaagagaaacttccccatatctactattagattactcaatggtacagttcatataggaaaggaaggatgaatgcttgattctccctctttatttaccaatttttaaaataatgaattggtttcctggcatcctcctaggataatcaattaattttttttcatttttaatatcattatgaacaaggcctagaattttttagtatcattttaacatatttactatatcaatccattgaagttattatccttaattagtattcaaattactctgtttttggcctgtgggaggcctgtcaagtagacttcttgatccatttgacatgagcctagtatttgatagcttacttgctatctgctatgtccaaatattccagattcatttctatattttttgttttagacctggaatcagctatttctccaatagctttacttttagtaggaaaaagtatttggagaacacaatctaggatctagggtgctcactgctaccaggttggtgattgtttctaggcttttatagtggacagagcttgcggatttttttaagcaataaaaatatttcatcacttcctattctaattctgggctaaaaggttttaaacttaacctcttcttacatctctactccttttgctcacccagtcaagaatgatagaatatcacattgtctagatgaaaaacctgagatgcaagagcttgagtaatttatcattaaatggcagaaccagggttcaaatatgtatctgtttgactctaaagtctgtgcttaaagtcatctttagaaaatttgtgtttagccagagctcctttgggaagcctaggcaggatgaggggttgagcccaggagttcaagaccagccctggcaacataggaagaccccatctctacaaacaacaacaacaaaacaaaacaaaaactagccaggcatggtggtacatgcctgttgtcccagctactcaagaagctgaggtggaaggaccacttgagcctgggaggtcagggctgctgggagccgtgctcccaccactgtactctagcctgggcaagagaatgagaccttgtttaagaaaaaaaagaagccacagatcccttgctgcaaggcgtagcatttttagcagaactgccaggtagagaattcaattcaactaacacacactgagcacctattaatatttttatacaaagtcctgttcacctgtatgatactggtgtctattaacaaatttgatttgttgatttatctacaaacctagatttatccagaatgcaaccacttttctcaacattccctttaccaccactttggtcctagccaccatcatgttgggttagattattgtagtaaccttgcttggataattataatagtgtcctaactggtctcctggtttctgctcttgccccctgcagtctatgcccaacatatcaaccagaatgatcctttaaaacttaagtcaaagcatgtcagtcctctgctccagaccctttaaaggattttccagttgagcgcagtggcttacaccagcactttgggaaaccaaggcaggcagatcacttgaggttaggagttcaagaccagcctggccaacatggcgaaaccccatctctactaaaaatacaaaatttacccagatacggtggtgtgtgcctgtagtcccagctacaccagaggctggggtacaagaatcacttgaacctgggagttggagtttgcagtgagccaagatcactgcactccagcctgggtggcagagggagactctatctcaaaaaaaaaaaaagattttccatctcagagtaaaagactaagtatttcctgtgatctatcaagccttttatttcatgttctgaattctgttgtttgtatgaccttatttctaatcttccacatatttcctccacatacaccactctgacctcagtgctgttcctctagtaggtgagtcaagctctcaccacaggtttttgcatttgttcttccctctcctaggaatgctgttccagtaggaatctctgtgttgaactcccttgctttcattagtttcttattcaagtcactgtctcagtgaacccttttctggcaatcctatctaatacccacctcacctcacacattgtattctccctactctgctttatgtcttttcttagcacttaacactatctaaaatactatatattttacttatttatcttgcttattgtcttttgccccactataatataaactccctgaagttggggttttatttttggtctgtttattcactaatttatccccattgcctagaactagtagttggtgctcaaaaaatatttgttgaatgaatgagtgtacttctaaagttatagctttaataattctcccaggtgatccacgatttcttacatgatgcatatattgtgggcaaaaaacatactatgagattccagttgtctaatattagaatatttttaaaggaagaataatcctgttttgctatctttctttttcttatacaatccttcctccccaccccagcgactcctgcttgtacttcatagaatatttcctctcttggaactagatatttctttctcttttctttctttttttttcttctggttaaatagccacagactgtccatttgagctgactcttgctggaaagtgagtcagtgcagcctagtggagagcagaggctggagcatttgcatctccagaatgtttgtattgacaaatggcagtcagttattgacatttttatcccttggtgatacttcaattggcttatctttgctggtcaaatgccttaattgttctggcctttaattcagtcaaagttggagctagagcagaggggaaagagaaggagccagactaacagaacatcaagcttgagctgggaggctgctggcaacgatcagcctgtcataatgttatgatttgttcatttttataccatttattagcctttacttgttgtgccatttggcctccagggcagataaagtgctgtctaatttggtaggtttgcttctgtcagagcagcctcgacagggaaggtgttagctgcagtgacaaataatcaatagctgtcgttgtcatgaggaacgtgagcagttgggcctttcatctggaggattagaggtctaattggattgagaatagggagggtgggctgttgggtaaccctgtcagccttgtgaagctgtcaaatatcggccttattcatggtgaagggaataaggaaccttgtgctttcagaactgaggagaaaggcatgtgaaagccctttatacaaaggaatagctcctgaagttgattcagctaacatatgcttccttttaaacttaattaaatatccctttagataataaatctatggaactttaaatgacatttttaaggttggatgtgtaatatacacacacattcacatataacgctatacaaatccaggttggttcttttgtctttgctgatgccagaagataaaccacttgaatggaggtgaaaaatgaaactttatgagagaaattgcataagttgtcatctcattgtcagaattaacaagtgataagcatttttaatactattaatagaaaaaataagtgagacattaaactgatagattagttaataatgaagtatggatatgtgacagttatttttctcccctggtcatttagaaatgtggtttcctataaaacaaatctttcatttattccaacctgaactaatccaaaaaatgaagaattatgcattggctaaattacttcttcaaaggaatgcctaattttttcttccttagcaagtgacaggattgcatttaagtgatatcaatggtatcatgtccaactcagtcccaaaatgtttttgtatatccctacatacttacgctgtactcctttacatttatggtataatgccatcatttggagtatgaatggagaaggtatttgagaaaaatgagttagctcgttctctaatctatggagctcttaatactacctctgcaaggccaagtaaatgactttaaattccactaaatttcatagaaattgagcaaatttaataatgataaatgttaaacacaattttataaaaaaagtataaacttctttatgagtccattctctatgtacaaattaaattcagtgcattgctgttgtccaaaagcaggtataattttaaaaaatgtttttacaatgtggtaggtactaagagcatttgtaagcatcctctatacagtatatctttatgaaagccctgaataaaggtgagttgacagtaatgccaagagtatgtgaataggcatttctaacttatggattatatacttagtccatttctataaacccatggtcccttttctatagtcattcaaagcccagctaaccaatttgaaataacttcaaaaaatactccaaaagaactaaatgtgtgtacaaaagacactagatggatgaacctggttatctcattgggcccttcaaaccctgaggtccatactatttattaccattacaaatgtttcattaagttcttcctgatcagtgctggtttgaaaattctatgattttactcacttgtgtaatccacagtgaaggtcagcaaaattctcaatactactgactaagaatttagaattatggttatctaaagaacttgctttgcttgatctaaactagaaatatttaaaatttcaaacaattatttgtgattacagaaatttctcagatttcatgcagttcttctagagctctatctgtggaagtatagttgtgagtacatttatacttaagcagaattactcataggaaatggtaaggtcagccaaacacaatggctcacatctataatcccagcactctgggagaccaaggccagaggatcagttgagcccaggagtttgagaccagcctcagcaacatagtgagaccctgtctgtacaaaaaaaaaaaaaaaaaatttaaattagcagtcatgttggttcacagctgtggtcccagctacttgggaggctgagagggaggattgcttgagcctaggaggttgaggctgcagcaagctgtaatcacaccactgccctccagcttgggtgacagagcaagattctgtctcaaaaaaaaaataaaataaaaaaggaaatggtaagatcagatttgatatccttgcaaaagaagttcaaagtttaaataggtttaaataggtttgtgtttggggttttgatcagaacatactttctatgacctataaacaaaattgttgctcttgaggttagatgagaatattttgttgctttgtaactccttataatccttattattcactcaacaaatatttgtgcaaaagccactgtgctaagttatggaaatacaaccatgacagggactatcctgccctcagagaagttcatagtttaatggggacaacagacaagctaaatgggtaatgaaaatgtagtattcctgtgttaaatgctaggaaaggagtaagcctaggtatatcataggaaaatgtaagagaggcatctaagccatcctggggtgttgtggtgaagaatggcttccttcaatagatagcaactatgctaagtggagaggagaaaagagagaggaagcccattcccaaggagtattccctccattcccttggagtattctcaaggagggaaagaatatgtacagtcacatgccacataatgacattttgtttaacttcagaccacatatacaatggtggtcccatgagccgtcacacccagcctgttttttatctttcatagaatatttttactgtattttttctatgtttagatacgtttagacacatgaatacttaccattgtgttatatttacctagagtattcaatatagtaatatactgtacaggtttgtagtctaggagcatcaggttataccatatagcctaggtgtgtaataagttataacatctaggtttgtgtatactatgatgttcacactatgacaaaatcacctaatgatacattttgcagaacatattcccattgttaagcaacatatgactatagctcaatatgtatgtattattgactatgaggtagaaaacgtggagagatgatattggataagtaaagtgggatcagaccatgaagtgtctgtcctacatggaggacaataaataaatttgaatatttactgaagagttagatttaaaacttgaatattatttaaattggactaaatgaaagggatttgcaactaactcaccactgcccttctgatcaccaaattcatatacctttcctacttcctcatacctcttgacaaaattggtacattttaccttctttatgattttctccatgcatctctttcttttctctgatgtatatcaagtatatcattggcaaaagcattggactgatataaatcagaagacctagattcatgacttaggctctgcttctttctaacggtgattttaggcaagttttaagtttaaatactctggacttctgtttcctattttttaaatttgtggcaatacttaggttcttacaggagttaaataaattaatatatttgaaaggactctgtaaaacctttgattatgttaagggacacatagtctaaagagtcctgacttagatcacaaaatgataaggcccttgagcatgtaaaaaaaaaaatgtattcaagcagattgaagttaaaattaagaaatgtcaaccaaaacacttaggtaacagttctaagaataacattggacccttacttatgaatcttagcccttattatcccataattattcatgaacaaatttacccctgttattctatgagcttctagaatacagaatcctatcaaatttatctttatatcttcctacaatgccttgcacaaaataggtgctaaataaataccttcaaggaatgaaacaatgaattcttgtagagtcagaattcgttctggatacagtttaatatctaacatacttggatcattttgttttctatttttcagttttgtgaagatgtttaaaaatactactacttctctaaaatcttttatttttccaactttggaatctattaatgagatatagcatttaactcagcaagaaaggacagaagcttggtactggtctcatctacttggacaaggaaagctctaagagaagctggttacagaggttcagcaggaggggacattgagctgcacaaagattatagtttacctgtaatcaagggcagctattgttagcacaagatttaaaaacaagtagatagagagtcagataatacttgtgagtccactacaggtaggcagtggtcaacttgaaattctgtccaagagtaggagggttccaatcaccagcaagaatagagcttaagattgagtggctattcgacccagtgagtcagattattagttcaatagagtgaattggctgcatgggggaaaatatgaaagcccagtgataatcactagatttgaaatcactagataccaagtcccaggttataatagttggatggatggctcaaggtgtgtgctttcttagtggtcagtgcagggctaccattgtcttagaataacttagttagaaggatgaagatgattgagatggcctaagtacttctcacatcatcaagattgatacagcagtactcaaccatctagaaagccttttaaagtagcaatggcttttgaaaatggtgtagtagctcctattggatcagccctccagtagataacatttataaactctgaacaaaatataaaaacaactatctggaggaattgaagagtgaccaagtaggcagaaattgcattgtaatcagcccttggaagaccgtaagaagaggatagcactgggtgagtttccacttttataacagggcctactcagttcttcaaagaggatgaaaactgagtagaaatctgcattcttactttttgaagaatcaaaggacagcatttggggcaatggctgtaagtcagaagagatgtttcaggctgggtgcagtggctcacacctgtaatcccagcactttgggaggccaaggcaggtggatcacttgaggtagggagttcgagactagcctggccaacatggtgaaaccccgtctctactaaaaatacaaaaaattagctgggcatggtggtgcatgcctataatcccagctactcaggaggctgagacaggagaatcgcttgaacccgggaggcagaggttgcggtgagccaagatcatgtccttgcactccagcctgggagacagagtgagacttcatctcaaaaaagaagaaaaatgaaaaacagaagagattttccagaacagagaaattcatataagggaaggcctaacctctacatataaactgccaaaatctctgactaacccctaacctaaacatagatggggaaaaattcaggcagccaagctaaggctaaaataactcatcagcgatttagctgctgcctgcctatgcaggaaaaacataatttagagtttgggttcagccaaggtatctgcctgctaaaacaaaaaatgaatagtcttcagcataacataacagaatccagaatctttacaacacatcattttcagtgtctaagatattctcaaatattgctagacatgaggacaaacagtaaactgtgttccatactcatgagaaaaagtaacaatggagaacaactatctttgttgttccagattttaatgagcagacaaggaatttaaagcaggtcttttaactctgcttaaggatgcaaagaaaaatatgttcgtaatgaataaacagataggatgtcttgcagaaaaatagaaactctataaaaagaactaatggaaattctagaactgaaaactacaatatctaaagattcactagaagggcttatcagcagattggagatgaagagtcagtgaacttaaagatagatcaatagaaattaaccaatctttaaaaaaaaaaagaagcgaatatactaagaaaaaagtgagtctcagtgatttgtaggacaatattgaaagaccaaactgtttgtaattacaaagataggagagagagaatggggcagaaaaataattaagaaaatgatggccaaaaattgcccaaacttggtgaaagacatacatttaaatattcaagaaacgtaatgaactccaataagataaatacaaagaaaatcttggccaggcatggtagctcatgcctgtaatcctgcactttgggaggctgaggcaggcagaccacctgaggtcaggagttggagatcagcctggctaacatggtgaaaccccatctctactaaaaatacaaaattagctgggcatggtggtgcgtgcctgtaatcccagctactcgggaggctgaggcaggagaatcacttgaacccaggaggaggaggttgcagtgagccagaatcatgccactgcactccagcctgggcgacagagtgagatgctgtctccgaaaaaaagaaaatctcacctgaaaataccataatcaaattgctgaaaaccaaagatgaagagaaactcttaaaagcagccaaagggctgaactgagctggttgccttctgttactgtgggagaactcacttcatcccaacttcttcatactttcacttctggagctcatattcctctgacatcttccagaaaaacagtcttaaagccttagccttttttacagtccagctcttaaattttttcctcccctttttcaataataacatgagtgtgcatccagcttgtccccaaaacctgccttgctctgaagcatccaactgtaaagactctttgccaatgtctgtgatttgtgggcccaaaacaaactatccatccttgcatatatcttctgctgagatgcctcacacagagtctggacagctctaattctttcacgagtcccaaaggcagacaactcacttctgcagagaagagcaccgcaaaaaaggaagacaaagtcctggtcaagaaacagatgaccagaactgtgttctcttccacccagctgtgtgtactcagtgatagatttcagagacagaaatacctcagcctccagcagatgcaagaactttacagcatcctgaatcttagctacaaacaggttaagacttggttccagaaccagagaataaaatataagaggtggcagaaaaacagctgcccaaagaatagcaatggtgtgactccaaaggcctgagcacctacctaccccagcctctattcttcctgcctccaaggatgcttggcgaacatgtctgggaacctttcaatgcagagcaaccagacctgtagcagttcggcctggggcaaccagacctggaacatccagtcctagaacagccattcctgaacactcagacctggtgcacccaatcctggaacaatcaggcctggaacaatcccttctatagctgtggagaggaatctctgcaagtcctgcatgcggttccagcaaattcttctctcagtgacttggaggctgccttggaaactgctgaagaaagctacaatggaatacagcagaccactaggtattttagtactccacaaaccatagatttattcctaaactattccaagaacatgcagcctgaagatatgtaaagatgagtgaaactgatattactcaatttcagtctgggcactggctgaatccttcctctcccctcctgcctccctcataggattttacttgtttggaagctacatgttctgccttcatatctttgtttcctttatgcctatcaagtcgattttgtggagggtggggtatgattggagccaaatcagagagttttctttttttcctatgggatctttctggagaaaaaaggttttaataaccttggctgctaaggacaacatgatagaagctgtctctggctatagataagtagatataatactagtttgaatatctttaggatttagaacctagcgtcaagaataggaagtaaaagtacaaattgatgtggtgaaggtatagtcccattttctgggattgggggtctttgcttatttttatttttatttatttatttagagacggagtctcgcactgctgcctgggctagagtgcagtggtgcgatctcagctcactgcagcctccaccttccgggttgatgtgattctcctgcctcagcctcccaagtagctaggattacaggcacataccaccacacccagctattttgttgtatttttaatagacactgggtttcactatgttggccagactggtcttgaactcctgaccttgtgatccgcccgcctcagcctcccaaagtgctaggattacaccatgagccaccgtgcctggccttacttactgttaaaaacccaattattaaggtgaaggattaagctgtaacatacttcactgatttcatcagcccctttggctctgtgttttactatagcccctaattggttggttatgctaatatttatagacagcggtcttgtatttgctacatcacaatgacatcagtactagtttgcctggtttaagtacaaatgaataaaacaaccatatcacctttaaaaaaaaaaaaaagcagccaaagaaaaagacatgatgatgccctaaccaagggaaaccgtgaggcactgtgccatgagcaacggtgcattccggtccagatactacgcttttcccacaatctttgcaacccacagatcaggagattcccttgggtgcctacaccaccagggccctgggtttcaagcaaaaaaccgggcggccatttgggcagacaccaagctacctgtgggagtttttcttcataccccagtggtgcctgggaatgtcagcgagagagcaccattctctcccctggaaagggggctgaagtcagggagccaagtggtctagctcagcagatcccactcccacggagcccagcaagctaagatccactgactcgaaattcttgctgccatcacagcagtctgaagtcgacctgggacactctagcttggtggggggaggggcgtcccccattactgaggcttcagtaggcagttttcccctcacagtgtaaacaaagccaccaggaagctcaaactgggtggagctcaccacaattcagcaaagctactgcagccagactgcctctctagattcctcctctcttggcagggcatctctgaaagaaaggcagaagccccagtcaggggcttatagataaaactcccatctgcctgggacagagcacctgagggaaggggcagctgtggatgcatcttcagcagacttaaatgttcctgcctgctggctctgaagagagcagcagatctcccaacacagcgctcgagctctgctaagggaaagactgcctcttcaagtgggtccctgattccggtgcctcctgactgggagacacctcccagcaggggccgacagacacctcatacaggacagctctggcttgcatctggcaggtgcccctctggaacgaagcttccagaggaaggaacaggcagcaatctttgctgttctgcagtctttgctgcagatacctaggcaaacagggtctggagtggactttcatcaaactccagcaaacctgtagaataggggcctgactattagaaggaaaactaacaaaaataaaagaataacatcaacatcaacaaaaaggatgtgcacactgaaaccccatccaaaggtcaccaacatagaagaccaaaggtagataaatccatgaagatgaggaaaaaccaatgcaaaaagcctgaaaattccaaaaaccagaacacctcttcttctgcaaaggatcacaactcctcaccagcaagggaacaaaactggacagagaatgagtttgatgaattgacagaagtaggcttcagaaggtgggcaataataaactcctctgagctttttctgtaaaggagcatgttctaacccaatgcaagaaagctaagaaccttgaaaaaaggttagaggaattgctaactagaataaccagtttagagaagaacataaataacctgatggagctaaaaaaacacagcaggagaactttgtgaagcacacgcaagtatcaatagctgaatcaatcaaatcgaagaaagaatatcagagactgaagatcaacttaatgaaataaagtgtgaagacaagattagagaaaaaaagaatgaaaaggaatgcacaaagactccaagaaatataggactatgtgaaaagaccaaatctatgtttgattggtgtacctgaaagtgacggggagaatggaaccaaattggaaaacactcttcaggatattatccgggagaactttccccacctagcaagagaccaacattcaaattcaggaaatactgagaacaccactaggatactcctcaagaagaggaactccaagaaacataatcgtcagattcaccaagagtgaaatgaagggaaaaatgttaagggcagccagagagaaaggtcaggttacccacaagggaagcccatcagactaacggtggatctctctacagaaaccctacaagccagaagagagtgagggtcaatattcaacattcttgaagaaaagaattttcaacacagaatttcatatccagccaaactaagcttcataagcgaaggagaaataaaatcctttacagagaagcaaatgcagagagattttgtcaccaccaggcctggcttacaagagttcctgaaggaggcactaactatggaaaggaaaaactggttgcagccactgcaaaaacataccaaattgtaaagaccatcgacactgtgaagaaactgcatcaacgaataggcaaaataaccaggtagcatcacaatgacaggatcaaattcacagataacgatattaaccttaaatgtaaatggtctaaatgccccaattaaaagacacagactggcaaattggataaagagtcaagacccattggtgtgctgtaattcaggagacccatctcacgtgcaaagacacacacaggctgaaaataaagggatagaggaatatttaccaagcaaatggaaagcaaaaaaaaaaagcaggggttgcaatcctagtctctgataaaacagactttaaaccaacaaagatcaaaaaagacaaacaagggcattacataatggtaaaggaatcaatgcaacaagaagagctaaatatcctaaatatatatgcacccaatacagaaccacccagattcataaagcaagttctcagagacctacaaagagacttaggctcccacacaataataataggagacttgaacaccccactgtcaatattagaaagatcaatgcaacagaaaattaacaagaatattcaggacttgaactcagctctggaccaaggagacctaataaacatctacagaactctccaccccatatcaacagaatatacattcttctcagtaccacattgcacttattctaaaattgaccacataattggaagtaaaacactcctcagcaaatgcaaaagaatggaaatcgtaacagtctctcagaccacagtgcaatcaaattggaactcaggattaagaaactcactcagaaccacacaactacatggaaactgaacaacctgctcctgaatgactactgggtaaataatgaaattaaggtagaaataaataagttccttgaaaccaataagagcaaagacacaacgtgctagaatctctgggacacagctaaagcagtgtttagagggaaatttatagcactaaatgcccacaggagaaagtgggaaagatctaaaatcgacaccctaacatcacaattaaaagaactagagaagcaagagcaaacaaattcagaagacaagaaataactaagatcagagcagaactaaaggagatagagacacgaaaaacccttcaaaaaatcaagaatccaggagctggtttttttttaaaagattaacaacaggtagaccaccacccagactaataaagaagaaaagagaaaagaataaaatagacacaataaaaaatgataaaggggatataaccactgatcccacagaaatacagactaccatcagagaataccagaaacacctctacgcaaataaactagaaaatctagaagaaattggtaaattcctggacacatacaccctcctaagactaaaccaggaagaagtcgaatccctgaatagaccaataacaagttctgaaattgaggcagtaattaatagcctagcaacctccaaaaacccaggaccagacagattcacagttgaattctaccagaggtacagaaaggagctggtaccattccttctgaaaccattccaatcaatagaaaaagagggactcctccctacctcattttatgaggccagcatcatcctgacaccaaaacctggcagagacacaacaaaaaaagaaaatttcaggccaatatccctgatgaacattgatgtgaaaatcctcaataaaatactggctaactgaatccagcagcacatcaaaaagcttatccaccatgatcaagtcagcttcacccctgggatgcaaggctggttcaacatacacaaatcaataaacataatccatcacataaacagaaccaatgacaaaaccacatgattatctcaatagatgcagaaaaggccttcaataaaattcaacaccccttcatgctaaaaactctcaaaaaactaggtaatgatggaatgtatctcaaaataataagacctacttatgacaaacccacagccaatgtcatactgaatgggcaaaaactggaagcattccctttgaaaactggcacatgacaaggatgccctctctcaccactcctgtattggaagttctggccagggcaatcaggcaaaagaaagaaataaagggtattcaaataggaagagaggaagccaaattgtttctgtttgcagatgacatgattgtatatttagaaaatcccatcatctcaacccaaaatctccttaagctgataagcaacttcagcaaagtctcgggatacaaaatcaatgtgcaaaactcccaagcattcctatacaccaataatagacaaacagctaaatcatgagtgaactcctattcacaattgctacaaagagaataaaatacctaggaatacaactatcaagtgatgtgaaagacctcttcaaggagagctataaaccactgctcaaagaaataagagatgacacaaacaaatagaaaaacattccatactcatagataggaagaatcaatatgatgaaaatggccatactgcccaaagcaatttatagattcagtgctatccccatcaagctaccattgactttcttcacagaattagaaaaaactactttaaatttcgtatggaaccaaaaaagagcccatatagccaagacaatcctaagcaaaaagaacaaagctggagacatcatgctacctgacttcgaactacactacaagcctacagtaaccaaaacagcatgattctggtaccaaaacagagatatagaccaatggaacagaatagaggcctcagaaataacccaacacatctacaaccatctaatctttgacaaacctgacaaaaacaagcaatggggaaaggattccctatttaataaatggtgttgggaaaatggctagccatatgcagaaaactgaaactggaccccttccttacaccttatacaaaaattaactcaagatggattaaagacttaaacgtaagacctaaaaccataaaaacgctagaagaaaacctagacaataccattcaggacagaggcatgggcaaagatttcatgactaaaacaccaaaagcaatggcaacaaaagccaaaattgacaagtgggatctaattaaactaaagagctttggcacagcaaaagacactatcagcagagtgaacaggcaacctataaaatgggaggaaatgtttgcaatctatccatctgacaaagggctaatatccagaatgtacaaggaacttaaacttacaagaaaaaaacaaccccatcaaaaagtgggcgaagtatataaacagacacgtctcaaaaaacagacactgtcttcaaaagacgacattattgcggccaacaaacacatgaaaaaaagctcatcatcactagtcattagagaaatgcaaattaaaaccacaacgagataccaccatctcatgccagttagaatggcgatcattaaaaagtcaggaaacaacaggtgctggagaggatgtggagaaataggaatgcttttacactattggtggagtgtaaattagttcaacctttgtgaagacagtgtggcgattcctcaaggatctagaaccagaaatactatttaacccagtaatcccattactggatatatgcccaaaggattataaatcattctacgataaagacacatgcacacatatgtttattgcagcactattcacaataagacttggaaccaacccaaatgcccatcagtgatagactggataaagaaaatgtggcacatatacaccatggaatactatgcagccataaaaaggatgagttcatgtcctttccagggacatggattaaactggaaaccatcattctcagcaaactaacacaggaacagaaaaccaaacaccgcatgttctcactcataaatgggagttgaacaatgagaacacatggatacagggaggggaacatcacatactggggcctgccgggggatgaggggtaagaggaggcatagcattaggagaaatacctaatgtagatgacaggttgatgggtgcaacaaaccaccatggcacgtgtatacctatgtaaccaacctgcacgttctgcacatgtatctcaaaatttaaagtataattaaaaaaagaaaagacatgatccaatatagtaaagcatgaatacaggtgacaacatactcttcagtatcaataggcacatgcagacagtaaaataatcgctttaaaatgctgaaaggaaaaactgtcaatctagaattctgtatctggtaaaactatctttccagaataaaactgaaataaggacaaacaaaactaagataatttatcccaaacaaacctatattaaaagaaataatggtcgggcacagtggcttacgcctgtaatcccagcactttgggagactgaggagggcagatcacctgagctcagcatttcaagactgccctgggcaacatggtgaaacctcgtctctactaaaatacaaaacattagctgggtgtggtgatgcgcctgtagtcccagctactcgggaggctgaggcatgagaattgcttgagtccaggaggcagaggttgcagtgagccgagatcgcgccactgtactccagcctgggcaacagagtgaaactctgtttcagggaaaaaaaaaaaaaaaaaaaaaagcaccagaaaagataaataggtagctaaagataaacaattattttttcttaatttctttaaaattaatattgctatttaaagcaaaaattataaaactattatggaatttatagtaaatataggtataatacatatatatgatatctacagcataaagtatggggtggggataatgcaactatacaattgcaagggtcttgcattttgtataaagtgatacaacattaactctaaatagactttgtaaagttatggatatgaactataatacttggaggaaatactaaaataataatgcaatgaagtatcgctttttttaattcaagagaaaaaattttaaaggaattcttaaaaattgcttgagtttcacttcccaagattctaattcaattggtctgaggtagaaaccagacagtaatgctttttaaaagctcctcacctgattctaatatgtttaaaatgccagtgttgggaatgtttctagcagtgctaaatcaaagttattggatgtagttgtataagagagaagtatatgttgcatgtaacagagagtatatgttgctggaaaaccatgcagatcaccagagcactgttttacctcactgaaaagcattagttcctgtgaatccatagaccacttgcttcgtgttgatgacaaagtcctcaccattttgtaaaaaaatgaagaaaagatcattgtagtatttaacatatataggtttgtgtagtatttaacatataggtttgtgcatgtctgtgcacctatagtctgtatgtaataagtctgtcttcctgttactacagttcttgaaaatagttgggtggccttttgctacattgggaagacatatttagaataatatgacttcgtatataggctacatggtatacaaaaaaatgcatgtgggggaaagtaaggggagcactcaaagagatctttcagagcatctcaagcagagattcaataagaggcctatttaagaggtcattggaagggagatgccataattcttaaagacattgcatgcaggaaaaaacagtgattttgaatatttgccacaaatggaaaatgacaggagtagatactcaagttacaattaatttgtgatcctttgctataaagctatttcttacctgggcaattctgtgtaatgcatgccatagatttattgattgtcagttattaatgattttcctcaggcacgaaagatgtaaatagatgttggtgaaaagctaccagctgtcctttcaggaaggacagtcctttatttcctttttgagggcttacacttttttatgaaataatgttgataatagatttactttttaaaatgaacttagattgcaaaaatgtaaactttatactgtcatctttatatttgttccaataatattttttaatgattattattattgagttaaaatgtgcatacaagaatgtacagaaaaatatacaattagatatgtgtaataaatgtacctactcacatcaccaccaccacagtcaggacataaaacatttaggcaacaccagaaagttccttttttccccactttcaaccagtcaccacctccatggttaacaccattatgatttttaacacaaaagattagttttacctgttcttgaagtttttataaatagaattttttttttgctgtctacaagagaaacacttcattttgtatatgcatagaaatatatatatatatatatatatatatatatatatatatatattcattttagtagcttttatagtgcaagtggtttttggttacatggatgaattgtgtagtggtgaagtctaagattttagtgcacccatcacctgaatagtgtatgttgtacccaatatgtagctttttattcctctgcccactctcacccttcccctttctgagtccccaaagtacattatatcactctgtatgcctttgcataaccatagcttagcttccacttataagtgagaacatacagtatttgatgttccattcctgagttgcttcacttagaataatggcctcctccatccaagttgctacaaggacattatttcttcctttttatggctgagtagtatgccattgtatatatgttccacattttcttcatctgctcatcagttgatgggcacttaggttgattccatatctttgcaactgtgaattgtgctgcaatatacatatgcatgcagatgtctttttaatgacttactttcctcggggtaaatacccagtagtagaattgctggatcaaatgggtcaaatggtagatctacttttagttccttgagaaatcttcacgttgttttccatacaggttgtactaattttttttttctttgagatggagtttcactccgtcacccaggctggagtgcagtagcgcaatctcagctcactgcatccttcacctcccgggttttaaacaattctctgcctcagccccctcagtagctgggattacaggcacccaccaccacgcctggctaattttttttgtatttttagtagagacggggtttcaccatcttggccaggctgattttgaactcctgacatcatgatccacccacctcagcctcccaaagtgctgggattacaggcatgaatgaccaaccgagcccagccaggttgtactaatttacattcctgccagcagcatataaagtgttcccctttcaccccattcatgccaacatctcttgttttttgactgtttaataatggctgttctggctgggctatggtgatattatctcattgtggttttaatttgcatttcctgatgattagtgatgtttagcattttttccagatgttggccatttgtatatcttttttgagatgtctattcatgtcatttgcttactttttaatgggattatttgggttttttccttgctgatttgagtttcttgtggattctggttattagttctttgtcagatgcatagcttagaaatatgttcttccattttgtgggttgtctgtttactctgaaaattatttttttcactgagcagaagctttttatttttattaggtctcatttatttttgtttttgttaaatttgctttggggggtcttagtcataaatttttgcctagactattgtctggaagagttttccctaggttttcttcaagaatttttatggtttcaggtcttagatttcagtcattcatccatcttgagttgatttttgtatatggtgagagatagggatccagtttcttttttctacatgtgcgtatccagttttcccagcatcttttattgaatagggtgttttttccccaatttatgtttttgtatgctttgtcaaagatcagttgtaagtatttgactttatttctgggttctctattctgttccattggtctgtacatctattttcataccagtaccatgttgttttaattactatagccttgtaatataatttgaaggcaggtaattgtgatgcctccagatttgttctttttgctgaggattgctttggctgtccagactcttttttggttctatatgaattttaggattgttacttattctgtgaaaaatgatgttggtatttttatcagaattacattgaatctgtagattgctttgggcagtatggtcatttttacaatactgatgcttccagtcaatgagcgtgggatgtgtttccatttgtttgtatcatctatgatttctttttttttttttttttttgagacaaagtctcactctgtcacccaggctggagggcagtggcgtgatctcagctcaccacaacctccgcctcccaggttcaagcgattctcctgcctcagcctcctgagtagctgggattacagatgtgtgccaccacacccagctaatttttgtatttttagtacggatgaggtttcaccatgttggccaggctggtctcaaactcctaagctcaggtgatgcacagcctcccaaagtgctgggattataggcgtgagccactgcatccagcctcatctatgatttctttcagcagtgttttatagttcatcttgtagagatctttcatctttctggttaagtatattcccagttttttgttttgttttggtggtggtgttgttttgcagctatttcaaaagggatttagttcatgatttgatgctctgcatggtcactgttggtgtatagcagtgctactaatttgtgtacattgattttgtaacctgagatataattggattcatttatcaaatctaggattcttttggaggagtctttagggttttgtaggtgtacaatcatatcattggcaaagagagatagtttgaccttctcatttccaatttggatgtcctttctttctttctcgtgctgattgctctggttaggacttccagtactatgctgaatagaaatgatgaaagtgggcatccttgtcttgttccggttcttccagggaatgctttctaattttccccattcattaagatattggttgtgggtttgtcatatgtggcttccttctatacttagacggaacatacctcaaaataataatgtgttgagggtttttttataaagaaatgctagattttattgaatgctttttctgtgtctattgagatgattgtatgttttttatttttaattccatttatgtgatgaatcgtacttattgacttgcaaatgttaaagcatccctgcagccctggatgaaacccagggtgaattatctttttgatatgctgttggattcagtttgctggtattttgctgagggtttttgcatccatgttcatcagggctattggtctgtagtttctttcttttttttttttttttgtccgttagatcctttcctggtcttggtatcagggtgatactggctttgtagaatgagatagggaggattacctctttctcaatcttttggaatagtttcagtaatattgataccaatttttctttgaatatctggtagaatttggctgtgaatccatctgaccttgggcgttttttgttgttgttgttggcaatttttaaaattactgagtcaatctcattgcttgttattggtttgttcaggatttctgtttcttcctaattgaagatggggggctgtgtatttccaggaatttatccatttcctctagatttcctactttgtgtgcatagaggtgttcacagtagtctcaaatgatcttttgtatatctgtgatgtctttttgtatttctgtgttacagatattgctgtagtgtctccacgttcatttctaatggaacttatttgcatcttctttttttttttttttttttttggttaatatagctaatggtctatcaatcttgtttaccttgtcaaaaacacaggtttttgtttcattggttcttttatattgtttatgtttgtttgtttcaatttcatttgattctgctctgatctttgttatttcttttcttttgctagtttgggtttttgtttgttcttgtttctttacttccttgaagtgtgacaataggttgtcaatttgtgatctttcagactttttgatttaggcatttagtgctaaaaactttcctcttactactgcttttgctgtatctcggaggctttaataactgtgtcactattattcatttcaaagaattttttaatttccatcttgatttcattgttaactcagaaataattcaggagaaaattgtttaattttcattacttgtataattctgagaggtccttttggagttgatttctagtttttctccactatggtctgaaaagatacttgtttaccttattgatacttgattatctttgatatgattttgaattttaaaaatttagtgagacttattttgttgcctatcatgtgttctatcttggagaatgttccatttgctgataagaagtatgtgtattcttttttcttttatttatttatttgtttgtttttttttaatagacgggggtcttgccatgtcggccaggttggtcttgaactcctggtttcaagcaatctgcctgcctcaccctcccaaagtgctaggattacaggcgtgagccactgtgcccagcaaagtatggggtagaattttctgtattggttaggtccatttgttgtagagtgcagtttaagtcctgtgtttctttgttgactttctgcctggatgatctgtctagtgctgtcagtggagtgttgaagtcccccactattattgtgtttctgtccaactctgggagctccagagttaggtgcatatatatttaggattgtaatatcttcttgttggattgatccttttatcactatataatgactttctttgtctttttttcttttaaccattgttgctttaaagtctgttttgttaacatcagaatagctactcttgcctgcttttggtttccatttgcttggaatatctgtttccaccctttaccttgagtctgtaagaatctttacatgttaagtgagtctcttgaatacagcagatatttggtttgtaatttttcaaccattctgtcagtggaggatatagaccatttacatttaacgttaatattgagatgtgaagtactatttcagtcatcattgttgactgttaacctactttgttttcttcatgtgttattgttttataggctctgagttttatgctttcaagatgttctattctggtgcatattgaccttttgtttcaagatttagagctccttttagtatttcttgtagagctggtctagtagtgacaaattctctcagtatttgctcatccgaaaaaaaactttttttctccttcatttatgaaacttagttttgctggatacaaaattcttggctgacaattattctgttgaaggaggctaaagataggaccctaatcctttctggcttgtaaagtttctgctgagaaggctgttgttggtctaataagttttcctttataggttacctgatgcttttgtcttactgctcttagaattctttccttcatgttgattttagataccctgataattatatgccttggtgatgtcctttttgttttcttttttttttcttctgagacagagtctcactctgttacccaggctggaatgcagtggcatgatcatggctcactgcagccttgacctcctgggctcaagcaatcctcccaccttagcctcctgagtagctgggactataggcatatgccaccacatcaggctaattttttaattttttatagagatgggttctctctatgttgcccaagctggtctcaaactcctggtctcaagtagtcctcccacctcggcctcccgaagtggtattacaggcattagctactgggtccagctggtgatatcctttttgtaatgaatctcccaggagttctttcagtttctcgtgtttggttatctaaatctctagcaaggtcagggaagttctccttaattattccctcagataagttttccaaattttttgtttgtcttctccctcaggaacactagtgattctttggtttggcaattttacataatcccatatgttttggagactttattcatttcttttaattatattttctttactcttgtctgattgggttaattcaaaagctttgtctccaagctctgaaatttttcttctactagttctagtctattgttaaaactttcctgtgcattttttaattctctaaatgtgtctttcattttcaaaagttctgattggtttttctttaaaatatccatctctagaaaatttatcactcatatcctgaattatttttttaacttcactatgttggttttcacctttctcttgcatctccttgagtagcttaacaatcaaccttttgggttctttatctggtatttcaaagatttcatcttggtttggatccattgctggagagttagtgtgatcttttgtgggtactgtagaaccctgttttgtcatattgtcagaattatttttctggttccttctcacttgggtagactatttcttctagtatttttgaatttatttttcattcaactgtgttttttaatttttttattcccccttaaggatgtaactttaatgtttacagtttattatagcccaatttggctcttgatgatttccggtgtgaagactctgagttccttggttatagagaatctttgtctgatggctttctcagatgctgtttgtagtagcaaggtgcttggtgtgtgagcaggttcactgtcttaagttttccatctggctcacagggtagaccgcagcccaccatttctttcagagggtctgtgatttctgtcagttttcctgttaagttcctgtgttgcttcttgaacaaaagttcacagtatgactctctacacactcttttgtctttccaagtaggggaggcatgctaacaatgctttcagtccaccatcttggggaaaaaagagtgtgtgtgtgtgtgtgtgtgtgtgtgtgtgtgtgtaaatggaataatgcagtatgtattcttctgtgtctaggatctttcactcaatatttttgagatttatccatattgttgcacatatcatagcttattctttctctgttgctgaattatattctgttgcacaaatatatcataatttgtttatacattcatgggatgatggacatttgggttggttacagtctttagctattatgagagaatcttatgaataaactgaaaaaattaacactcttgtacaagtctttttgtggacatttgtactcatcaaataaatacctaaaagtgcaatgatctttaatagtgcctgcatattttttgctttagtagatactgcctaatggttttccaaaatgttgctaccactttacactctgaccaacaacacagtatgtgagagtttcagatgccatatatcttgggcaatatttcgttttgtcagtccttttactttgagcatttctagtgtgtttctcatttttgttttaatttgcatttacctaatgactgatgaagttgagtaattttcatatgcttaataataatttatatattttcttttgtgaagttgtgtgctcaagtcctttacccatttttttctgtattatttttagatgctactacaataagacactaaccaaagtttttaaataagatttcagattagattacctatgataccaatgtcttttttttttttttttctgatacaggattttactctgtcacccacactgaagtgcagtggtagaagcatagctcactgcagccttgaactcctgagttaagcattcctcccacctcagcctcctgagtagctggtactacaggcatgtgccaccatacccagctaatttttaaaatttttttgtagagatggggtgtcgctatgttgcccaggctggtcttatactgctggccatgaacaattctcccaccttggctgcccaaagtgctgggattacatgcatcagtcattgcgcccagtcagcaatatattttgattgattttttaaatctcttttgcacagattctttataaaaattttgcaaaaatatacataacatgaaatttgccattttaaccatttttgagtatactattcagtggcattaagcacattcacagcattgtgccaccatccccactattccttctgcgtatttagtattttcttgaatgtaattgatatgtaacaaattacatatatctcagatgtgtaatttgataagttgtaccatatttacacatcttcaaaagtttcctcatgaccatttgttatcctttcttcaaaccactctctgcctccaccctccctccccaagcaaccagtgatctgttttctgtcacaacagattgatttgcattttcaagaattttatgtaagtgaaatcatataaaactattctttttgcctagcttctttcactcagtataattattttgaaattcattcatgttattattgcatataccaatgatttatatattatcattgttcagtattattctattgtatggatatattacaaattgttctcaagctcctggtctcaagtgatcctcctgactcagcctcctaaagtgctgggattgcaggcatgaacaaggtaaaagtttcaagtttacaggcgtaagcaacagcacctagccttggatacactacagattgtttaaccatttgcctgttggtgaacatttgggttgttttctgttttgggctattactaatgaagatggtaagaacattcatctgtaagcatatgctttcatttctcttgggtaaatcattataaatgtaatggctgggtcatatagcaggtgtacgtttaacttttaagaaaatggtgaacagttttccaaagtgcttgtactattttactttcccactgatagtgaatgaaagttctatttcctccataccctcactttcttatgaggatactttgtatagtcagtctttttcatttgagccattctaaataaagccatttattccatttaggtttgtagtggtattaatttgcatttctctaatgacaaatgatgctgagatcttttcgtgtgcttgtcatttgtaggtctttgatctttttgcattgatcttgtttctgcaaacttgctaaagttcttcattcattctattagtcgtttcatagattttttagtctcctacataaacaatcgtcttatatataaattaaaatgagggttttttttttcaaatctttatgcccttctttcctcccttctttcctttcttccttcttttctttttttcagccttatttaactggctaacacctccattacaaatttaaatagaagtgattagagtagacatccttgccttatttctgatcttaggaagaaagcatgtagtatttcaccactaaacatgaaattaacttcaatttttaaaagatgtccttgagctaaagaatacaggaataacaaatgtagggggaagctactacctctgaggcttagggagagtatccaagggaggagcaaacttggaagctgagattcaggcctggtaggaatgagtgtggctgtgcccctggttggtgaagttcactggaatgccaagggccagagctagagagctggggctgatgagcagaaagttgcccactggggtagtggtgaaacttactggaatgtgagacccactgagtctcctatagacctccgacatctgcatcataggagcaaaaagagcacattggaaccagtgtgaagagccccttcctctgctattatttgtagtgtccctgctgcgcctgctacagataaagtcaaatattgtggcaactgcaaaggagaaattttcacagggtctagtctcacaaaacatggtaaagaagctgatttggagctgagaggcaaaaaactgataaatgatacactgattgaggaaactttcttttgattctagttcgctgagaatttaaaccaagagttggtgttgaatattgtcaaatgccttttctacatctattggaattatcatatagttgttgttctttatttattttgctcattatatcaattgtttaaaaaaatatatagagatggagtctcactgtgttgcccaggctacacttgaactcctaggctcaagcaatactcccacctcagcctctcgagtagctgggactacaggcacacaccccaccacacgcaacacatcaattgatttttttttttgagacgggagtctcgctttgttgctcaagctggagtgcagtgatgtgatctcggctcactgcagcctccaccttccaggttcaagcaattctcctggctcagcctcctgagtagttgggactacagctccgcaccaccacacctggctaatttttgtatttttagtagatacagcattccaccatgttggccaggctagtctcgaactcctaacctcaagtgatctgccctccttggcctcccaaaatgctgggattacaggcgtgagccaccacacctggccacatcaattgattttaaaatgtgaaaccaaccttgcacttctgggattaagtcctactttttatgtattgctcaatttaatttgctaatacattaaggatttttgcaacagtgttaaaaggaatattggtctatagtttagttgttttttttcttcttataatgtctttgtcaggttttcctatcaggatttgcagacttcataaaataagctgggaaactgtcttatcttcttctattatttataaagttgagtaagactggtaagattggaattatttatttcttaacttttttgtagaatttaccagtgaaaccatctagtcttgctggagttttttcttttcgatttggtaggaaggtgttttggcaacaaacctactttcttttatagatttagacttttcagattttatttcttcttacctccattttagtatgctgtctttttcaatgatttctccaaggcccctcaggaagaaatttagaacaaaaagtgatggtcagaattcagtcctcaattctcctttgtctgaggcctgtgtgatagctgttggcatttttcgtctggtgggagtttctgataaacaactcaagaacatatgttaagatgttatcttttagtttccatgggacatcagaataccttgtgactctggcttgcttcggaaactgtttttactaccttcttgcttatcaggttgctcatttacttttcaaggctagctgggtgcctggactttcccttgaagggactcaaaatggttcctttatttccatgctgaggggggcccagcaggtccctgaaaggggtcgctgttctatctcaatctttttctagcttcttatgctggaatcttaggtcaatgattttatataatcattattatgataaaattattataaaatattatatataatatataaatatattatttataattacctaattgtatacatagttttcttaaatacatataattatttaagcctgtgaaattttcctaaccactgctttagctgcaactcacaagttttgctatgttgcattttcttcaagtttgaaattctgaggggagaaaacacacttcacctgtttgggtttttttctgctctctcactcgacacaaaatcaacacagaagacttcagtgaccaaatatatggagacctctccaccagcaagcaagcagtcagttctgtagcagacacccagctggatatcccctaattcaattctaacactatctacccagagatggtatcagataccacagattgaagtctcagtgtccagactgcctcatgcttcagacaccagttacaagtcaaggccccctgaacttctgaccaaaccagcttcaagttggggttcctacaactccctgtctagtttcaattactttgctagagtggctcacataactcagggaaacatgtttactagtttattacaaaggatatattaaaagatacaaataaacagctggttgaagagatacatggtctgggtaccatagctcatgcctacaatcccagcactttgggaggttgaggcgagaggatcccttgatcccaggagttcaagaccagcctgggcaacattgcaaaacactgactctatcaaaataaataaataaaatagaaaaaagaaaagataagctgcataatgcaaggtatagaagggtcccaagcacaggagcttctgtctctgtggagtggggtgcaccaccctcccagcatatggatgaatttcttgttcaccttcctataagcctccacatattcagctatcctgtaccccatccttttgggccttttatggagacttcattggataggcatgattaacaaccatgtagaaatgtgattgggccaaaaaggtgtgatctaattgtaatagattgagggggaaacccattaaggcctgtctgttcagattcatcttggcctctctgcagcattccttcctccagggtatggggcaaagctcttttgaaacagaggtcttgtaacctacagtcagacaaggtaggtcagagaatttctttatggccagaggcagaggaagagtagagtatatttttagtttctaagggcctgccttggggagaaaaaggatcaggtgaaaggaaagcagaaggtcagagagagagattgttttctgaggcctgtttctgaggcctaaagcacccaacattttaacaaaagactgtaactaggtctgtgggagttaagagccagaaaccgtggacaaaaatctatgtctatatctatatcactgtcaaaatcagataattaaaatttatacaacattatcctcagaccctattattatcccaataatatccttaggtattaagttcagaatcacacattgcctttgtcaaacctatttagtgtccttcaatctagaaaagtttcttaatctttcctcaactttaatggtgttgacacatttgaagattgagggctagaatttttttttttttttttttttttttttttttttttttttttttttttttttggagacagtttcactcttcttgtgcaggctggagtgcaacggtgcgatcttggctcaccgcaacctctgtctcccgagttcaagcgattctcctgcctccaaagtagctgggattacaggcatgcaccaccaggtcccgctaattttgtatttgtaatagagacggggtttctccatgttggtcaggctggtctcgaactcctgacttcaggtgatccgccctcctcagcctcccaaagtactgggattacagacatgaagatgtgagccaccgtcgcctggcatttttttttttggagacagactcttgctctgtcgccaggctggagtgcagtggcatgatctcggctcactgcaacctccatctctggggttcaagcaattcttctgcctcagcctcccgtgtagctgggactacgggcatgcaccaccacgcctagctaatttttgtatttttaatagagacagggtttcaccatgttggccaggatggtctcaatctcctgaactcatgatccgcctgcctcagcctcccaaagtgctgggattacaggtgtgagccaccatgcctggccctggctacatattttatataatgtccctcaatttgggtttgttaggtatcttctcatgattagatttgtgttgtccacattcgcagagacgtcataggagtaatgctgtgttcttcctattgaatcctattatgtgtcacaaaattttgatgtttttcatcactaattacattcacttgctcacttaattaaggtacttgtaggctttttatctttataatcagtaaatattttgagggacagtactttgaaactatgtaaatgtcttattgtttactttatctgctactaatgtagccactccaactttcttatcactcatttcaggcaaatgtttttctattattactttcaacctatctgtgtctttatatttaaagtgtatctcttgtagacaacataagcatctcttatagactttcttttttatctagtctgacaatatctgcattttaattgaaacattagtccatttacatttaatgaattcttgatatggttgattttaagtttttcatcttattatttttattttgagccatctgttattgctcctttcaatctgttttctttttctcttttgcattaatcaaatttttaatttttcattttagttcttcaattggctctttacctatacctatgtattatttttaagaggttgctttagggtttacagtatgcatctttcacttaccgcattggaatattatactatgcctcagaaaacttaactatatcattttattgttttctggtagccatcggttccgatgagaagtacaccatcatccctgttgttcctatgtgtataatggtggtggttgtttttctgacttctttcagtgttttcttttttagctttggttttcaatagtttccctatcatgtgcatagaggtagttttctttatattaaccatgctttggattcactgagtttcttggatataaaagttgatatttttaccaaatttaaatcatttctcaaatactgttatctgttccattctctcttcttctgtgacaccaattacacataacattagacttttctatattgtcctacaggtcattgaggttctattgatttttgaaacattttttccttgtcttcaaatttaattatttctgttgatctaaactgaaatttattggcttgttcttctattttttagtctactattaagtccatgctatgatttttacatttcagatatagtactttccaattctggaacttccaattgtttctttttatgtaatttttctctgctgagattccctcatttgtttggtaattatgaccatctttttctgttaagtctttgaccatatttataaagctattgtaaattccttgtgtgctaattccaacatctgggttatcttaagatatctttattttggtttttttctcttgaaattgagtcctgtttttctgtttgtttgcatatggagtaattttttatagcatactcagaattgtggatgataccttgtagggactcttgattctgttatcttcctctaaagaatgttgactttttgttttgtaaaagttaaagctgactaattacactgaacttgttgagtgtctcggtttttcccttagtctagttgaatctattagaccaggtccacagtcctggtacatagtctatacttttaaggcatggcccttctgagatttcagtgggaagtctgaaatatgtactaagacctctaactaagtggaactcaaactccaaattctacccctatgccttgggtagtagctgaaatctctgatcagcttttcaactttccttttgtgggtttctgcagacatcttggagtctcccatacattgtcaattcagggatcagccaaggattttaagggagtctatatgcatatatggggcttcccctttttggctcttttacccatctcttttattccatcattttaatcttatttaccacatctaatgtctaaccaactgaagtagcctaccaatcttcctgattcaagtctttcccctctttaaaccattcttcacactgcggccagatttcattcactcatttactcatgtaacaaatagtcaatgagcactttcctaaaagacaatactgtcaagcagtcaagctactgcagctgctaggctggcttgccacatagattcagctgttaaaaagaccataagtccaaattgatttagacagtttattgcttatggcacagcaggtagcatgagcttcatgtctgcattggttctccttgcccccaagtcccataagggtggtatggaggcaggtccacgtagatgctgcaaaggcagagggtcagtgtcacacctgaggaaacttgaactttaaaaacctccaatcttacatcaaggctgtgagcaaacctgcctatcctttgccaccaaatgaaacattatctttattatcctggttagcaaacaaatctgtcctctaacctgaagggaggtaccatttttagcttccaaagcaactagttatgcagacgtctttgaaaagatagtccaaattaccagatatgcagaaacatgatggacaattgcttccaaacaagtacaaggagaaagcaaaccacttaggtcaagttttgagaatgatttcagagatatcagaaatgtgtccatctgctccccaaccccagttatcattctcctttccatctgcaaagataaaagaatctcaaccacttgctaattatagacataaatttccacaaaaggttttaaatatttcatcccacaacaagatataagactggaagccagaattaccttggaagtgttgggctagcactcctttacactaaactggaaaggtatagtctgcaaaagcaggcattacctgtttataattagcaatttatgtatactttaaacagctatccaaaggaattgagttaggtttaatcagaagagtaagagactagagacatgcactatggttctagctgcaagggccttacacccaagataaggagaatgggcgcatatacttaaagagggcataatcttacaagccagtgttagtatgctgagtgtcccatacaagcaagtctggccatagtgcttctcatattcagaggcgggtacagtcattagggggtgcttttatagaacatttcagtttccattattcttctgactgggtgttgaaaagcagttattacaatagtttttttttttttattttgacttcctgatgcatctgcagatgtgcactgaacttaatactgtagtcacaatggtgactttacatcattcagggagtcattccttaagcctagctagagtccttccacttactttataagtacataattccctgtattaaaatctttcctgcctaaaatacctaaatggcttctgtttcctgtactgaacctgcctaatacatggaggaattgaaatttcaggtggatcttaaagatatggtcaacttttgacatagaatgagaacccagagagaacttcaggcagagggaatagagtgagcaaagattaaaaggcagaaatggccatggcattttttagaaacattgaggaaactgattacagaagagaatgatagagtttcctgttatacaaatttctttatttcctatcaaatcctaaatgttttcatctctttttcttttccacttccttttcttctttctctcttccctctcctttctttccgcatatcacttgtctatcgctttaaccttccatgtcacacagtagcattcatagacattgcttacttattttgggggccttcagaattaaagaagttgctgcacctccaaagttttgttctttccactgaatattccactattaggtcagcaggctcattcttgaacttggctctattactaagcagtctcattcataaatttagtctccttagactaactagatttattgtgggctatcagaaatcctccccagatgtgcatgactgcacttggaagctttgagctttacagccctgtttactgccacctgattctaaccagagcaatatctcttatccattggcagaaaagagttaaggatgtgatagggaatttgagttagtggtaggcatgaaagtaatgtgatgggcttgtagaggatgagtgcaaggcatgttggaggcaataacatagatatttcaccatagctctcagcaaattatatctcctaaggtacaaagcataaagtccaacatacatttgatgtttagcatctatagtatttggtgagccattgtgaagcacataccagttacttttgataaagtagcttgaaagaactcttgatttttttttaaatgcttgcttcaaacataccctgtaattttgttttcctgccccatttactgttactcattctcaatcttttatattgcctattactcagtagctcgacttcttgttgttaataactgtagtctcgggtaactttttctttgtctttgtgaacatttttttctcaagtttattttatccaggctaggtatttaacagctctgtgtttcttataaaaagaaatacaaattataaaagctaaaatgaaccttgaaaaacatttactgcagcatttcccaaagcttcctttttttttttttttttttgaaacagagtctcactctatcatctaggctggagtgcagtggcatgatctaggctcactgtaaactctgcctccccagttcaagcgattctcctgcctcagccttccaagtagctgggattacaggcatgcgccaccatgcgtggctaatttttgtatttttagtagagacaggtttttaccatgttggccagattggtctcgaactcctgacctcaggtgatccgcccgcctcagcctcccaaagtgctgggcacgcccagccccaaatcttctttcttaaagtaatattcacatgtaatgttgtgtaaaaaaatgggtcccatggtcagataagtgtaggaactactgcatgtttctccttgaaaatttagcatgtataagcattctagaagctctgagaagttgcacagtgaagaaacccattaattttttaagtccaaaatttctcataatcatttgatcccaatgctttttttttccagcataaactaacagcatttaaggaaacagtgatctgtaaaacactttggtaaataaaatactagtttataacttaaatgaatttcctcatttcacaattgaggaaactgaggcccagaaagttgttttattcatcacaattaaaaacaatgccttacacaaagaaggtactaaataattgtttggtaaattgaatgatatatttatgtttagataactagttagagccaggactaaaacccagctgtcctgacaagttagacctatagcatttaataaggataatgcagttcacttctattcactgctatttaagctgatgataaaaacattttataattgctattaaaaaagcatcatatgctggtttaaaaggcaaactaaagaagttgaatagttggctgatgttttaaatcgacttagaccacaggtatctatctctttagtttttaacagtgtcaaatattggtctcttgatattgttcagagcactctgggttttgaaaaaacagttcaagtatgtgcaaaggcatctgaaaggggaattttctgaagctttttctactcccatgattctcacaaaattcttcaattcattctagtctagaaagtaatggatcttccataaagatgtgctaatcccaaggtgatcacaaaaaaaaagattttcccacctctgaacaggtttcttttgttgttgttgttgttttgctacttttttttaagtatgcttagcatgttataccaaaaataatgtttcttttttatataaaatattgtactatatatataagaaatacctcagaatttctgtttttaaggactccattttggcatgatattttttggtcattacctacttagctatgtcatattttaatatcaccaaagaaaatatcttaaaatgaaattcttgaattgcgcttgacctttccggttgacagtcagcttaaattatatagtatctcccattatctcacaacagatgtcatctcttaggaatgcttcctttcattgaagacactgtgacaataggaaagggatgtggggtgaaaaaaaagtcacgtatcttttgtttatctgcaaaagtctgtgcatagtttttattgctgaaaataaacatgtatcatgattggtgtatgggggttcacattagtatcagaagtttttatggccactctgctggtgacctagtatattgtgctgttttctcaactgcctttgtaaacacagtagccttaatagatcattttgaaagaagctgccatcctgctgcatctgttggtagcctttctcaggtttctgacatatccttaatctgatgctcagccttgtcatttggatcaatagtaaactagataagatgtcttctacttgcaaggctatggctataaaatgtatttgaaaaataaattcactttttatgtccatgccacaaacctggggagtactaatttgtcattctctctccatctgtctgtaaacagtcagttaaattggttattgatgagaagaaggtgaattatacttgaaacaagagtaatatagaaataaacttcatagtaaatgtcttagattcctacaaaaaggtgacatattttagctgttgtcttaactttaatctctagaataatgagcaatttgttttatattttctattccaaatcatcaataataattataattaattataattataaattatactttacaaaccactcacatatagtattcaatcttgataatctctataactatccattttacaatttgtaaagcatttatttattcaaaaaatgtttatgtagtgcctactataaatgaggcactgtgctaggcactacaaattctctatacaaaacaaaattgtgatgatagaacatgttagaattgtagcattttaatgttagaaggaatcctagaaatcatctactactaacttctcattttacaggaaactagatcttagacagtttgtgaatcatgctcaaccagctatttagtgactttttttctattataggatataaacagataatcttttaaaagtaaacccatagtttaatctttttgaatgtatatttcctcatctaagtagtgagaatacttctggttttcacaacaagaatactgtgaatattaagtaaggcatgagtagggagcattttgaaatttaaatataatctgaggataagaaacaactccttgtagacaagaggaaaagagtatgtaaaaatgtaaactgcgattacctcaggtttaagaggtgcaggctgatcactgttttcttctttatactttatttttgacattcctttaatggacatgttattacttttataacaaaaattttaagttttttttctttttttctaactttatgttttgatataatctcaaatttacagaaaagtttcaagaacagtacaaataattttcatatactctcaaattcctcaaatgtgcacattttgacacgtgtgctttatccttctctctactttgccttgatatatgggaatgtgtagatattgccttctgaatcatttggagtaagttgcaggtgtgatactcctttgcccctaaatttcagtgcatagtttctaaaaacaaggacattctcttacatagccacagctcaattatcacaatcaggcagttaacataaataatattatctcatccaaaaatcttacttagattttgcccattgtcccaacaatgtcatctatttaaaaaaaaaaaaatccaggatcaggcactccattcaatcatttatgtctttttagtcttcattaatctgcaacagtttttcagtcttttgtgtatgtatgtgtgtacttcatgatattcacatgttgtaagtatacaggccagttaaattgtacagtagccttcctttttaatttgtctgatatttccttataattagattcagattatgcacttttggtaagaataccacaggagtgatgttgtattcctctcagtgcctcatatcaggaagcatgtgtcatcaatttgtcccagtaatggtgttaattttggattattcacttgaataaaggagctcctgccaggttcctctgctgtgacgtcactattttttccattgtaactataaataataagtatcttgtgggagctaatttgaaactatataaatatcctggaaccgtccaacccactctattgttagcatcgtttgaccactcacacctgagttggttgttatgatgatggctgccacatgaaagagttatttatttattcattcattttttattttttgtttatttatttatttttcaggcagagtctcactctgtcacccaggctggaatgcagtggcactatcttggctcactgcaactgctgcctcctggattcaagcgattctcatgactcagcctcccaagtagctgggaatacaggcgtgcaccaccatgcctgctaatttttgtttttttagtagagatggggtttcgtcgtgttggccaggctaatctcaaactcctgacctcaggtgattcacctgcctcattctcccaaagtgctgggattataggtgtgacccactgtgcacagctgcacaagttatttttaaaaccactgcttatttaagatatacagttagatgtatacttagatgaaaactatgcaaatcctctctctttttaaacaaaaaaactaaaaaggattagaagagttttcacagaaatgctagcagagcttgtgttaggcttagggtaataaaattgttggtaaccttttttcttactttgttttcccaatttttaatagtttttcaaaattttcaatatatgtaaagcataaaatttctaatttttgaatgtgtttctaaaatttatgtttgtttatttccatttggtccacaaagggcttgagggagatactaaaatattgatttcagaattgtagtgtgcttgcacttgaaagaatagttagattacagttaaaacatagctataacaaacaggacatctaccctggcataaactacagattgacacaactaaaatagtctttaatctgcaaatctttattcctcacttcagccaccaagctgtagcattatgctttctcaactcggttgcttctcttagtttcaaataaaaaggtctaaaatggtggcagacagatgaagagcagtatagagttcagggattgacttgcagatggaggtatgttttgatataattttttaaagatggctaaatttgaaactagaagatacaattttgaattcaagcactcactgtgaggatttaggctaccattttgaaaatggataatagttactaagtcagattactagttatggtcagcatttgattaaaccctttaatgcatggtctgaatgaggttcattaaaggttttttagtataatcgaatttacttacacatttgtctgtatatttgtcttttcccaccatctaagaaatcccatccatagtgtggaactgaagtagagaaggcaaaagatggattcaatcagttgtttgaaacaggtcccccaaaggcacacatcttcgcagagtaggtgaattgatttttctaaactgcatgctaggatcaataaaactaaggtacattgttggaaaactaaagatggagcctacaagacttggggtgcttcaaaggaaccaggagttaaacaaaatttgttgcatttagcttctgagtttaatattaaaatatgatgttttaataactttgcttgcagtgtcactgagaaggctggtcagggtcagtaagaagaacaggctacacagattatcatggacatcaaacaatgagaacattaggagcaaatgaaagctgttttgtttacagatactacttttatgatgagaggagagcaatgatggtatctgagaaagaaaccaatatttgttgagtactcgctgtgcactggtcacttttttttcttttttaccaatgggaaatctgaggctttgagaagtaacttgctcacagttattaataatatagccaatgaagtgcccagatctgactggttccaaaatccattctcattttattacaccgtactgcctccccatggagtagcatttttggatcccctaaagcgaacatcaatatgctaggaaaatgaattacttgtgcagtattgggaaaaaggaaatggatgtaaaaactgttaccctgtggttaaggaaaataaaaattattagaaattaagtcattgttgagtcagttagaataaaaaacatttagttttgaagtagctatagggagcaggtcttctgccttttagaattagaatcatagagtcaaaggacattaagctgggtgggctttagatcagaatccaccctccttatttttcatgtgggaggaaacagaggctaggaaaaattcagtgatttgcctttgggtgtgggagtgttctggctgagacctctctcatgtccctcccttacttaaatccttcagtactggccgggtgcagtggctcatgcctgtaatcccagcactttgggaggccaaggcgggaggatcacaaggtcaggagatcgagaccatcctggctaacacagtgaaaccctgtctctactaaaaatacaaaaaattagccgggcgtggtggtgggcgcctgtagtcccagctactcaggaggctgaggcagaagaatggcatgaacctggaaggcagagcttgcagtgagccgagatcgcgccactgcactccagcctgggcaacagaacgagactccgtctcaaaaaaaaaaaaaaaaaaaaaaaaaatccttcagtactgcttcagaagactgaaaggaaaagcccaaactccttgaccctgcacttttcgtcatcgagttcttgcttatcttttgggcttcagtgtcctgtgtctccagttctactctatcctcagacatactgtgtttttaaagctttcattctagtcacctctttttcatcctccacacacaatgccgtcgcacattcagcttccttcctactttaagctggcttaattgcatatactttcaacatgcagctcaggcactgttttctccaataagcttctactgacccctcaaggctgggttaggtgcccctctacagagttcttactaccgtgtgtccttacctctatcatagaactgatctcattgtatgacagcagtgaatagcattgcatatggtttcactttctattacggtcaaagggagggatagtgtgggggttattggagcatgtaataagtggatccaagagacatgatatacacaacttactaatgttggcttcagaatatgcatataggaggagcttatggggacaaattgattggaaggagtgggagtaagatttgaagctgtctttatatagcactttacataaaattcagaaaatacttattgccctccatatcaaagaaattgggagcaggaacaagatggagacattgaggagtgtcaaagtgttagtaatcctaagttaagatcctgttcaactgccatctctttcatgaagtcattctgttctaaccccttcccctcttcacaaggacatcttggggaagtcacaaggaatgacttttaagtacatcatctatcctgtctttgtgttctgtttttgtatcctttttgtgcatttacccttccttgcttataattttgcattgcatacaagcgtacatctgtataaagcttccccaactcttagcatggagtctgatacagagtaattacatcaaaaataaccattgaatgttgaatgaatggtttaattaggtcagtgcttctcaatcccggttgcatttttgaatcacctaccgaaaatttaagaaatattaattccaaagtcccagaaattctgattttgttgatctaggatgggaacagactttttttttaagctcctaaggattgagaactcctagattaggttctttgtttcaacagtggttctcaaagtttaggattctagaccagcagcagcagcacttcccagaaacttgctacaaaatgcagattcttggcccctacaccagtgaatgacaaactctgcgggagggcctatgtgttttcaagccctccagacgatcttgatgcatgctagagtttgagaacttcttttgctagagtttaagacaaaaaaaaaatgttgtccttaaataaaataccaactgtgagaaaccaaatatactttataatcatcctaaaaggttgtaccaatttaaagcaccactctaaataaatcagagtacctcacaagcacaacagaattatccttgtggaaataagcatcccagcattttataacttttttcaatatttatttttggttagtttcctatatataaaaggctctccaatgaaggcattaattttcataataatctaaataaaataggctatattagtcaggaagagcacctgaaaaatctggcattggataaggaagcctcagagtcaagaatacctttccataatttcctctcatagagaaaagcctttttttgacagtaacattttctccttctctcatttgtgctgtttgactccgtgccacttgatagctctgtctattcctatggaaaccaagttagtggatggagccaaggcttggagaaggcattggggggaaatattagaagagttcagccttagagcaactaaagatgttgcctttccctcagtcaaatcctctttgagagccagaactatttcaagccagagagatgttcttggctgatgtattgtctagctgctctgccagatggatgaacatcttaaacttggaaaatagcaaataaagctcctattctgtctttggagcacattcttagcctttgcttacagaattgtcaaataactaaaaaatatatttttaaagatttgcttaagatggcaggttagtgatgtggttctcatcatatttgttaagtacttagaaattttagcaataaaacacagaattaagccttgacaatcagaagtttaagtaaagaggaagaatgtcggtcagtggaaaaagcaatgcagatttcattttatttctgtagctcagtgaatttatgtctttcatgagttgattgctgtaactgtttgcttccctataaaatcactttaaagactaagcaaccagagtacaaacagacatctaaatcaactgaaataagaaaattatctaagcatacaagaaggcattctcctttctaatccatttctgctctacattttatatggcactggtagctaactcatgattgcattgtactgagccatttatgtggatatttatattatgtttatatttcaagaagggtgtagagattcatatttccaatttatattctttgatttatgtcagaaaattaatgtcttctgagaaaacagttgagacaactattaatatagatgcctcataaatctatatcttgaatctagccatctcttctaatgttcaggtctatatgtatctgcccctccccaacaaccttttctttttgctagacctctctgcatagattcccttcaggtgcctcaaactccactttagaaaaaaaaaacagaactcaaaaatttttatccctaaccctatttttttctcccatctcttcagttgttggtaacaccctctatctggtagccattcaggaatcttcttatgtatttcactgatctcttcccttatttccatttagctctcaacatttctattgtgggttgctgtaataacccccttactgctctgcttgcctaaagattttttcccctcaaatcagtgcttcacataacctccagtgtcttttctaaaaacacaaatccagtcatgtcatttccttcttaaatcttctctttttcctgtcttagtttgcttggccttctataacaaaaatactttagactggatggctggaacaacagacatttatttctcacagttctggaggctggagagtccaagatcaaggcaccagcagattctgtgtctggtgagggcctgcttcctggttcatagatggctgtcttcttgctgtatcctcacatgacagaagggagtgaaagagctctctgaggtctctttttaggggtactaatcccatttatgagctccaccctcgtgatgtaatcatcttccaaatgtcccatatcctaataccaagacattggcgttagaatttcaacacatgaattgggggggtttgggggttggggggacatatattcagtctgtagcactcctttttaccaatatgatcaactttaggctccttatcataacatattagactatccattttataacccctgctcacctctctgatcttacttttcacttcctcttacagtgcatttcttttcttttttctttttttttaattagagaaagggtctcactatgtggctcaggctggtttctaactcctgggctcgagtgatctgcccaccttggcctcccaaagtgctgggatacaggcatgagccaccattcctggcccttacaatgcatttcatattacaatgatattgaattatttgcggagtttgagatgagattttaccctaaatataagctaagaagttagtctgttactgtttcatggatgctaacaatagatacgagactccgcagtcagagacaaagtagtttactactcacaacacagcaaaaagaatgagcaccacgtctatgcttcccttgcccccagagaacatgtggaagttgcagaggctgcacacagtgggttttcatcacaactgaggaacaccgaacttcaggaatctaccacttttatagtaagcacttagtaagcccagaggaagacattacctcatctctccagttgcttgttgcaaacacaaccctgaaaaattacctaagtaaagagtggccaagactttgcattcttggcatacccagtaagaacgtttaggaatgcttcaggcccatggtagattgactcttccaacaacccatccctcagcccagcattgtcttgacatgagtatgccactacatcagctacttttatttatcttaccaagagagactaggaccatcgctttaatttgtctcatacagcacttacttaacaagactccaagtagcaggataaaaacatcctgtaatattggtatcaactatgtccctcagtatcttggactaaatcaactgtgaataagccccagaggagaaagtagatcttactttatacagctaggatgtaatctaagtctggtctgttatctattttgacccatgcaagggagtttagactgacatgctaatctttggcctcgttgcagatagttacaggaggcgctagattacaggggccaaaaagcaacccccaagctcaaaggtggaatacaccatggcctactctttcctacatacaaacatgtagcctaaagaggctgaaataaagagtcactttatttcaggatttgtcattaaacttggatcaaccattacattgatttgtctaagccacatgggcagtatcactaagtagttgttacttcagttgccatgcatggcataatccaaagctgctcacatgtcagaagaagcatatggatttgtgtacatcagattaaaataaggttgtgccagtccctttgcttccatgtatacaacggggtccacattcaggagctgtcattgatggtatcaagcacagcaaaagaattaagaaccaccaatgcccatgtgaatttttctgtttcatagcaagcacatggtcagagataaaacagacgcaggtcagatggctggcctcagctgctgtttgattcaggtagctcactatatatttgttttgccaggatgcacttgcggatccagaggacaaagaaagtattaattgtcctccccatccctgtacttcctgaggtctcatgtgtttccttcctaggggctgaagttgttgctttccttctttggccacatagttaatgtgtcccattccagtagatataacttcgccttttctccaatcatcccctacttgtgcctgtagcttatagaagggtaagtacatatgggacaaatttagaaacctattatgtcttccattttggcctatatggaccactatagaatgactcagtgagcagggcactcaatcagatggtcattatggatatttatgatctgggaccttatcagttgaacaaaatgaatccaggtgggtaaacccaaattaagcttgaatctctaagcccccttttggctggctgccacccaagggatatatgaaacaaaccatcctgagattgcttttgggaaaaagaaagaagcaagataaccagggttgggccaggcagaatcccaaattttcaaaacagatgtatataatcccccactccttttgtcctgattatttcccaggaggctacaaggatgaaatgaaccctttctgaaggtggccacagttagtaagcaaactgcttcatacaggagtgtggaccaggaggaggtaagagaggtggagccagaaacatttttgagttgattttcaagaaggcctttccaagctctcaacaattccagatacctgaggatggtaggaagcatggaatgtccattaagtacctaactattggctcattgttaggcatatcatggtcagactatagaaggtctaggaaccccaaaacatggtcctcagtgctatagcttgaataggctaatcagattggagcagcaactccatatggtggagcagcaacaccataacctgaaaaatgtctatggtggaaaggcacgaggtgagcccaagaggaggtgacagaggtccctgctgggaaggggcaagggcaatcctccatgtaatgtggactccttcaccacaagaaaaggaggccaactgggcaagatacataagtctggtatgcagtggtatcttctgcatgaaaaacataccttttactttgtatccattctattgtggtgggttcattgccttatctagtgcagtgatggatcctagtggcaaatcccagtgaccaggcaatacagacttgttcagcgacttgatttcagtcggtcttatcagagagcaggcccttactgttactgtgggtatctatgtgagtgacccaaagtgtctgattggcagccacaatttgtttgtagtttgtggccccaaacaggaatatctttaatttaccaactgtagtcttccaagtggcagaccaggtgactacagtactgttagcagaccaagaatcagtaaaaatacggctagtctttgggagtattgcctaaggtaagggtgatggcttttcatttcagcccattgggctaactggtcattaccactcagtctcctggagctgtcattgaggttggacagctactgccccctactggacaccatcgggttttaacttagccaaagcatcagcaaaccaggccaaggcatttaagggaccattaagccagcagctttgcttcagacagtggccacctgtatacccagtgctttgtcctcaatgtcaaataagtcaggctaaagcaggaatcagatacatagaacagttgactctgtcctattaggcaaggttttgcattcacattcacttttgagcacctgctcactcatgtctcaaccaaatgaacttctaatgttttcaatccacctaaagatccatgtcaaatagcaaaatcttcattgttctctccatttatttctgttttggagatttcttggccctgcagccgcaaccacatggtctttcagcttgctgcccccgtggtcatgtaccattccttcttttgcctgcccagaggaaggtgagcaaaaacaaaggcactatttgggtggcttgctttaatcccacctctcaccattcagactcattaacagagagaatactggggtcactcgccccttaaccttgcccaccacctgggcatgatctcagggggtcttctcacccttgaacctaaggatacctgagaatgggcctctagggttcttgtccttactcttcaagaaaactatgtctctccagctgggtgcagtggctcatgcctgtaatcccagaacgttgagaggccgaggtgagtagatcacttgaggtcaggagtttgtgaccagcctggccaacatggtgaaaccccgtctctaccaaaaatataaaaattagccaggcatgggggcacacacctataatcccagctacttgggaggctgaggcacaagaattgcttgaacccgggaggcagaggttgcagtgagccaagatcgcgccactgcactccagcctgggcgacagagtgagactctgtctcaaaaaaataaaaggaagaaagaaaggaaaactatgtctctgtcagtatcctatcatcttttactgtcttgtcagttctggcatttaattaaccctatttacaaggtaataagttagctgcagatgctggcagaagacacaagactcccatcagagacgaaaagcgtcattactaatggcatagctaggagctaggagtacttatctgtttgcatgagtttccctcccctccaaggattatgggggcaatatggaggactcagatgggcccagcacacagtgggtttgcatgacatctgaagagtgctagattttgggaatctccagcttttagtaaatagagtagtaagcaagcctgcttgttctttgccctggtgggtgacattacctcgtcactcaagattgctcactgcaaaccccactctggaaaatggtcccagtaaagtggagtcaagcttttgcattcttggcatacccagtaagtacattcagggacattcaaggcccagggcagattgcctctcccaacactattgtggtatttccaaaactcatttgtgtctgcaaccactacagaaaagtttgatataatgaaattactgatatttgcgacctatatacttcctagggatagtaattctttttacaaattaatacagtaaatgccttgagagtttataaatacataattatatagctataattataattaataaatcatgtttctatttttccatttcaattttaagtaatgtattttgggtatataatatatttaggatttaaaatgaactatgacagagtacctactttacatttgtgtgtgctattataaatatagttatctttctaggccaaaattttataccaatttgtaaatgaacaaaaaaatatagtgaacatttatatatatatagtgagcaattgtttttctctccaagtacagtgacagaaaatataagcactggggacacagaacaagaatgcaaagaaattaattggaaaacatgtaggtcccaaagtattggttttgggaaaacatctggcctcttcagtactccagtggggagaagggccaccgtaggcagttttagtcaagtcttgggcattgaagtctgttaaagtaatcgtctcagctgaagaggaagcaaatagcaaaggccccagggagacagatatagaaaatatggtagccattttggggaaaaaatgtagaggtaggatccagaatattttgaggatcagctgccaattatctataagttaatcataaaggcacttactgggaacaaacagcagtcctgtagaatatgatttcagaatagggttcaggaagatgcctccttccttttcactgattgaaaggtggtcatatttgtgcaaaaggcaagaaaattcttagaattttggaatattctttgcctcactatgaggctacagctttataggaagctgtttatctagagaaatggcagaagcaggacaccatccaagcctcaggtcaggaagctactcactagctcactgttaataattgtgacatccctaatatcactgaagacagggctccaggagatctgtgtaggagcagattgttataatggactaggagctgggtggaagatgctctatgggtcaacaaggagaaaaaaggaaaacaaagcaaacaaatgaaaaacaaaaatgaacctgcagacagaaatttcaaaatatttgaagaaatctaatgctaacaaagcaaacaatattattcagattacgaattcattcctagtgggagagcataaataaagcaaaaaaataagccacacagagaagatatttgcaaaaccaaccaagaattagtatccagaatacataaagaactcctatagatcagtaagaaaaaaaaacaaatagccaagttcagaaatgagttacaacacaagaaggctatttacaaaagaaacaaatatccagcaaacatataaaaacattccacctcaattcgggaaatgcacattaaaacacagctgtaggccaggcacagtggtgcacgcctgtagccccaactacttgagaggctgaggtggtaggatcacttgagcccaggagttgagtccagcctgggcaagctatagcaagaccccttctattaaaaaacaaaacaaaaaactgtaaccgtcagattggcaaaaattagcaagtcagacaaaacccagtgtggtgaggatgtggagaaacaggaactcatacattactgttatgaatgttaacttggagtagctattttagagagcaatctcaaaccagaagtttcagaaattcttatgtacttaccaggagatatgtatgagaatattcattacaatattgggtaatcttgaaaaatgagaaacatgctaaatatccctctagagaagaataaatatattattttcatatgacagcatacttattccagtgaaaatgtatgaacccaggcaacttgaataaatctgaaaaatactgctttgagtaaaaaatgacacgattcatgcaagaccatttgtacaaagattgaaaacatgtaaaacaatactatgtcgtttatggatatatatatatatatatgtttgtatgaaatagaagcataaaaacattcattggaatgataaacacccaattcaggatagtagtctccaaagagggagagaaggtaatggaattggggacacaaaggaagtattaactttatctgttaggttttattacttaaaaaatgaaaaatccaaagcaaaatatcaaagtatttttctcaaaatctccatatcattgttattaccattaaatagctatgtgctttttttttaaaaaaaggagttcatcttaagagaactggacagacacaaatataaagttaaaaatcacattttgacctaatttgtttcccagattcctttcaagtgctgttctctgggtcagagaacttttaattctctttcacccttttcatacatttggagaaaatctaagtgtcataatctttatgtgacagatgaaagaagctcttggtgttaattacaggaagatttagaggaaaattatgaccacctaatgaaaaacgaaaaaaaatttattcactgtttcagagatattgggaaatgttttcacatttcagaagcatgatggacctgatcatagcagagtaatgtccttttaaatgactaaatcaagaccttcctgtaacttcagctcccttacttctgcttacctaccatcagagttttcttaagtatatatcctcttttgatctattatctccttcgctcttatactatttcctacccactccaaaattataaaagcagaccctaaaacaaaccgtcctccaaacaggatcagtttctgtatagctctaacaggttatactaaatgattaacttccaggccaggcacagtggctcacgcctgtaatcccagcactttgggaggctgaggcaggcggatcacctgaggtcaggagtttgagaccagcctggccaacatggtgaaacctgatttaccaggcttggtggcaggcacctgtaatctcagctattcaggaagctagggcaggagaattgcttgaaccctgaaggcagaggttgcagtgagctgagattgtgctactgcactctagctgggcaacagagcaagactctgtcccaaaaaaaaaaaaaatagattaacttccaaatcctccaaaaagtatttgcattataagaatattctcaaaaacataagaactcctcagttcaagaaataccgaggaagtatttagactttctgtaatgagaaggttttacaggaagcaaagtagcctataacatgggtccaaagggtcacacaaccttcagagggttgtcaaattagcttactgcctcaaactagtatcttcctctgttccattgatactagaaatattctcctgattttagcacttaaagttctctgtcccttctgctcattcccaaagattgaatttgcatacaggacaattttttttttttttttgagacagggtcttctctgatacccaggccggggtgcaggggcacaatcatggcttactgcagttttgacctcctgggctgaagtgatcttcccactccggcctcccagagtgctaggattacaggtgtgagccactgtgcccagccagttgcttgtttaggagaacaaacaggttggccttggtccaagtaaattatattgtttctagtccagccttcatagataatatctgatgggtctctgtcatttgaaataggagatgctggcctcctccccaaggtacctgctaaattcctattgtctatgcctttgttggtcctatatcatcattatctgtaggcagaatatagacatctttctcagtgaaaaaaaaaaatcagacaaaccactactgtaattccccattatccacggttttgctttctgtgatttcatttactgtggtcaaccatgatctaaaaatactaaggtattttgagagagagagaccacattcacataacttttcatacactatattattataattgttctattttattattagttattgttaatcttttactgtgcctaatttataaattaaactttaccatagatatgtgtgtatatgaaaaaaatagtatatatagagggtttggtgctatctgcagtttcagatattcactggggatcttggaatgtatccccaggagataaagggggactactctatttataacattctaactatttttacttttaccttttcctaatcttggttcttaatcactagctgaactgtgtatattacaatcagatctttctgtctgcatgccctttatcttgggccattcttggttctatctgaccatctatgttttgttgaatactacacactggaaaactatttataataataaaaacatctactgagcatttgctttgttcactgttctaagaacttttacaaatatcatttgtctcatttcatatgcataataacttcaggtaccattattacccctgttttatatatgagaaaatagaggcacaggaggataatttatttaatctgtgaaaatgtttgatgatacttctgtgagaaacaaagatgaaattatgtcaaagagctttgtaatacgtaaaacaaagtacgagcattgtactgttatctgcttcataacaaggctcaatgaatatttgttgaatgaatgaatgagtaaatatcattactgagttgcactgtgtcttgtgagggtagagtcctcagaataatgtaaagtgtaaatatgccaagcactgtgtctatagctcagtagttacccccaccaacatatactagtttccttcttctccttcccttttcctctaatttccaatcgaaatgactgtctgattgaatatctttaaaggtcatgatgaattactctgtaatatttgaagtgttatgttcagaaaggtcaaactttatttttcggtatgaagtgtcacacagatttgtttttcctgggcaaactttttttttttttttttccccaaagaaaagatggcaagaaatttagagcagggtgccctcttgaggaaattttagcatcttccttctcaagaactgacatcaaatgaaatgacaagtccagataaatgatgtacactattaatgaagctcagaaaaatgaaacattaaaaagtaagaataaccaaataccaggtatttgagaattaagattcttaactgttatgatctaatatagcaactgtaaataagaatttttatcatttatttatttatttatttttaatttttttttttgagacagagtctcactgtgtcacccaggctggagtgcagtggtgcaatctcagcttactggagcctccgcttcctgggttcaaggattttcatgcctcaccctcccgagtagctggaaccacagcttgcaccaccatgcccggctgattttttttgtatttttagtagacacaaagtttcactatattggccagcctggtctcgaactcctgacctcaagtgatctgcccatctcggccacccaaagtgctagaattacaggcatgagccaccactcccaggcttgtaaataagaatttttaaatgaaaacaaaaacctctagaagatatttcatttcttcttatttactcatttcttcaagtaatatttattaggcacctattctgtgccaggaactatgctgagcacagggatcaataaaacatggtctctgctttcatggagcttacagtttgtgagggagctcacactgaagagaaacaaacaaatatatatgtaattgcaaactgagaaaagtactatgagagaaatgaataggtactagaataaagaataacaagtaagttctatttagggtcatcaagggaaacctctctgagaggaaatatccagcagagtccgttggcttttccacctattccaagtcttcccatctaatatagacagtctacagatcctctttcctagccatggtctttcttatcttctcttatctctgcccctgtggtggactgagtcaatcctatctctgcccctgtgggcaagcagttagttctcattcgtccttctgcacctcactgtcactctagtaaccttgccttacagcagggatgtccaatcttttggcttccctgggccacactggaagaagaagaattgtcttcggccatacataaaatagcactaacaataactgatgagcaaaaaaaacaaaacaaaaaaaaacacgcaaaaaaatctcataatgttttaagaaagtttaagaattttgttgggccacattcaaagccatcctgggccacgtgcaagccaggtgccgcggtgtggacaagcttgctgtagagctgcacattcttcacagtaggtggtctgcttgattaaaaaatgtattccttactaatattgatagtccctcataggagaacatcaatgcattatcatgctaaaagggcccacttctaacaaggttaaggatgacaaatggacaaataatcctgcctgccattatcctctgaatagggagagataaataggcacgaagtaggctgagaacctgatcaggcaatactgtttggtcacactgaccttgaaatatctgaggtaccaagcacatagaaacctccaactggaagtaaaaatgaggaaatagatctgagaaaagagcccagaagaacaatttttagagtcttattttgttcaaagctgccatgttacacagacttactatgtaatggttggcctggctcattaacactcttgctgtggcccttgtaactaagcttctttctctttttttttttgaaatggagtccggctctgtcacccaggttagagtgcagtggtgcgatctctgctcactgcaacctctgcctcccgggttcaagcaagtctctgcctcagcctcccgagtaactgggattacaggcgcctgccaccacgcctggctaatttttgtatttttagtagagacggggtttcaccatgttggccaggctggtctagaactcctgacctcgtgatccccccacctcagcctcccaaagtgctgggattacaggcatgagccaccgcacccggcctgcttctttcttgaggtgggttgattctaccagactggaggatttaactgacttggagagtactgcctgcaagtgggtgggcctaccatgacttctgagttggcatttaggtgaccgtttgagtctgggatccaaacttggtttttttgtttttttttttttgagacggagtctcactctgtcgcccagcctggagtgcagtggcacgatctcggctcactgcaagctccgcctcccaggttcacgccattctgctgcctcagcctcccgagtaaatgggactacaggcgcccaccaccacgcccggctaatttttcgtagagatggggtttcaccgtgctggccaggatggtctcaatctcctgacctcgtgatccacccgcctcggcctcccaaagtgctggggttgcagatgtgagccaccacgcccggccctgggatccaaactttgaataagctgcctctaccttagttgtacccataaatagctttctttaagaaaactaatcatccataccttattaaccagaggtcctgaacaaaacgtttaactactttgaatctcagtttcctcacctgtaaattgggatttaacatctctgcttatttcgcattattacactttgagtataaataataggtactatgttggtcaaaatgtgctgaaactaatacacctacacattgctgctgttagatagcaatttggaaaatacaccaaacactgtaaaatgtgcaaacgtctttgacccaacaatttggttcctgataatttattcttgtgaaaaaattaagaaaaaaaatgtgaaaaaagatgtacagtgaagcatttactacaaaaaaaatattagaaacattctagatatctaacaataatagactggttaaataaaacatgttgttttatttgcaataaaatattggccagccactatgtaaattatattcatgtagaaagttcttggaaggaaacatgaaaaaataaaacaattgatagtatagtggaattacaagcatttttccttattaatttctctggatgttattactctaggagaataattaacatacttaaaacattttaaaattaaaaaaaattttgaccccatagtacatttttttcttatcatctcttgttttttatttagggaaattatcgtttcatgaaactcttacttacacgcagagcaaactggatgcaaaaggatctggaagagatgactcctttgcacttgaccacccggcacaggagccctaagtgtttggcacttctgctgaagtttatggcaccaggagaagtggatacacaggataaaaacaaggtaatggatactcaaaatcaaagactaataagaccagaaagcaaatgcttccttttatgatgtgaaatttcaaggaagaaggcctgaattaccacatatatacatggtagaacaattccaaatctccatacatctcagggaagtatttcacttaaattctgtcattttatcctctcagcaaccatgtgtgttaggtagtatcatctttttacagatggaaaaactgaagctcaggaagattaaaagtttgcccaagatgcaagtggcagaactagaattcaaatctagtcctgtcggccgggcgcattggctcatgcctgtaatcccagcactttgggaggccgaggcaagtggatcagctgagttcaggggttcaagactggcctggccaacatagtgaaacctcatctctactaaaactacaaaaattagccgggcatgttggcatgcgcttgtaatcccagctactcgggaagctgaggcatgagaatcgcttgaaactgggaggcagaggtttcagtgagcccagatagtgccactgaactccagcctgggtgacagagtgagactgtctcaaaaaaaaaaaaaaaaaaaaaaaaatcagtcctgtcttaactccaaaacccaatatttgacagggagtcataatagttactataggtggttagactcatgatggccaaatgcccatggcaatgtcctaaatgcttagtggtttagtggcctacgctttggtatcagccttcctgggtttcaacccagaatccactacttaacttgttctgtgtccttgagcaaattgcttaactcctctgtgcctcaatttttgtatgtatggaaaaaggttaataggattactgttaggttcagcatagtattacatttcagtaaatagaatcagaacaagtataacataggaaaagaaaggaattacgtgttgtttattgaagatgtggttataggtaattagtaagtgctattatacttgtggctttttaaaaatctgcagttgttagtaagcaaaagtagtaagttaaatagtgagtgttcatattaaatgcctataggtacaccttgaaggaataccatgtatgtcagtttctaaagtttttaatgtgacagatgagcttggttcctgctcattaaattatctaattgtagattggattgctgacaatgctactcacgagggctaatatatatttaaacagttcttacattttttcttaataattatcctaatagggaagccagtcttatagaattatgttgacgagaacagcagaagagattttaaagcaacttcaacaagttcaagatgatcattttcaacttttatctgaaataaagtgtgaacattgtcaaaatcaaaatggagttgtttctgtttaaaacaacaacaacaaaacctgacagagccagggaaggccatgaagagaggattcttgtgcttgtaagcctgattaaaaaaaaaaaaaatcacagactgtgcaaaaaccacagccttgcacaaaggccatcataaccttacacaaaaattacttcttcaaagacatttgcccagcaactgcctgtccaaccttgcactggcattatctttgttatcgatctttgtagccaaggatcatcatttgaaaacaattacgtaatcctgctcatttttcttttaaaaacttttgtcttcctttacttgagtacacatagtttagcaatgccctactaccagataccaaataaacattattttctttctttctttttttttttttttttgagacagagtctcactctatcacccaggctggcgtgcagtggtgtgatcttggctcactgaaacctccacctcccaggttcaagcgattctcatgcttcagcctcccaagtagctgggattacaggcatgcgccaccaggcccaactaatttttgtatttttagtagagacggggtttcaccatgttgaccaggctggtctcgaactcctgacctcaagtgatccacccgcctcgatctcccaaagtgccgggattacaggcatgagccactgcgcccagccaaacattattttcttttagagagactctgttatttaggttgactaaagcaagtgctgctgtattttcaaaatgtatcttttcatcaataactgggtctaataatttatcctctaaaattatatttaaattaaaatttgtctactgatacatggaatgggttccagatgcatgaatttcctatgcatgtatttttttatagatattaaaattcgaaacatcctgtcaagttcttaaggtccttggtgataaccagatgtgcattatcaagatcatcacttactttgttgatgattatttataaatgactgggccgctttctctttctcagtgttatcagtaccggatgaactaaataactgtcatgcctaagaggtcagattctggagtcagactgcctgggttaaaatctcagttcagccacttacttcctttgtgtcccagagcagattacttaggttccgtgtgctgtttcctcatcaatcacatgcaaatttaaaaacatacttgtctcccagagatagtaagatgactgcatgcaattaaatagacaatagtctcccttgttcaaaggaaatatattccaacacctccaatggacacttgaaactgcggatagtgtcaaacccaattcccgtcaataggaacacatttctgttcatatcttctacccacaaatttagtactttttccgtcttaactaagcacttatcaggcactatggccataatttttgcagtttggtatgcaacagcaaaaccagcatgagtttcttcttccttctttacagtttcacagatagatttgttcttacggtagagcttagcaaactcaacaaacaattttttcttattaagttgagagctttcaccttttcacttaaaggaaacacttcatagctgctctttggcatatctgaatcaccagtatcaataattttgagctttggggccattaagtaaaagaaggatgacttgaacacaagcactgtgaatctaatattgtgacaatgaatgggataactgagttggctgctaggtgactaactggcagggaatgtctacggtggggatatgctgaacaaaggaaggatttgtgtcccaggtaggatggggtgggatgaagcactatttcaacatgttatttagaatggcacacaatttaaaacttatgaattgtttatttctggaatgttctatttaatatatttagacttcggttgaacacagagacctgaaatcatgaaaagtgaaaacaaagatacagggcaactactgtataaaactcttataacagtgcctgtcccacaataaaagattggggaaagttagttgttactgttgttatttcgagaacctctcgattttgcagcaaacagctctgcattggagtgcctactacaataaccctgagcatgtgaagctgctcatcaagcatgattctaacattgggattcctgatgttgaaggcaagatcccacttcactgggcagccaaccataaagatccaagtgctgttcacacagtgagatgcattctggtgagttgaatggtactgctagacctgaatggccttgaaatttttttattatgaattatttaatatatacaaaagtgtatatttgacgtacaagcaaattattaagcaaaagaatacaacagacatatggactcatcccccaagaagtagaacatttcagtaccactatttaagaccacatagaggtttcctatgtcccagtttttaaacgcattcattccccctacgccgtgctcattcctgtaccccagcaactacttccctgaatcctgaatttatatttatttccttactttgtttcatacttgtttttattaaacagtgaatagatataagtatcagtaaaatacatgtaaagtataaataataatgaaacaacaaatactcatatactcaatatcaagtttaagaaaaagtatattaccattacctttgaagtcctctgagtggagtacctctcagtctcattctattctctcctttcacagaggcaacaactgtcttcaatcttgtgttatcattcccctgatttccattaccacatttatttgtatccttaaacaatatattgctcagtatttaaaggttttgaatttgatatacaaggaattatattgcatgtttttgtttttgttttgttttgtttttttgcagtgccctattctttctcgctcaaccttatgctgtttattttattttattttattttgagacagagtcttgctctgtcacccaggctgtagtacagtggcatgatctcggcttactgcagcctccacctcccaggtttaagcaattctcctgcctcagcgtcccgggtagctgggactgcaggcgtgcgccaccgtgcctggctaatttccgtatttttagtagagaccgggtttcaccatgttggcaaggatggtctcgacctcttgacctcgtgatctacctgcctcagcctcccaaagtgctgggattacaggcgtgagccaacgtgtccgaccactggtgattttatctatgttgctgcatgtagccatgatatattaattcttactgctatataggattccatcttacgaataagccacacagtattcattctgttattgacagatactttgtttccagttttttgttatttacaaacagtgctgcattgacatttttgaacatatctaggatatatatttaactggttgttataggtgtataggaatgcagttgatatttttgatcattgattacatatctaactaattcgctaaactccttatttgtttcgaatatttatcagtagattctttgaggttttctaatccctctgtcccagcttctaatttacatgctatgatagtccaatagttagtcatatttgtttttaacacacaaattagactttaaagtattattttttaatcgttttttacaacctctgatactaaaagtattattttgtatatgcaatgcttagctctgcattttttttgtatctcaaattttccttctaaagttattattttacatcctgaaatatagttcttagattttttttattattatactgtaagttctgggatacaggtgcaaaacgttcaggtttgttacataggtatacatgtgccatggtggtttgctgcacccatcaacctgtcatctacattaggtatttctcctaatgctatccctccccttgccccccaccccccaacaggccccactgtgtgatgttcccctccctgtgtccatgtgttctcattgttcaactcccacttatgagaacatgtggtgtttggttttctgttcttgtgttaattttcggagaatgatggtttccagcttcaaccatctccctgcaaagaacatgaactcattcttttttatggctgcatagtattccatggtgtatatgtgccacattttctttatccagtctatcattgatgggcatttgggttggttccatgactttgctattgtaaataatactgcaataaacatatgtgtgcatgtgtctttatagtagaatgatttataatcctctggatatatacccagtaagaggattcctgggtcaaatggtatttctggttctagatccttgaggagtcaccgcactgtcttccacaatggttgtactaatttacactccaccaacagtgtaaaagcattcctatttctccacatcttctccagcatctgttgtttcctgactttttaatgatcaccattctaactggcatgagatggtggtatctcattgtggttttgattttcatttctctaatgaccagtgatgatgagctttttttcatatgttttttggccacataaatgtcttcttttgagaagtgtctgttcgtatcctttgcccactttttaatgagttttttttttcttttaaatttgtttaagttccttgtagattctggatattagccctttgtcagatggatagattgcaaaatattttctcccattctgtaggttgcctgttcacgctgatgatagtttcttttgctgtgccaaagctctttagtttcattagatcccatttgtccattttggcttttgttgccattgcttttggtgttttagtcatgaagtctttgcccatgcctatgtcctgaatggtatcgcctaggttttcttctagcatttttatgattttaggtcttacgtttaagtctttaatccatcttgagttaattttttgtataaggtgtaaggaaggggtccagtttcagctttctgcatatggccagccagttttccaaacaacatttaggaaatagggaatcctttccccattgcttgtttttgtcagctttgtcatagatcagatgattgtagatgtgtgacattatttctgaggcctctgttctgttccattggtctatatatctgttttggtacaagtaccatgctgttttgtttactgtagccttgtattatagtttgaagtcaggtagcttgatacctccagctttcttctttttgcttaggattgtcttggctatacaggctctttttttgttccataggaaatttaaagtagtttttttctaattatgtgaagaaagtcaatggtagcttgatggaaatagcattgaatttatatattactttgggcagtatggccattttcatgatattgattctccctgtccatgagtgtggaatgtttttccatttgtttgtgtcctctcttatgtccttgaacagtggtttatagttctccttcagggaactacaatgtgaagaagtccttcacatcccttgtaagttgtattcctaggtattttatttctctttgtagcaattgtgaatgggagttcactcatgatttgctctttgtttttctgtttttggtgtataggaatgcttgggagttttgcacattgattttgtatcctgagactttgctgaagctgcttatcagcttaaggagtttctgggctgagacgatggggttatctaaatacacaatcatgtcatctgcaaacagagacaatttgacttcctctcttcctgtttgaataccttttatttctttctcttacctgattgccctggccagacttccaatactatgttgaataggagtggtgagagagggtatccttgtcttgtgccagttttaaaagggaatgcttccagttttgccaattcattatgatattggctgtgggtttgccataaatagctcttattatttttagatatgttccatcaatacctaatttattgagtggttttagcatgaagcggtgttgaatgttatcaaaggccttttctgcatctattgagataatcatgtggtttttgtcattggttctgtttatgtgatggattacatttattgatttgcatatgttgaatcagccttgcatcccagggatgaagctgacttgatcatggtggataagctttttgatgtgctactggtttcggtttaccagtattttattgaggattttcgcattgatgttcatcagggatattggcctgcaattttctatttttcttgtgtctctgctaggttttggtgtcaggatgatgctggcctcataaaatgagttagggaggattccctctttttctattgtttggaatagtttcagaaggaatggtaccagctcctctttgtacctctggtagaatttggctgtgaatccatctggtcctggacttttattggttggtaggctattaattactgcctcaatttcagaacttgttattggtctattcagggatttgacttcttcctggtttagtcctgggagggtgtatgtgtccaggaatttatccatttcttgtagattttccagtttatttgcatggaagtgtttatagtattctctgatggtagtttgtatttctgtggggtcagtggtgatatcccctatatcattttttattgtgtctatttaattctctgttttcttctttattagtctggctagtggtctattttgttagtcttttcaaaaaaccagctcctggattcactgatttttttgaaggatttctcatgtttctgtctccttcagtactgctctgatcttagttatctcttgtcttctgttaggtttttaatttgtttgctcttgattctctacttgttttaattgtgatgttagggtgtcaattttagatctttcctactttgtcctgtgggcatttagtgctgtaaatttccctctaaccactgctttagctgtgtcccgcagattctggtacgttgtgtctttgttctcattggtttcaaagaacttatttatttctgcttttatttcattatttgctcagtagtcattcaggagcaggttgttcagtttccatgtagttgtgcggttttgagtgagtttcttaatcctgagttctaatttgattgcactgtggtctaagagactgtctgttatgatttccattcttttacatttgctgaggaggttttacttccaattacgtggtcaattttagagtaagttctatgtggtactgagaagaatatatattctgttgatttggggtggagagttctgtagatgtttattaggtccacttgatccatagctgagttcaagtcctgaatatccttcttaattttctgttgtgttgatccatctaatattgacagtggggtgttaaagtatcccactattattgtgtgggagtgtaagtctctttgtaggtctcaaagaacttgctttatgaatctgggtgctcctgtattgggtgcatatatatttaggatagttcgctcttcttgttatattgatccttttacctttaaggaattcccttctttgtcttttttgatctttgttggtttaaagtctgttttatcagagactaggattgcaacccctgctttttttttttctttccatttgcttggtaaatcttcctccatccgtttattttgagcctgtgtgtgtctttgcacatgagatgggtctcttgaattcagcacgctggtgggtcttgactctttatccaatttgccagcctttgtcttttaattgaggcatttagcccatttacatttatggttaatattgttatgtgtgaatttgatcctgttatcatgatgctagctggttattttgtacgctagttgatagtttcttcatagtatggttggtctttatatattggtatctctttgcagtggctggtaccagtttttccttcccatatttagtggttcctacaggaactcttgtaaggcaggcctggtggtgacaaaaatccctcagcatttgcttatctgtaaaggattttatttctccttcacttatgaagcttagtttggctggatatgaaattctgagttgaaaattcttttctttaagaatgttgaatattggcccccactctcttctggcttgtagggtttctgcagagagatctgctgttaagtctgatgggtttccctttaagggtaacctgatctttctgtctggcgccccttaacatttttttcttcatttgaaccttggtgaatctgatgattatgtgtcttggggttgctcttcttgaggagcatcttaatggtgttctctgtatttcctgaatttgaatattggcctgtcttgctagattagggaagttctcctggataatatcctgaagtgtgttttccaacttggttccattctcctcatcactttcaggtacaccagcataggtttgggaaatagtcccatatttcttggaggctttgttcattccttttcattattttttctctaaccttgtcttcatgctttatttcattaagttgatcttcagtctctgatatcctttcctccacttgatcgatccggctgttgatacttgtgtatgcttcacgaagttctcgtgctgtgttttttagctccatcaggtcatttatgttcttctataaactggttattctagttagcagttcctgtaatcttttatcaaggttcttagcttccttgcattgggttataacatgctcctttagcttggaggattttattacccaccttctgaagtcttcttctgtcaattcatcaaactcattctctgtccatttttgttcccttgctggcaaggacttgtgatcttttggaggagaagaggcattctggtttttggaattttcagcatttttgcacaggttttccctcatcttcatggatttatctacctttgatctttgatgctgatgacctttggatgggatttttgtgtgggtgtcctttttgttgatgttgatattattgctttctgtttgttagttttccttctaatagtcaggcctctcttctaggggcctgctggagtttgctggaagtccacttcagaccctgtttgcgtgggtatcaccagcagaggctacggaacagtaaagattgctgcctgttctttcctctggatgctttgtcccagatgggcaactgctagattccagctggggctctcctgtatgaggtgtctgccgacccctgctgggaggtgtctcccagtgaggaggcacaggagtcagggacccacttggggaggcagtctttcccttagcagagctcaagcactctgttgggagatctgctgctttcttcagagctggcaggcaggaacatttaagtctgctgaagctgtgcccacagccactccttccccaggtgctctgtcctagggagatgggagttttatctataagcccctgacaggaactgctgcctttctttcagagatgccctgcccagagaggaagaatctagaaaggcagtctggctatagcggctttgctgcgctgtggtgggctccgctcagttcaaacttcttggaggctttgtttacactgtgaggggaaaaccgcctactcaagcctcagtaatggtgacacccctccccccaccacgctcaggcatcccaggttgacttcagactgctgtgctggcagcgagaatttcaagctagtggatcttagctttctgggctccagggaggtgggacccactgagcaaaaccacttggctccctggcttcagccccctttccagtggagtgaacggttttgtttccctggggttccaggtgccactggggtacaaaaaagaactcctgaagctagctcagtgtctgcccaaacggccacccagttttgcgcttgaaacctagggccctggtgctgtaggcaccctagggaatctcctagtctgaaggttctaaaaaccgtgaaaaaagtgtagtatctgggccagataccgtccctgccggcactgtgcatcacggcttcccttgactaggggagggagttccctgatcctttgtgtttcccaggtgaggcgatgccctaccctgcttctgctcaccgtctgtgggctgcacccactgtctaaccagtcccaatgagatgaactgggcacctcagttggaaatgcagaaatcactcaccttctgcattggtctcactgggagctgcagaccagagctgttcctatttggccatcttgctgagttgtcctcttgactccctttagtatagatctttcggtggtcaactctctctggttttttgtttgtttggttttagtttttttgggacagagccttgggctgtctcccaggctggagtgcagtgatgtgatctcagctcactgcaacctctgcatcctgggttcaagtgattctcctgcttcatcctcctgagtagctgggactacaggcacatgccaccacgcacagctaatttttatatttttagtagagacggggtttcaccatgttggccagactggttttgaactcttggcctcaagtgatccacctacgtcagcctcccaaagtgctgggattacaggcatgagccaccacccccagccaactctcctttttaattgttaagaatgtatgcctcttgaaaaaaaaatgattatcctgtgtacacagtcctaggaatctatttttctcagctctttcagcatattattttgctactttctgccttttattattgctcttaaggagtctgttattggtctgtcattcctttatacatgatgtatcttttctctcaggctgcttttacattttgctctttgtttggcattctacagttttactacagtgtgtctaggtgtggcctttttaaaaaatcctgtttggtatacattctgattattgcatctcagttctgccaaacatatatagctgttatctttaaatatcacctctccttcattccctttactcttgcctttagggtctccaattatatatcttttaaggctttttatctaatcctccatgtcttttaacttctcttttatattctcatctccttgtctctttctgttgcgtcctaggtaatgacatcagatctgtcttcgagtttactaagtttttcttcaaataagtccaacctgttgtttaccctatccattgaactgttaatctttgtgatgacatttttcacttctaaaagttctatttggttctttttcaaatctgcctggtaattttgataatgcttgctataaagatccagtagaaaaattaattaacattgtgaactcactaataaacacatgattaaaaaatctcaaccccattcataaatgaactacaagttaaaatagcagtgaaatgtctttcataaccataagggaaaaatgcagtaagcttgataataccaaatgattaatttctgccagcatgtagggaaataaaaacttttacatattgtcatgggagtgttaattggtaagaccatttggagagtgatgtgacaatacctgtttgaagatatccttcaccccagcagttccccttctagctgtctagcctatggaaaaatctcacacatgtgctacaagggatatgtaaaggaaacattaattgcagcattgtctgtaatagtgaaaaaaaatgggaatagcctaaatgttcctcagtaggaaaatagataactatattgtggtttattcaagcacctcaataattgaactattaccaacatagatatccaaggtatagtgttgagagaaagaattgccaaaggatacatgtccgttgccataatgtaaacatttgaaaacacacatacaaaatttatatattgtttatggatacatacatatatacaaaagtataaaaacatacatctttagttgaatgataacagaaacaaaagcatatcaggcaaaatgttgacacctttttaatctagataatcagtatgtaatggttatattattttctgtactttttataattaaatatgaaaataattttttaaagatttagactttgtaccttttccatgatttatcacttgtgctgagagataatgtagaggtcttatttcgaaaattcctcagttaattcctgtgccaggctgggcacagtgactcacaccataatcccagcattttgggaggctgaggtaggagaattgcttgagcctaggaattcaagaccagcctgagaaacatggcaataccccatctctacaaaaaacacaaaaattagccaggtgtggtgggatgtgcctgtagtcccagctacttgggaagctgaggcaggattgcttgagcccaggagtttgaggctgcagtgagctgtgatcatgccactgtactccaacctgggtgacagaacaagaccctgtctctaaaaaagaaagaaagaaaaaaatacttacaccaaatgtaatttattgaggattccatgtatgtctgaagtctctggttccttcaaatcaggatgctgctccaacagagtctttactgaactggcaagactacgagggtcgaactcctcttcactttgcagttgctgatgggaatgtgaccgtggttgatgtcttgacctcatatgaaagctgcaatataacgtcttatgataacttatttcgaaccccactgcactgggcagctttattaggtacgtgactcaaaggatcaacagtaaaaggaacttcatgagtataggaatatttctgtgccttcccttccactgtttactcccaactcctagttaattattttgatttctaactgatatgttgcattgttttataaactaaattatagtaatataaatttattttatgttaaatattagttttaatttcaacatcatatcttcactttaaatttttgttataaaagtaattcacatttagtgacaacatgtgaatgtaacataaacctcttttcacattcagcgcctatatttttggggaggagggctttaattttatgtttatgctaatactatgatatttgagtttttttctttatattttcctgaaatgccttttacttaacctttttgaagatcacttttatagatgagagagtgtatatatgtgtatgttttatgtgtatgttggggttttttgtgtgtggagtcaatctgagagtctttctctttcaatgaaggagttttacccattaatagtcattgttataagataaataatcaggtctttttttttcctgctatctttctattcttagtgttttcagcttaacgttttgttttgttttgtttcctgtttcctttgctttctgctctttggtatatggattagatttgatgttgttatttgattttgaattgcctaatgttttaggagggtttaggagtggctacttttaaatttatcaaaaactttttaaagcctgaatcagagtcaagagcaaaaatgcatctattgattcccacctatttaagacaaaaaatttagcacagatactcatcactcttttagtacttgttaatgtaatctgagatttccccctaattattataatcttgatcttagtttttaaattacacattatcttttttttaaatgatgtttatatgtgcactcacttttatcgccagatttagaattattattcagatttcatcttacatccctttttatttttcttctggattctgggcttacttggcaaatttgtctccatgtaactaaattgactttttgttctataagttttgctttctttctgcctcctatatagattgtattttgggttctatttttatttccttgtcttacctatatttctttttatctcatttcatttccttttaacttccttccattactttttcatttcactctgttttcttcttagaataccctgtttctgtttcatagaagccatctctttttgcactaagtcgaggataccagttgcctgaaattttcctctggatccttctctagatcattttcagaggtatgctgcttatcttcctgacagtgtttctttttcactttcctatagtatgtttttttgtagtccttactgaatttttccctttatttctcaaacaaaatgatatgtgtttagagtaactatgtggcaaagattgtctttaatcccacatttgtgttatggagaactccatcttagaccacctctggagagcagatagatgaacacaatttccactcaaattacttttctctgcttggcttttatgcagtatatccttgctctgctaatggggcatcttcttcattctccaatatctgaaagcaatagagtgtatgaaatttcaggtttcctacgtatgctactaccaggtttattcattttttaatattttctacagctcttcacttgtggagatcacatcctccagaatgcactacattgtcttcatcgctgccttatcatgcctgcccacttgttttctgagatttgaaatcactgcctagatgttataaaatataaatataataaaagattgtggaaaggagaatatagggatgggaagcctcagagatagaagaggttgtgttatagtttgtccacctgaatagaagagaacagttatgcagttctgtttggttgggcaacggaaccttgagagtaggagcagtgaaggctaagagggcttggctctaaagcaccttcccctcctttgctttaggcagctttataaagtgaagccaggaaatgcaatgaggtgatacctaatatagttttttctcagcctggcaattatacttaattcattcctacctgattgaagcattaagtttttagtaagttttcattctgttctacctcatattaatatgttagtgagaagttagaagaggctgcattgggggctgctgttcagaaaccgttgtgaatgctgtattatgttagtgatttttcttatctttttcatttaaatagattataaattaattaacatcctttataagtgataattacctttttgtgtcttttctcaggccatgcacagattgtccatctccttttagaaagaaataagtctggaactatcccatctgacagccaaggagccacacctttgcactatgctgctcagagtaactttgctgtaagtaaaacaagacaatgctcttttttcttagtgaaaattgttatttttatataattgtagattcatatgtagttgtaggaaataatacaacaagattgcatgtacccttcacctagttcactctgtttttatttatttatttatttatttttccaataagctttttgcactcctacacctaattcactctaatgataacatccaatacaatatcataaacaggaaattgacattgatacaatccctgatcttattcagctttgcccagatttacttagactcatttgtctgtttttatgtagcaattatcttttaacaatggttcatgctgttcactctgtgatgcaagtgatagcctgaggtttttttaagttgttagtcacatctgaagttttatacagattttattttaatgttaagcataacattttactttactgtaagaatacttcatctttatattacttttatagcactaagaacatcttagtgttcagccacgtgtaattgtccttaaagcagtgtggcaaggctttggaactagaacaatctcggctagaatcttgtctgtgcagtttgctaaactgtattaccttacacaagtttcttaatcttagtttcttcatatgtaagatgaggataattataccttttcttccaggattgttgtaaagattagagaaaatttatgacaagtgcctgctgtataccttagcatagagcaggtactcaagaaatagaatgtgctctcattactactagtgttgataattatgtatattatacgtctgagaatgcaaaaacgaattatttccaaaaatactgaatagtattcatagttcttcccctctactttctcatccattatgtccccagtccaccctgcaacatgatagtgtctaggctacttcagcttcctgagtatgaatgaccatcaagaaccagattcatccaaggatgcacatgttaaaacagattttgctgccttctacatgggtatgcatagtgaaacccttcgtttcatcaaattataataatactatcaggccggacacagtagctcacacctgtaatcccagcactttgggaggcagagatgggcggatcacctaaggtctggagttcgagaacagcctggccaacatggtggaaaccccgtttctactaaaaatacaaaaattagccgggcgaagtggctggcgcctgtagtctcagctacttgggaagctgaggcagaagaatcacttgaacctaggaggcggaggttgcaatgagccaggatagcgccactatactccagcctgggcgacagagcaagacttcatctcaaaaataaataaataaataaataatactatcatcaagcgtagtataatttcatctttgtgacctctccaaatgctctattaaatactcagatctctaaaatatcttatcttcacacacttcctactctggtatccagaacaactattcctataatccttgcttcttgtattcctaataacttattcaatttaccacctagagttttgacaaatcattatctattatcacctaacaaagcagtattttaggagaagctttttcttattacaaatagataggaaattaacctgaccgagtctagtcaatctatggaaatcacagctcaacccataaatcaacacaaggctattagataagtcatgttatcccctgtttacagaaaacaaaacaaaacaaaacaaggttccatgagattaaatgacttgctcatggtcttgaacccaaaatttagactccaaatttaatatatatatacagacaccaataattaaataggtgtgctaatggaaacaagaaagaatggtagaacattattctttataatgactcaataatataataatataataattgtattcaaagaaatattttgttggataatctgccaattccagagttgatttttaataattatacaaattatataagctcagtttcaagtcccttgatctccttgtcctctattaactgacaagaaattacaactcgttccttgaaaaatgcagacacattcccctacacacacagagccctgtaaacattcatcattaagtaaaaacatactcagcaaagaaatgtttgcaaattagtaaaagaaaacaaagcaaaaaatcacaaacttttacctcagtaactcaacaaatagtcttaaaagtagaaagcagtgtgtgatgctgtggaaggagtgctgtgatttaaccctggattcttcctttatctgccaccaatatttatatgaccttggaacctacatttcttcatcagtaaaataaggaactggattagatgagcccttgaattcttctttctataaaatactgagaatcaacattttatacatttttgatcagatcacagcctccagcactttttgtctgaaactcttttacctccattcaatcaaaagtttctatgatctttctaaagtttatgtgagtctgagttcagaataaagaggcaatttaaaatgctggaatattaacccccaataaaattgtcaggcactaatagaattgtcaagggtcctaattttttttgttgtttttgttttgtttttgtttttgtttgagatggagtctcactctgttgcccaggctggagtgcaatgatgcaatctcggctcactgcaacctccgtctcccgggttcaatcaattcccctgcctcaacctcccgagtagctgggactacaggcatgtgccaccatacctggctaattttttttatattttagtagagacggggtttcaccatgttggccaggatgctgtcaatctcctgaccttgtgatccacccacctcagcctcccaaagtgctgggattacaggcgtgagccactgcgcccggcccagtcctaatttttgtatgattccatagaagaaggacaattcagtaataaaggaattgctgaataaatatttgttttaatgaattcagcactgcatttctcagtaaccatcaatcagtattcaataaatgcattaaccatttcaaaaatgtttagtaactaatcacatagttccagtttgttctggatttaaggcaaaagcaaacaaacaaaaaacacagtgagagaatgcagaaccttctctggaggcatgcctgaatagatggatctcatgtaaaatgtccaagaaaacatgtattttatgggccaggtacagtggctcatgcctgtaattccagcactttgggaggccaagatggatggatcacttgaggtctggagttcaagaccagctttgccaacatggtaaaaccccatctctactaataatacaaaaattagccgggtgtgatgacactcagctacttgggaggctgaggcaggagaatcacttgaacctgggaggcagaggttgcagtgagccgagattgcaccactgcactccaacctgggcaacagagtaagactccctctcaaaaaaaaaagaaaaagaaaaaagaaaagaaggaaagaaagaaagaaagaaaaaggatggagaagagaagagaacaaggcagaaagaaagatttaaattttggtcattaataaataaaacactgaatacttctgagttttctaactctcactcaaacgatgacctataaagtttccaagcttgattgaagatgattattttccattttgaggatgttgaatgggagagttaggttatgtttatgaagtgttatggacactacaactaatttgtaaggacagaggattgttatcttcgatggaaattgtagttctgtcattaataaaaagataatttaatttgattcaaaagcaaggggaaaatgctttgcttcttaatggaattcacatattattatatgactttattaccacagaaaatactactgttttgtctccattttttaaatcaagttttcttacaggaaacggttaaagtgtttttaaaacatccttcagtgaaagatgattcagacctggaaggaagaacatcctttatgtgggcagctggcaaaggcagtgatgatgtccttagaactatgctgagcttaaaatcggacatagatattaacatggctgacaaatatggaggtacaggtgagaactggtggacacattcaatttgctttcatttaggttccaaagtgtagatgttgctataaaatttgtaaaatagcaacttgaaatcattgttcctaatctaatattgtttgactttggtcttcagttttaagtttgggtttgccaggatgtcactccaaaggttttatttcttccaagtattatggcaaagattagcatgtttctaccaaatgaatggttgcatttggtttaaaaccctggttgctccttagacatgattatggggactcttctgatcatttatctttttgtaaaaaaaaaaaaacctacactttaaaactatccatatttagtagtcatgaattatattttcaaaaatttagaattttatttaaggaatgcacacatctaagtgtattctcaccagtctcctttactgtgctcttttctcagttttgaatagcattaccacatcctgaatctcccatttttagagagaacctcccatggctctaagatgcttcaaagcttcaaatcaaccttgcttgaaaaactcttactagatacttcttttaatttctttctctaatagaagaggcctttacctatgtgttggttaatgaaaggtagtttttctgcctcagtgtcaacttggaggtctcttccttgtgtactgtatcgtacttacaactcagaaacagaaggagaaatcacataccaccacaataacactgaatagaataaaaaatcagtgatgggcttctccatgttattttttttatttgtagaaacatgctagagccatttgcatctactgttatcctgaataagatttttcttggccaccaaaactactgatgcaacagtagggagagagaagggaggggagttgctttacttaaaaaaatctccctccctataccgagacaaccacagcctcaaaaaaaaatattttaagaagacaattcaattttacaataaagactttaactttcaaaagtatttctctatgaaagccttacagcagatcttaaatttctttttttttctttttgagacggagtctcactctgtcacccaggctggagtgcagtggcatgatcttggctcactgcaacctctgcctcccaggttcaagcaagtctcctgcctcagcctcccaagtagctgggactgcaggtggacgccaccacgcccagctaatttttttttctttttgtattttagtagaggcggggtttcaccatgttgcccaggctggtctcgaacttctgagctcaagcaatccacctgcctcggcctcccaaagtgctggggttacaggtgtgagccaccgtgcccggccagcagatcttaaatttcttaaggggcatagtgcagacacataggatattgactttataaatgatctgaacatttaattttttgtcagttttccattatatattcttccactttatcactagctttgattttagtttaactttttcaggtatttgaataaggcatgggcaaggatacttgcactctttgaccaaaagtatctcatatgcaccatggttgaagttcagacataaattcttctcagattcattaatttgctggtttctttcttcaatggggattttattatgtcagagatgccttcctgacatttcttttctgtgaaagtgagttcctctccgtcatccctctacagggtttttttttttccttcccattaaaaagaggtcttaccaatagcaatgtatggacattatttagatcctgacttaaataaataaactataaaaaatgttaaagccatcaggaaaatgtcaatattattgaacattatagaatttctattagtattttttaggcgtgataacagcattatggttttaccagtgattaagctattgtctctcagcttcgtgttgatccttttgtcctttctttgcaatgctgggcctgggtctctgtaaatcacatttcccctttgccacaggtgctcttttagagtccaccaatagagagcattggagggagactggaaggctggaagatggacaagggattacatctttctgtttgtgtcctgctcttgcttttgtctcattttctttttttagaaaaaaaaagttaaaaaataataataatagtaataataagatgggatctcactgtgttgcccaggctggtctcaaactcctgggctcaagcgatcctcccacctcagcttcttcccaaagtgctgagaatatcataaggcagatgaaagcatcatataatatctgtgatatttcagtgatttcacatttgaagagcataagaacccttttcccccaaatgaaaaggggggaacccttttcccccaaatgaaaatttataaaacacctaacatataaagcaagtaagggttgagtggttctgactaaatcagaagtggagcattatccactcgactgtctattccctcagctaagtatttcaggtacctctatagaaagctgttgttctgaagaacatggtttggaaaaccctgggctacatttagttttaaggtgacttctaattctgaaatgctacaattctgtggtgtggcatcaagtatgaaatatactctatagataatatcaatgtcaaatttttttaaaaaataaaatttcaattaagtaaaagataaaattaatgatcatattaaaggaaattccccatttatgactatttgaatttatttttatttatttatttatttgagacagagtctcactctcttgcccgggctggagtgcagtgacatgatctcagctcactgcaacctccacctcccgggttcaagtgattcttctgtctcagcctccctagtagctgggactacaggtgcccaccactatgctggctaagttttgtatttttagtagaggcggggtttcaccatgttggccaggctggtcttgaacatctgacctcaaatgatccacccacctcggcctcccaaagtgctgggattacaggcatgagccaccgcgcctggcctgaatttactttatttaaaaataaccttaggccgagcgtggtagctcacgcctgtaatcccagcactttgggaggccgtggcaggtggatcacctgaggtcaggagtttgagaccagtctggtcaacgtggtgaaaccccgtctctgctaacattataaaaatgagctgggtgtggtggtacacgcctataatcccagctatttgggaggctgaggcagaagaatcgtttgaacctgggaggtggaggttgcagtgacctgagattgaaccactgcactccagcctggatgacagagtgagactccatctcaaaaaataaaataaaaataaccttgaatttagctattgttactccctctttgaaaagtgctgtaagtttatatagaaacttaattttttaaaaatataactttatattatggaaatcttcaaacacattcaaaagtagacagttgtccagtgaactcaatatagctctcacccagcttcaacaattatcaatacgtggctaatcttgttttatttaaccacgattcatttcctctacttctgattgttttgaaaaaaattctagagtcatatcctttcatctgtaaatgtgaatgttctaccctgtgctgtctttcatgttatagcacttcagatatttgaagttactcacgcctgtctgaatcttgtctaggtcaaactaacattcagtcatttaggtcagtggttcccaaattcaagaatggcataagaattactagaggtgtttaaattcagattcccaggctatatggacaaagattctatgtcaaatcccgtagcaagtcctgttgactccacctccaaaatgtgttctaaatcattctgtttctcttcatctccattgcaaccaccctaatcagaccaccatcatttttcactcagtctactgccaaaatccttactggtctccctgcttatattctaatctactacaaatactttctcctcagaagagctagagtgatctgtttaaagcataaatcagataatatcactccactatataaagcccttcaaatgtcttccatcactgactgataggaccatttgtgatctggccttttctatgtttctgacttactccactgtcacttactgtgctgcaactacccttccttccttaaacatacacagtcgttcctgtcctgtactaactcttccctttgctcaaaatacgctgtctttttcatggttcaggtctcaacttaaatgtcagctcataaccaccaatcaaaagtagtccctcagtgattctacatatcaaaatagtttttattactttaattataccaattatcactatataataactttattgatggggaattgttttgtttttgttttgttttgttttgtttttgttttgttttgcttcccttcctagaatgtaaccttatctattgtattctttgctaaacacccagcattataatactacccagcccaaaaatctgcatccaggtttgctctgtggatcaccctttatgaaagagacattgttctaggccttatagagccataatacttagaactggccaaggcctctaaagtgttattgtggctaattcaaacctatagagggatggcataagccaagcattacactggagtaacatagagaggagtcagtgtacatgaaacacatttaatcaaaattactctttaaaacctctggacagcacaagagaggaggccatattccatctcagtttttctccagtgaagcaaattcctgtttcttttcttttctttttttgagatgaggtctttctattttctccagactggtctagacctattgggttcaagcagtcctcctgcctcagcctcccaagtagctgggactatagacatgtgccacctcgctgtttcttaaattgagccctggggaagtagctggcttgtagctgatattgtattaaaaatgcactcaatgcagcaagatgtgcgtgctttcagtaccactggggtacttcagccaactgaaggaacagtgcatgtaaccaatggaaggaacagtagattgatgtctccagtcacatgaccccttaggggcatatgcttattgagtgggttgttgggcagaattgtgtacatcatttaaatcattcctctttgttattgttttcttgctctcttaaagagaaaaagagaaaactaatagctgaaaagagaaaactagtagctgagaagaggataccatttcagaccaacaggatggaaaggaagaaaatagcaagaagagaaaggtagaaggaaaggagaaagtgtgagtaatacatatgaataggaaggaaggcagaatctaaaaaagcaaaaaataaattagtgaatccttaaaatggagattgcatttattcaaaatgatggggaaatcaagagaggaaaagacatataataatttaaaaggtgaagttgttattgactagttcatcactttctgttggttcccttttagctttgcatgctgctgctctttctggccatgtcagcaccgtgaagttattactggaaaataatgctcaagtagatgctactgatgttatgaaacatactccacttttccgagcctgtgagatgggacacaaagatgtgattcagacactcattaaaggtgggctaataagagtactcctaataagtctctcttaacaggtaggaattcttgcatactctgtttaagataaagctttccttagcagaaagctgcacaagtacaaggatgaagggatgatcacacaacatggcatgaggaacctcaagttctactcctagctccacttgttgggagttgcttgatacaggaaaagtaatttcacctgcctgatcttcacttttattttatataaagggggactgattcctagccagtccaatttacaagcttattgtaaaaatctgatgtagacaacgtatgtggaagcatttccataagaataaagcattaaaggaacaattgttattgtttttcttctattcattttaataaatgcatttaaggaacaattgttttttctactcctactcattttaataaaagctatttatattagacattctcattatatttgtgcttttccaggtggagcaagggtagatctagttgaccaagatggacattctcttctacattgggcagcactgggaggaaatgctgatgtttgccagatattaatagaaaataagatcaatccaaatgtccaggattatgcaggaagaacccctttgcagtgtgcagcatatggaggctatatcaactgcatggcagttctcatggaaaacaatgcagaccctaacattcaagacaaagaggtagaaattctgtcttttctatattgtttgctccaaagaatttagagtatttcttctttgttgtaaacataagtaaaacaacagtttacaagatgaagagatcacccacaaatccatctgttaatcatgactattatttgtccatgttctcttccagtctttttctatatatataatttaacatagttataatataggctgggaataattttataacttttataaaagattacatggcatacacatgtatgcatctataaacataaatatatgattttctttttttttttaattatactttaagttctagggtacatgtgcacaacgtgcaagtttgttacatatgtatatatgtgccatgttggtgtgctgcacccattaactcatcatttatattaggaatatctcctaatgctatccctccctgcttcccccatcccacaccagcccccggtgtgtgatgttccccaccctatgtccaagtgttctcattgttcaattctcacctatgagtgagaacatgcggtatttggttttctgtccttgcgatagtttgctgagaatgatggtttccagcttcatccatgtccctacaaaggacatgaactcatcttttttttgtggctgcatagtattccatggtgtatatgtgctgtattttcttaatccagtctatcattgatgtacatttgggttggttccaagtctttgctattgtgaatagtgccgcaataaacatacgtgtgcatgtgtctttatagcagcatgatttataatcctttgggtatatgcccagtaatgggatggctgggtcaaatggtatttctagttctagatcctttaggagtcgccacactgtcttccacaatggttgaactagtttacagtcccaccaacagtgtaaaagtgttcctatttctccacatcctctccagcacctgttgtttcctgactttttaatgatcgccattctaactggtatgagatggtatctcattgtggttttgatttgcatttctctgatggccagtgatgatgagcattttttcatgtgtctgttggctgtataaatgtcttctttagagaagtgtctgttcatgtccttcgcccactttttgatggggttgtttgatttttttcttgtaaatttgtttaagttctttgtggattctggatattagccctttgtcagatgggtagattgtaaaaattttctccagtttgaaggttgcctgttcactctgatggtagtttcttttgctgtgcagaagctctttagtttaattagatcccatttgtcaattttggcttttgttgccattgcttttggtgttttaatcatgaagtccttgcccatgcctatgtcctgaatggtattgcctaggttttcttctagggtttttatggttttaggtctaacatttaagtctttaatccatcttgaattaatttttatataaggtataaggaagggatccagtttcagctttctacatgtggctagccagttttcccagcactgtttattaaatagggaatcctttccccattgcttgtttttgtcaggtttgtcaaaaatcagatgattgtagatgtgtggtattatttctgagggctctgttctgttccattggtgtatatctctgtttaggtgccagtaccatgctgttttggttactgtagccttatagtacagtttgaagtcaggtagcgtgatgcttccagctttgttcttttggcttaggattgtcttggcaatgcgggctcttttttggttccatgtgaactttaaagtagttttttccaattctgtgaagaaagtcattggtagcttgatggggatggcattgaatctataaattatgttgggcaatatggccattttcacgatattgattcttcctatccatgagcatggaatgttcttccatttgtttgtgtcctcttttatttcattgagcagtggtttgtagttctccttgaagaggtccttcacatcccttgtaagctggattcctaggtattttattctctttgaagacattgcgaatgggagttcactcatgatttggctctctgtttgtctgttggcatataggaatgcttgtgatttttgtacattgattttgtatcctgagactttgctgaagttgcctatcagcttaaggagattttcggctgagacaatggggttttctaaatatacaatcatgtcatccgcaaacagggacaatttgacttcctcttttcctaattgaatacctttatttctttctcctgcctgattgccctggccagaacttccaacactgtgttgaataggagtggtgagagagggcatccctgtcttgtgccagttttcaaagggaatgcttccagtttttgcccattcagtatgacattggctgtgggtttgtcataaatagctcttattattttgagatacgtcccatcaatacctagtttattgagagtttttagcaggaagggctgttggattttgtcaaaggccttttctgcatctgttgagataatcatgtggtttttgtctttgattctgtctatatgatggattacatttattgatttgtgtatgttgaaccagccttgcatcccagggatgaagcccacttgatcatggtggataagctttttgatgtgctgctggatttggtttgccagtattttattgaaaatttttgcatcgatgttcatcagggatattggtctaaaattctctttttttgttgtgtctctgccaggctttggtatcaggatgatgctggcctcataaaatgatttagggaggattccctctgtttctattgattggaatagtttcagaaggaatggtaccagctcctctttgtacctctgggagaatttggctgtgaatccatctggtcctggacattttttggttggtaggctattaattgttgtctcaatttcggagcctgttattggtctattcagggattcaacttcttcctggtttagtcttgggagggtatgtgtgtccaggaatttatccatttcttctagattttctagtttatttgcatagaagtgtttatagtattctctgatagtagtttgtgtttttgtgggattggtggtgatattccctttatcattttttattgcatctatttgattcttctctcttttcttctttattagtcttgctagttgtctatcagttttgttgatcttttaaaaaaaaccagctcctggattcattgattttttgaagggttttttgtgtctctatctccttcagttctgctgtgatcttagttatttcttgccttctgctagcttttgaatgtggttgctcttgcttctctagttcttttaattgtgatgctagggtgtcaattttagatctttcctgctttctcttgtgggcatttagtgctataaatttccctttacacagtgttttaaatgtgtcccagagattctggtgtgttgtgtctttgttctcattggtttcaaagaacatctttatttctgccttcattttgttatgtacccagtagtcattcaggagcaggttgttcagtttccatgtagttgagtggttttgagtgagtttcttaatcctgagttctaatttgattgcactgtggtctgagagacagtttgttgtaatttctgttcttttacatttgctgaggagtgctttactatgttgtcaattttggaataagtgcaatgtggtactgagaagaatgtatattctgttgatttggggtggagagttctgtagatgtctattaggtccgcttggtgcagagctgagttcaagtcctggatatccttgttaactttcagtcttgttgatctgtctaatgttgacagtggggtgttaaagcctcccatgattattgtgtgggagtctaaatctctttataggtctctaagaacttgctttatgaatctgggtgctcctgtattgggtgcatatatatttaggatagttagctcttcttgttgaattgatccctttaccattatataatggccttctttgtctcttttgatctttgttggtttaaagtctgttttatcagagactaggattgcaacccctgcctttttttgttttccatttgcttggcagatcttcctccatccctttattttgagcctatgtgtgtctctgcacatgagatgggtttcctgaatacagcacactgatgggtcttgactgtatccaatttgccagtctgtgtcttttaattggagcatttagcccatttacatttaaggttaatattgttatgtgtgaatttgatcctgtcattatgatgttagctggttattttgctctttagttgatgcagtttcttcttagcatcgatggtctttacaatttggcatgcttttgtagtggctagtaccagttgttcctttccatgtttactgcttccttcaggaactcttgtcaggcaggcctggtgctaacaaaatctctcagcatttgcttgtctgtaaaggattttatttctccttcacttatgaagcttagtttggctggatatgaagttctggtttgacaattcttttctttaagaatgttgaatatcggcccccactctcttctggcttgtagagtttctgccaagagatctgctgttagtctgatgggcttccctttgtgggtaacccgacctatctctctggctgcccttaacattttttccttcatttcaactttggtgaatctgacaattatgtgtcttggagttgctcttctcgaggagtatctttgtggcattctctgtatttcctgaatttgaatgttggcctgcctttctaggttggggaagttctcctggataatatcctgaacagtgttttccaacttggttccattcttcccgtcactttcaggtacaccaatcagatgtagatttggtcttttcacatagacccatatttcttggaggctttgttcatttctttttactcttttttctctaaacttctcacttcatttccttcatttgatcttcaatcactgataccctttcttccacttgatcgaattggctactgaagcttgtgcatgcctcatgtagttcttgtgccatggttttcagctccatcaggtcatttaaggtcgtttctatgctttttattctagttagccattcgtctaatctttttccaaagtttttatcttctttgcaatgggttcgaacatgctcctttagctcggagaagtttgtaattaccgatcgtctgaagcctacttctgtcgactcgtcaaagtcattctccatccagctttgttgtgttgctagcgaggagctgtgttcctttgaaggagaagaggcactctgatttttagaattttcagcttttctactctggtttctccccatctttgtggttttatggtctttggtctttggtctttgatgatggtgatgtacagatgggattttggtgtggatgtcctttctgtttgttagttttccttctaacagtcaggacccttagctgcaggtctgttggagtttgctggagatccactccagaccatgtttgcctgggtatcaccagcggaggctgcagaacagcaaatattgcagaacggcaaatgttgccgcctgatccttcctctggaagcttcgtctcagaggggcaactggctgtatgaggtgtcagtcggcccctactgggagatgtctccccgttaggctattgggggtcagggacccacttgaggaggtagtctgtccattctcagatctcaaactccatgctgggagaaccactactctcttcaaagctgtcagacagggtcgtttaagtctgcagaagtttctgctgccttttgttcagctatgtcctgcccccagaggtggagtctacaaaggcaggtaggcctccttgagctgcggtgggctccacccagttcgagcttcctggccggccgctttgtttacctactcaagcctcagcaatggcggacgcccctcccccagcctcgctgctgccttgcagttcgatctcagactgctgtgctagcagtgagtgagtctccgtgggcgtgggaccctctgagccaggtgtgggatataatctcctggtgtgccgtctgctaaaaccattggaaaaagcgcagtattagggtgggagtgtcccgattttccaggtaccatctgtcacggctttccttggctagaaaaagggaattccccgaccccttgcactttctgggtgaggtgatgccccacccttctttggctcacactccatgggccacacccactgtccagcaagccccagtgagatgaacccggtacctcagttggaaatgcagaaatcacccgtcttcttcatcactcatgctgagagctgtagactggagctgttcctgtttggccatcttggaactggggcctttttttttttttttttcctcccaggctggagcgcagtggtgcaatcttggctcactgcaacctccacctcccgggttcaagcgattctcttgcctcagcctcctgagtagctgagagggtacttggcctctcaggcatccaccaccatgcctggctaatttttgtatttttagtagagacggggtttcgtcacattggccaggctggtctcgaactcctgatctcaggtgatccgcccgcctcggcctccctaagtgctgggattacaggcatgagccaccacacctgaccctattacatgattttcttttcttttctttttttgtttgttgagatggagtctcgcttcgtcacccaggctggagtgcagtggcaccatctctgcccattgcaacttctgcctcctgggttcaagtgattcttctgcctcagcctcctgagtagctgggattacaggcgcacaccaccatgcccagctaattgttgtatttttagtagagatggggtttcaccatgttggccaggctggtctcaaattcctgaccttgtgatctgcctacctcagcctcccaaagtgctaggattacagatgtgagccaccatgtccgacctattacattttcttttcttttttttttttttttttttgagacaagagtctcattctttcacccaggctggagtgcagtggcacaacctcggcttactgcaacctccacctcccaggttcaagcgattcttctgcctcagcctcccgagtagctgggattacaggcatgcaccaccacatctggctaatttttataatgtttttagtagacacaggatttcaccatgttggtcagtccggtctcgaactcctgacctcgtgatccacccaccttggcctcccaaagtgctgggattacaggtgtgagccaccgtgcctgcctattacatgattttcaaaccacattttgtttacttaaaattgtcaccgttttctcatgtgatatataatctttttaattatcatgaatgcttaaaattccaaggttccaagaactttatgtttaatagcttattcaatccttacaataatcttataaagtagttactattattattctcattttacagatgaggaaattgaagctcatgtagtttaagtagttagcctaagataacaacagtgggggaagcttggggggagatttaatatccaaactatgctcttaacccaaatataggttaaataagtaacttcctattgctggtcactttttcactattataggtaatgtttcagtaattatctttgtgcatttaacttttttcctttgggattatcgcattagaataattccccctaagtgagattatcaaatcaaagcaaccaatcgtttattaatatgattaggctctcatatatactgccaaactgatttctaaaagattcaggttaatctttactttccccagttgcgtagtattaatttatctcagtttagccagtattaacttttttgctaattaaattattttaactctttaaaaatatttgcatgttaattatgttttccaagtcagaaaattagctgtccctattaactcaagtccctatgaactcattgaacaagtatttatcaagattgttactgtatgtaaaagtaacaaagaaaagtatgtaaaatatggtccatgtctttatgatactaggaatgcatcttttttttttttttttttgagacagagtctcgctctgtcacccaagctggagtgcactggcccagtctcagctcactgcaagctccacctcccgggttcgcgccattcttcttgcttagccttccaagtagctgggactacaggtacctgccaccatgcctagctaatttttttttgtatttttagtagagacggggttcaacatgttagccaggatggtctcgatctcctgatcttgtgatccgcctgccttagcctcccaaagtgctgggattacaggcatgagccaccgcacctgggaggaatgcatcttttataatttgtagtacttttaatgttttaccaagttgccagttttttacataagtagaatattaagcatctttccagttctattagctgctatgtgtattgctttggattgtctacataagcaatcatgcatgctatctgtgaataataacatttttatttcttcatttccaatctttatacttttcatttctttgctgtgccatattgaattggaaccttcaatacaatcttgaatagaattggtgataattggcatccttaattaattctggtttctcagatggcaagctttcaacattttaccattgagtaagatgttgctatagatttccttatattcccacttgccaagagtttttttaaatcatagttgggtttttgtcaaatactatttatgcatttatcaacaagatttttttttcctcttttctgttaatatggcaaattacattgactgattttttttttagatgttaaacaacccttgcatttctggagtaagccccatatatattatgtacttttatatactgatgtattttacctgctaatattttaagatttttgcgtctatgtttatgagagagattggcctataattttcctttcttgtattatagttgcaaggttttggtagcaaggtaaggctaaccttgtcaaaaaaaaaaagttagaaaatagtcccttgtttttattctcttggagaataaaattggtattacttcttccttaaatgtttggaagaatttcctcttgaagttatctggtgttggggttttctttgtgtaaaagttttaaataaccaattcaattccattaattattcagattttctaattatttttctttcagcttggtaagttgtactttttaaggaatttattcattttattcaaaatgtcaaatgtatttgcataaattttgtcacacacatattcccttatcttttttatgcctgtaggacctgtagtgagttcctcttgtttatttcatatattggtaatgtgtgttttctctttcttttttaaaaattttctttattccttacctggagcactaaaaaaaaaaaaaaaaaaaaaaacttgatattcatctcctcaaaggacttatttctgtctttgtggattttctatattttgagattttgggtttttttgtttgcttgtttgtttgtttgtttcttaagacagtatctcactctgccacccaggctggagtgcagtggcatgatcatggctcattgtaacctcaaccttcccaggctcgggtgatcatcccacctcagcctcttgagtaactgggactacaggtgcacaccaccacacctggctaaattttttgtatttttagtagagaaggggtttcaccatgttgcccacggctgttcttgaactcctgagctcaagcaatctacctgcctcagcctacgaaagtgctaggattacaggcatgagccactgcaactggcctgtattttgagtttgtttactatttcattggtcttgctcctgtcttttttattttctaacttctaatttctatttcctaatttctattttggtttattctctgacacatagattatttagaagtgtactgtttaattttcagtcagttgagtgttttctcattttttaaattgattatattagttatgtattgctgctgtaacaaattaccacaggtttagtggcttagaacaacacagatttattatcttaccattctagatgtcagaaattcaaactgggccttactgggttaaaaatcaaggtgtcaccaggactgcttttcttttggtggatctaggagaggatccatttttttaattttttagtttctcaaggctgcccacattccttggctgatgaccccattcctccatcttcaaagccacattggctggttgagcctttctctgtatcacttatctgtataattcttacactcaccctcctgactccctgtttcccttataaggacccttgtgattagatcaggcctacccagataatccaggataatcttcccatctcaagttcagctgattagcaatcttaattccatctacaaccttaattcttccttctcatgtaacataacatattcacaggtaccaggcactaggatatggacatctttgtgagggagtgcattattttttttggaactttatggcccagcatatgattgattttgggaaatgttctatgtacatgtgaaaagagcactaactctgtccttgttggatgcagtgttttttatttatatatatatcacttagggcccatttttcaaagtctgttgtttaggtcttatatatctttactgctcttttgtctgctctatcagttgtttttaaaagataagttaaaatcccactatgactatggacttgactatcttcctttttaattttgtcgatttttcccttgtatatttggaagctttgttattagatgcacacaagtttagcattgtgatatcttcctttttgactcctttaacactatgaagtgtccctctttatgtctagcaatgcttcatctcttctttatctttcatgacattgaactttttaaagaatacaagccatttattttatagaatttgactcaatttgtgttagtcttatgttccctcataattagattcaggtttcacatttttggttggaatattacataagtaatatgaatccttctaagggtattacctctggagatatatgatgccccttatcacagccttaattggccaggcatgttggctcacgcctgtaatcccagcactttgggaggctgaggcgggtggatcacctgaggtcaggagtttgagaccagcctggttaacatgacaaaaccctgtctctactaaaaatacaaaaattagctgggcatggcggcgggcacctgtaatcccagctacttgggaggctgaggcaggagaattgcttgcacctgggaggtggaggttgcagtgagctgagatctcaccattgcactccagcctgagcgacgagagcgaaactccgtctcaaaaaaaaaaaaaaaatagtgttaattatgagctcttggatcaaatatcatttgctttctccactgtatatttaatattttccctttttgtaaataagcaatttggaaaaatgattgcttatattaattttgaattagcataaataaccacatatccaaaaatacttactccagatgtacttgatttttgtttatgcttatagggaagaacagctttgcattggtcctgcaacaatggataccttgatgccattaaattactgctagactttgctgctttccctaatcagatggaaaacaatgaagagaggtaagttgttgttgacttttttttttttttttgagatggcttctcgccctgtcactcaggttgggttgcagtggcacgatcttggctcactgcaaccttcgcctcctgggttcaagcaattcttctccttcagcctcctgagtacctgggattacaggcatgcacgatcacacctggccaatttttttgtatttttagtagagatggggtttcaccatgttagctagggaggtctcgaactcctcaccttgtgatccacccacctcggcctcccaaagtgctgggattataggcgtgagctaccatgcccagccaagttgttgacttttttttaaaaaaagtgctctttatcatacatcctttctaccagattttttaaatctcaaggttagatattgttcagaaataataactatactcataataaaacattacactaagaaatactgagccagaatagaagagcaaaactttcatgcaatgttgatttagaatcatgggatcttatagctcttcagaatttcatctattgcctagggcaagcatgtattttgcagatgagaaaattttagtcctgcttctgacttctggctaacataacgtcagtgaaatcctgattgactgggcccaggagtacatttaggccagcggaatgtgttatatattccagagatttctcttgatgaagaggatattatcagtcagtagacaaagagatgccaccatgtagcatgaaaacataaggagaagctaagatgaaagttcagggtttaatctaaatgcagattgcatgaataatgtaaggtctggagaattatattagggttattgaccaagaatccaggcccaataaaaaggaccaaacaggccaggtgcggtggctcacgcctgtaatcccaacactttgggaggccaaggcgagcagatcaactgaggtcaggagttcgaaaccagcctggccaacatggtgaaaccccatctctactaaaaatataaaaaagttagctgggcatggtggtacatgcctgtaatcccaactactcaggaggctgaagcaggagaattgcttgaacccaggaggcggaggttgcagtgagcccgagatcatgccactgcactccagcctctgcaacagagtaagactctgcctaaaaaaaaaggaacaaacagaatgtgaagtctaaggaatagcgattcttggtggtgttagatctaggaagattcttataatttgtaggtaacaactgagtttgtgatcacacttccatacctgaggtcctgttacaggaaaggggtcccgatccagaccccgtcagagggttcttggatcttgcacaagaaagaattcagggcgacttttgcagtgcaaagtgaaagcaagtttattaagaaaggaaaggaataaaagaatggctactccagagacaaagcagccttgagggctgctggttacccgttttcttatggttattttttgatgatatgctaaccaaggggtggattatccatgcctccccttttcagaccttatagggtaacttcccaactttgctatggcatttgtaaaatgtcacagcgctggtgggagtgtagcagtgaggacaaccagaggtcactctcgtctccatcttggttttggtgggttttggccagcttctttactgcaacctgttttatcagcaaggtctttatgacctgtattttgtgctgacctcctatttcatcctatgccttagaatgccttaaccttctgggaatgcagcccaacagctttcagcctcattttacgagatcctctttaagatggagttcacatgcctctgacaatccctctgacctaggtctttgtgttagttttcatgtttcatggatgctctaactaaaatggctcctgctataataccattcccatcctcttagccaccacccattctttctattagttggtggaaaactttattgagaagggacttctctacgtccatctcagaggaaacatgttcctgttttctagaaccaacccctttaccacttctttcagaaacttccctcattagagggagagctgaagatgtctccctttgaaactctaaaaaaaaaaaaaaaaaaaaaaaagaaagtttaagaatccttagacttagtgatgacttgttttgtttctataaaaatttattctgtgtaacagcatttaccgcctgactgctatatttttaaggaaacaatgaaattttttaactcaatttccatttatatgctaaaccttgaatatgagacctaagtaactgcatgaattaaggtgtttactgcctcccggaataaacatatgttaattacagaccaaaagaccaaaggaaaaatcctcctaactttacttgccaaactatagataaaaagagacagtggcaataactcagtctttgttaatgtttcatcagcaatgtaccttgatgtacaaatgtcagaacttggcactgccttttacgtttattgacattccagtttaggcattctactcatcccatcagaccattcccacatggcaggtccaattgtatcttgtctgttgtctatatccacattgtttcttggttggttaccatcagtgtagtgctaatttttacttctcatacattgacactagtcagttgatgaacaacgtatagacataatttttgccaacttctgctgactttcagtcaataactatctgacacactcaccccaaccctgatgggaatattcacagcatttgaatttttctaaattgaatttgggatgaaaaaagattcagtagtaataatcacaatgtgttttatgatcacacttgttttaaatactgggtatagacttcaatcttaaaatgatgctagatatttggattgtgtctctgaataaaaaattgagaatcctaatttgaataaaccaattacaaaaatatattttttgagaaaattgggtaaatttgattatgaagtggtccttagattttactaaggaattcctgttaattttgttagtataatgacattgtgggtatgcccatattatttactgatgaatacttaaacacatagagatgaagatgttacaggaaagtggtcccgatcccgaccccaagagagggttcttggctctctcgcaagaaacaattcagggtgagtctgcagtgcaaagcaaaagcaagtttattaagaaagtaaagtggtgaaagtacagctactccatagacagagtagggcgttcccgaaagtaagagaggaacgtatccaccctaagtacaatacttgtttatatacaggattaaaaaaaagattatggggagatgtgctgtgctacaagggtttgtgataaaggattcattttcttaattactacatttttcaagaatcaatattattatcttcaaagcaaaattaggaatgcctttgttctccagatatcgggatattaggactctctcaagtctgggtctgtttagtaaacatcagtatgttcccttaacggtaaacatctagaggctaggaatacctttctgggaatgcagcccagcaagccccagcctcattttcgtagccctcactcaagatggagtcctctggttccaatacctctgacaaaatgataggagttccgagattagctataaaatactctagcaaaaataaaaaggaagggtctagatgaagcaaatgtagcaaaaaattgttaaatttaggtattgagtgtataagtgtttattatgttattctctctaccttttttatgcttaaaatttttcataataaaaatatatttttttacataaaaatatttaagatataattttcaatccaaaagcagcctaagaagtctagttcttctctttacaaatgaggaaacaaaagcccagagaagttaagagaatgcccagggtcacacaggtcccctgactcccagatcagcattctttagggtatattaagctacatgttatttccttttgtaatatttgtaggtaaaggaataatttgggccctatattttataaactaaattttgttaatcctgcttatatattatgtgaaggatactacctattaataattatagaaaaaatgatcaaacttaccaaatacgtatgttgtttgcacattgatttaagaaacagttttattctataggaaacatactaagtaattgatatatgtgttgtggaaggttactgaactgggagacatgttatcttagttctagtctgcattctatagaaacaatttacataacctttggtaagttgcttaacctctctggagctgttcatccatttataaaatgaaggtattgaactaaatgacctctaaaattcaatttagctctactattgcatggtttaatgactctatgataattttttccattagagaaagtacagtcaagaaaggcattttagaacttgtagcaaaattttttttaattctcctgaatttaaaaaatgttatccacttataaataatgttttaaagtttatgtagatgcctctcagatggtccctgaacagtaagtggcaaatgaagctgtcctaaaatagaggttccttaatttcagtgtttggggtttcttcccaaactcagtttccttactaaagtgatcaaaatactcctatagtgaaaaacctcttccttttatgtcttaactgtgactgttaggtaagttttgaagataaataattttttttctataatcagatgattttctatgtctagtcatgcatccatataatcatccttttttctgcctcataaatcatctgatgttttttcctaagaccttttatgggtttggctggtcagagtcatcctgagaggaatcagcatcagtggtggtcatgggatggtcatagatactagtttgggtcctatggagataatatttttgataagcagctgtggtattgcaagccatacagcagtgaatgtcctgtaataataacaatcagagctgacatttattaactgtttcctttggaccaggaacattgctatcctctttacacttatttttccattttctcctcatgccaagtctgcaacgtattacattgtttaacagatgaggaaaactgaggcttagagatataaagtaagttgtttaaaaagtgatagtcatcgttaccattgttggatggtagaatttgggggattttttttacttcaattttttttttgcagtgttttgagttcataaaatctatatcattttgacaaagtagtaatttttgtttaaaaaaggaaattgtatctcccagatatgaacagtggttaattctcagggtgggaatatggatgatagctattttcctctgtatatttacccaattttttatgtttccaaaatttatgaagaaatttttttaaaagaataggctgggtgcagtggctcacacctataattccaacactttggtaggccaaggcagaaggattgcttgagctcaggagttcgagaccagcctggagaacatggcgaaatcccatctctacaaaaatacaaaaactggccgggtgcagtggctcatgcctgtaatcccagcactttgggaggccgaggtggtcggatcacctgaggtcaggagttcgagaccagcctgaccaatatgatgaaaccccgtctctactaaaaatacaaaaaaaattagccgggtgtgatggcatgtgcctgtaatcccagctactcgggaggctgagatgggagaattgcttgaacctgggaggcggagattgcagtgagctgagatcgcgtcattgcactccagcctgggcaacaagagcaaaactccatctcaaaaaaaaaaaaaaaaaaaaaaaattagccagccttggtggtacatgcccgtggtcccagctatttggggggctgaggcaggaggactacttgagcccaggaggagtcgaggctgcagtaagctgtgtttgcaccactacactccagcctgggcaacagagtgagaccctatctcaaaaaaaaagaaaaaaaaaaaagaatgtgccgaaaacagcacacctagaaagttgccatttgagattcaaatatacaacaatatgacaataatattcatcgtttctaaataatgtatttatcaaaacagtgatgtatatacactgtacaaaatttaaaaggatgttcactgaagactcaatgttcctcctacccctgcctctgagacagctagttttcctcccccagaggcatcactgttagcagtttcttggaaaacttctgaaaatacatttttcatagataaacatacagggatatattttttatacaaatggaacatgccataataactcctgtttcttgcttttttctttgtcttcatttgacatcctggagattgtttcttatttattcatatatagcagtaatgactgcatatacagatatcttcattatatggatggcctgtgcattgtttaagcagtcctctgttgatagacattgaggttgtttctattcttttgctatgactagctgtacttctatgagtagccttgtacataaagcatttcacatgagagcagatctataagataaattcctaagagtgaaacggctatgtcaaatggcatatatacatgaataattttgataaatattgccaaatcatcctccctagaagttaaagtagtatatgaaagagcctgactctctctgtccttgctagtgcagtgtgttactaacttttctgatttttgcaaatctgatcatcattgaaaggtactctctcatgttagtctaattcatatttctcttaaatgagtgaggttcaacatttttatgtgttaagagctattagtactcttctgggaactgttatctttgtctttgatgtcttttttactctgtaaaattttgttatttttatgtagtcagatttgtcaatcttcttttatggtttccgaaattttttttttttttggagacggtgtctcactctgtcacccagtctggagtgcagtggcatgatctcagctcactgctgcctccacctcctgggttcaagcaattctcctgccttagccttctgagtagctgggactacaggtatgtgccaccatgcctggctaatttttgtatttttagtagaaacagggtttcaccttgttggctaggctgtctcgaactcctaacctcaagtgatctgcccacctcggcctcccaaagtgctgcgattacaggcgtgagcctctgcgcccagcccttttatggtttctgaattttgtatcctttttttagaaaagacttccaacatcattttttaatcttcctggtttcttctggtactttcatggttcctttttaaaatatttagatctttgctctatccagaatttattttggtataaaatgtggttataagaatctcttttttttccccagatggctacctggttgtcccatcactatttatttagtaatccatcttttctgcagaaatttaaagggccattcttatcatatactgaatttctccttttggagttctgttttttacttcataagcattaactgtcagtaatcatgggctcaaatttacaaatctcacaatattttcactacctttttagatggggcagggaattatttggcacatgggaaagaagagaagtgatcatgtctttccaataggcccctatttgtttgccagggagtaaaactcaggaactgacatggttagcagcacaaagcacctgacccacagtcatagtcaaccttgttttgtgcccctcggagaaaaaaagaatagccctgttatagagaaggtggctttgcctggggaatattccacatcttagaatgaagtttccttctgctgcataataatattttcagtttaactgtgccttaaattacattctaaaattaaaaaaaaaagaaatcttcctcccacttcagatacacaccccttgattatgctttgcttggtgagcgccatgaagtgatccagttcatgttggagcacggtgccctgtccatcgcagccatacaagacatcgccgccttcaaaatccaagctgtctacaaagggtacaaggtcagaaaagccttccgagacaggaaaaatctcctcatgaagcatgaacagttgagaaaagatgctgctgccaagtaagtatgagctacgcagattgcgttttcgccacccagaatcagggtggaagtgggggtgtggggggtgctggggtggccaggagagggaaacagatgagaatctgaattactgttggtccctgcaaccggtcatcttccctcttctcagcactccgtcttctggaaccgaggctgcagtgaaggacagaggcctaacctctgctgggtagtgattcctctagactagtcccaatgtttcagcccagggacaaaccactcccacccatgggagggagttggggatgggattgcttcctagaataagctgtaaagaaataactgctcctcttacccttcctctctttccaaaagaaacatgccaatatctagcctactttcactagaccagtctaagtctggttttaatttgattaaagcaaacaacttggtttttttttccactcagttctttttttttttttttttttttttttttctgagatggagtctcacttgccgcccaggctggaatgcagtggcacaacctcggctcactgcaacctccacctcccaggttcaagcaattctcctgccttggcctcccgagtagctgggactacaggcgcgcgccaccacacccgggtaatttttgtatttttagtagagatggggtttcaccatgttggctaggctggtcttgaactcctgacctcaaatgatccacccacctcatcctcccaaagtgctgggattacaggcataagccaccgcacccagctttccttcacccatttcttaacacatctgtactaaataaagtaatttactcaagaaatattgattgaattcttactatacagacaaaatgcttggctagagcccagagagaaaatggcaactaaaaaagcaaaatcccccctgcctcaaggacttcgcattttttttggacgatgatacaaaatagctgtctgtgcctcttgcacattctgattatttcacataaatgattgattttaaagctgggtgcggtggctcacacctgtaatcccagcactttgggaggccaaggcaggcggatcacttgaggtcaggagttcaagaccagactggccaaaatggtgaaacaccatctctactaaaaatacaaaaattagctgggcgtggtggttagcacctgttatgccagctactcgggaggctgaggcaggagaattgtctgaacctgggaagcagaggttgcagtgagcccagatggcaccactgcactccagcctgggcaatagagtcagactctgtctaaaaaaagaaaaaaaaaagattgattttagattatacttaggtttgccttttctttgatagatatgttgggtagaagtatttcaaatagcagcagtgcatcacattagcaaatacagataccaaaaactctgatgataaagatgtggacaggcagattctttttttttgagacagtctctcgctgtcactcaggctggagtacagtggcatgatcgccactcactgcagcctccacctcccgggttcaagcgattcttatgactcagcctcccaagtagctgagattacaggcttgtgccaccacacccagctaatttttgtacttttagtagagatgaggttttgccatgttggccaggctggtctcgaactcctgacctcaagtgatctgcccaccttggcgtcccaaaatgctgggactacaggcatgagccactgtgcccagcctgggcagattcttgaaagataacttcctggctgtatctcgaatgtttctaaatcttgagtccttctaactcttaaatcctacatcttacccacaagggggaagcataagtgtactaaataatcattaaaagtaataataagaggcaagataagtcattttaatgagaagttaaataccactatgtactggaatgctaatcatcatgtcagccttcagtaaatagagaaacataccattttctgtgactctaaagctactgaagtagatggcatccgaggaaatactatgttgtactcttctcttaatgatgccctcttcctttcacttttgccaaagaatccagtatcaacataaagcctctacacccctctttttccagccttcttataaaagttctctgcatgtgagtggcaagcataagtagataatacacatgacaaattatcctgagttgcaagtaaatgatctctgtaaagggatggaatgttgtatttccttctactgatgtttccataaactccagtttattgtgtgacaatctattttcaaaatttgtagtcatacctacttgaatataaggtgggactcaacaaaggcaacacaactgactttgtatgtcccctaaagggaggctgtagatctctaagagatatacttaagtggtggagaaactgatttcatttgttctatttctcaaaagttatttcttaaaatctgagtcagtgtttaattttgcgtttaattcttgcttgaagaaacaaacatcaggatgctaaactcagtccttgctgctgctgcctcattgactaagctggcccaggcacagcatgtcacctcggtgtacctttcccagtttattatgttaggatggcagaaatcattttcctcaaaatgaggatgtgaaaggcacttattaaacttaagtaaagtgatttctaatttactgaaagagaaaccgggagagaaaaagttatagcgatatttactaagacaggtaatgttagaaaatgctatttaaggaatatctataatcaatttgaaagcactttataattcacactgcactgcctatgttgttgccaaaatgaacattactataatttacctgccaaagcacacggttgagtgtacactaaaataaaaccatatttatgttgatcacccttcttccctgaagctccctttttgccaggttcttatttcactcaaatctcagatctcctgtaactctctgattctcccttctcacatcttttaaattattccatctccacactgcagtcagccttgaaggcaaactttttagacttctgctcatgctatacttttttccattgaaaatgtatctactcttaaattttaaattaattcatctctgtagatagccccctaatctgtctcacatcctgacctcctggaactctaatctcatatcttcagttgcctactgggcatttctgctatgcttttgtcacttgccaacactttagatcattggacgtttccatttgcatgtcctgttttcactataacttcagactctgcaacacaccgacatgcaaatgcaagcagcccatcaccacagtctgtctctcttctggcctttttatgtgcttgctagtgctgctaccattgattgtatgcattccccctttgatagccttttgctttcattcttctgtgccaccaccactctatacaaaccctcgttcttcttttttttgagacagagtctttctgtcatccaggctggagtgcagtggctcgatctcagctcactgcaacctccacctcctgggttcaagccattctcctgccttagcctcccaagtagctgagattacaggtgtgtgccaccacgaccagctaatttttgtatttttagtagagatggggtttcaccatgttggctaggctggtgtcaaactcctgacctcaacccacccacctcagcctcgcaaagagctgggattacaagcatgagccaccacgcccagccccctcattcttaaataccagccatggtgctctgtaagatccttcaacatttctttcacttccacttacatttctaagtctcatttctctccactaccaccaccctctcacttgatgtctcagccatcctgaactttcttcacttcacttactgggagacctgagctccttcctggctagtatatgtgattatgtttctaagagtttcatcgtcacgtccagttttggtaacccagttcaaactcttgtgatgcttaagtcccttctacgagagattgttctgtgtccccaaaaagtcaagtgcaagaagtcctgtacctctcaagatagcatattccattagtggagggctctgtctagcaaaagttcttttctaccctttggtcttgaagctacccctggaagccaaagagaaaaatctaaatcctttttcataaaccaactttcagatttttaaaaaactgctcataacacttccattgctactgctcatctccttttcacttggtaattagtcaatgctcccgtgaacatcaccagattgttaatggttggcccatgtgtctgactcatctgctcacaaagtcatctggcccatggggaattacttccatagttctatttcatgccattccacttctctgagcctcagattttcatcagtaaaatggaaagaggttttcttaattcaagatgggcttcagggatccatgggtacctgaaattgtacacagcattttgtgtgtcaggagcacatatgcatttcgtgggagaggatctatagatttttttttatcacattctccaaagggggtccatgagtcacacacaaaaagacaaaaaccactggactaaatgatctctaacgtccctcccagctctaacattctgtaagtcaaaggtcctaagacacacgacattttcttattcccttgagagggagttaaagatcaactatttctatgcctgttattcagtgacaatgaagagataaaaatctgacaaacccctagacaccatgcaacaccaactgaaaaggttagagctaaatcttttttgtctcatgaggtaatattttcctctcactggaaatgatccaacagaagtggaattatcatctctccacaatcgtatataaggaattttttaaattatgtgaagatgcctataatcacagcactttaggaggccaaggcaagaggatcgcttgagcccaggagtttgagaccagcccagcagttcaagacatagtgagaccacgtctctacaaaaaaattttaaaactagccagtgtgtagtggcttatacctgtagtcccagctactagggaggtgggaagatcacttgagccagggaggttaaggctgcagtgagctacatcacactattgcactccagcctggaagacagagagagagaccctgtctcaaaaaaaaaaaaaaaaaaaaaaaatttatgtgaggagctggtctctgagatctcttctgagtctctgctcatgcatacttctccctctgcctgaaataacctctcagtttattcctctctcattcttcatatgcagcctttttctccccgtttaattagtgagtgtctcccacatcctcccatagccctatatagttacttctcctttagcactcatcacatctagaactcactgttggcaggagtgtatgggtctgattccctgactcgattgtcagtttcttgagaacagggactgtgtgttatgtacctccacatctctagtaccttagaatgtttggtatatagtaagcattcaataaataaatgttcagtaaattcccctacaaagggtctaaaaccttacataagccattgatcactgtaggccttagtttccccatctgtcaaacggaagggttagaccaaatactctcttaggtttctttcagttcttatacgtgactctccgtaagtgtagaactttaacttgtttgccttgctcaaggcagcaaacacattatataccactcatcctcacaatgctctttgacacttacatattcattttgttttccaactccctgaatattggtcatgagaaaattatcatttgacagattataacagtctgtgttctgattttaaaaagaaagagcaaaggggctcaccgctgtccatacttgaacatgaaaccatgattctgtaaacttcttagactcaaactgtttacaagtcttatccctgccagatttagagaatattgggaagaacaaatgcaggtaaataccgtttcttgcttagaagatataaggaagtttagccaaatagttgacgttaatttgtctctaggaaccaaaaacatacccgtaagaaatggaagccggattgaataatgtggattttagatattacaaatatagataaatattaaaaagtagacatgacagctgtccttaatctcatttcataaatgtggagatgggcacacaaaggttagcctgcctgaagtcacacagctagtaaggaagagagatggcacatgaatctaagtctcaaggccaagctacctaccattacttggttcaagggaatccttctaccagccaagcccatactagaggctgtccccagatgctagcaaccatctgattgaataaccatctgtatcattcaattatgccactgttgatcccattcgttgttaagagagtggtgccaagccaccattatcaattctataatataattcaataacgctcttcctattaccctcaaaactaacagaacagagcacaccaatattctcctaaatccttgagaaagttacaaatattgattggtccctagcctacaccaggacaattaactagaatggcagcatttaggcaaagctgggttaaatcagtatgacaggacacactaactagacttctcttttctgtggaagcattttaatcacatctctcagacctcactaggtgttgtattcatggcaatggaaacctgaatattcatgggatgggaaagagcctgcctggttctgcagtgtctgatagaattaatttcttcgtgtcaaaagtgggcaaatagaactctcttgtgggtcgcagtatttagaaggcacatagtggggtagaaaaaatatcaacttccataactccaactgtgcagggccagagtcgagagtttgccatattgtgcaaacaaatacatccactcctgagatgctgaaaccatcgtacgttcaagtcatttaagttactgcccttgatcagcttttgttaaaatttgttaaaatttctgatcactcaccttctttttagcccttttcttgctaaattttcatccaggctagtgatttgtaaaaatttctatctgtgggtcttagatttggttttagggggctttgggggaatatctctgccccacaatagccctccagcaatgtgaagcagcgttgtgtcttgtaaatcttttcttccctgggtagacagccccagtcccatcagctgatagtctggaaactcctcttcaccctgtggagcacaggacctgaaatagatgttgtcaaagatttgatccccagttgactttctcactttcttatcctgtaagcctctgaagagctgcaaaattgctctaaaagagacagtacaaaccagactaaattggaagcccattagaagctgtcatctagccaatttctcttcacatagtaggtaggaaaaaaaaaagagagtgaaaggtgggactagtttatccactaatattctgccatgttaataattttcctgcagaaatgttgcttgctgtgtcatagaactttttttaatttttcatatcaactagaataatctttttctgattttttttctaaactttacaagtaaaatagatctttataacatagcacaccttaatgattaaagatctttgacatttcatcataacttaagaaaaaaacatttaaatttcaggacaattattgaatctaagagctaaggactaaacactacgtcgaaagctagttatggctgagtgtggtggctcacacctgtaatcccagccctttgagaggctgaggtgggaggatcacttgaggccaggagttgaagacaagcctgggcaacatagggagaccttgtctctacaaaaattttttttaaaaattagcctaaaagttcaaggttacaatgagctatgattgcaccactgcattccagcctaggtgacagagtgagaccctgtttctaaaaataaaaataaaaaagaaagctcatttttaaatgctgctaatggttagtttgaagtggcatccccagcttctttgtatgacccaattaattttttaaataatggaagaagattaggtgaaatttttaaaaacaattctgtcatggggatgaattttaccaggagataaagcagctgcgttctatcttggctctgtctgtagtttaccatgcagccttgggtaagtcacttacctctctgcctgttttcttatctaccaaatgagggtgtcaccctcaataaactggtttcttcaaactcttacactatgagcaatggttctggaccttttccccagggagagacatatatgtggggtcacgttcaactctcagaagctgaattgtgtgtgttgttgttattgctgctgctgctttagttttaaggcagcaatatagataaaataggatacaagttatgcataatttccagttttaatcccactccgttttttctcagtgatcactgctattacatcaaagaaccactggtctgaagaacttcacaattgtgggccatgtgccacctagaagatttttttaatgcaaaatgcatcaatttaaaaaacattaattatatttgtaagaccaggggctaattattcattcagatgattgcattctgtctcctaattctgcttacgtagttctaccaaaatgaaaaatcacccccctggtatcccccctccaaagcaatctccagaagccaaagccctcttgctttctggatgtcttgatcactttaaaaggctggatcccctgttcctcatgtggctgcctttgttgaaggcccagaaaggtttgcagtgataaggtttgccccggggctggctacagagaggcttcttggaattgaacaagagagctgttgggtttcctaaaaagaaagaggagactgctcaaataacaaagtctaatttatcacctcagagtcccccttaatggcagtgagatccatataggtgccaacccagacagccacccacatgtgtctgtctaaagagccaatatcattctcttaaaacagccctgctcatcggtgctgataaaaagctcagcacttcctctgccttcctggagcaaggctattaaatctattagcagcacttcagccacccagatgcttccaccttcttctgaaaagcagccttgtcccagagagatcacactgaaatggcacctgcttgcatccgtatgaatctcaggctccgagatgacaggctgtccggctggcctgtagaccacagtcattagcaggtggcaaagatgtcacaaaaccagagtcaaataaaaacactagagctgtacaggagttagcacgacccatctggccatgttctcggtaatgggactcagtagaaaactattatataagcaagcttggaccccagatcaggggctactccatacaggaagaaagagtttcagaaggggaatttaacaagttgacaaggttgtaaatcaaaatgtaacccagatgtatgtcagctggggctttcctgtcgcttgagatctaaataagctttgcttcaaatgccgtagtccatagcagtctggattctatgactgcttggaggcttagggtctccgccttgtctcatgcttctgtgtctgatccttagctctgcaatttgtcaggttgcctataaagaaggcatgctcatgtgtgagcaaggtgggccttacaaaaaattggtgtcattgtggagaatcacatttcatattgtatgtttcattccatctagtggtatagtgaacagtccatattagactttcctgtgctcttaagcctggctactcaaggtgtggccagagggccagcaacacctggatcacctgggtgcttgctagaaatgcagaatcttgagttctctctagcctaagtcggaatccataattaccaagacaccaggtgattcagcccaataaagtgtgaggagcacagaactaaagtccttttcagccgggcgcggtggctcacgcctataatcccaaccctttgggaggctaaagctgggggatagcttgaggccagtagttcaaaaccagcctgggcaacaaagtgagaccccccctccccatctctacaaaaaatttaaaaattatccaggtgtggtggggcatgctactcgggaggctgaggtgggaggatcgcttgagcctgggagttcaaggctgcggtgagctaagaaggtaccactgcacagtgcactctagcctaggtaaaagaccgtgtctttaaaaagataaataaatacaaaatataacatttcttctatcatatattaggtctttgttttcctggctgtccccttctgggtagaagattcctcaggagaggacctgaaatctgtggttgtcatttctgtatcttcagtgcccagcagagagagactcagaaattaagtgtttttcctcctgtctttcccttgggaatccctacaagttaacagcaatggtcaaacaaatcctgcccctaactcggcccctttgtcttgagttaggggcctgggctacctttctgagccacctcagacccacctgcctcgcccagctactcatctttagacgggcccctgctccccagcccttctctgttctcctgctacccaagggttccagctttgccaccagctacttatgtgtgactttttgaaaatcaccctaccttctgggtctcatctgtaaaatgagtggatctgactcattagctagagctgtcaacggcagcatctgcaactcacaggtgtgttttaatcactggcaaggtactttgcaagtgactttttatatgatcattaaggtttgatgggcttttttaaatgaatagagcagattcaaggttatccctttgactgtcattctcggtagcattctggtgtgctttctgaaacaggagaaaaatgggtggagttacaggtagctccagggatcacacataagcttggggcacatacaccgttgggagtgtgttatgtttcacacagaaaagttgcctggttatctgtcatgtgtctcaacagcacaaagactgatctataaacttttctgctccatcatcttttgggctataaggcctggtgtaaaagagatggtttttattttatctggagaaaagactgctcttggaaaatgcaaatttccaaatatctcctgtgatgtagtagctcctcttaaaatttaaactcacacagagacttgaggaggtgatactctttaaattttttcatcttcttctttggctttgcttccagaaagcgagaggaagaaaacaaacgaaaagaggcagaacagcaaaaaggaaggcggagcccagattcctgcagaccccaggcccttccctgtctgcctagcacccaggatgtgcccagcaggcagagccgggcccccagcaagcagcctcctgctggcaacgtggcccaaggccctgagccaagagacagcagaggatctccaggagggtctctaggcggagccctccagaaggagcagcatgtttcctcagatttgcagggaacaaactccagaaggccaaatggtaggtgtattgcctttgtcatcttctgccggcccatggactgtgggcttttttgattggtgtatttagaccaattacacttaagataattgttatattagcacctaggaccgccactttatgatttgtgttctacttgtttcctctggttctcagttctttttcttttttttcccttcctgtaggttacttcagcatttttaaaaattctatcttgattgatttatggttttttgttttcttttcttttttagagtgaagtgtgaaaacctcacttccattcactttgtccacttttacgtttcattgcttaggtatcggatggtgttataaattttgtttcaatcatgaaatacaatttataaaactcacaaaggaaataacattttatgcgcccgcctgtatttctgctcttctgttgtttcttcttccttcctgatgctctaagattcttgtatcatttcctttctgtatgaagagctttctatggccaatctttaagggtatgtctgctagcaacaaattctttcagttttcctttgtctgagaatgtttttatttgattcctgaagaatcattaagccagatatagaattcagggttggcagttcttttcttttagcacttgaaaaatattgtgccatttccttttggcttccatggtttcagatgagaaatccactgtcattcaaattggtgtttctcagtaacagtcctaggtaatatgtcatttctctctggctgctttcaagatcttaaaatttatcattagctttcagaagtttaatatgatgtgtcttggcatggctttttgcagtttatcctatttagagtttacttgtgtgtcagggatccccatgatccccatccccaagactaccaccaggtttggtgaggttggaggatttactagtttgactgagcatatagttgtactcccagttaggatttattataacaaagggacacaaagcaaaatgagcaaagagaaaaggtgtatggagcaatgtccagaggaaattaggcacgagcttccaacggctctctcccagtggagtcacacacaacacgtttaattccttctgcaataaattgtaacaaccagtcagacaatcttttgttgacaaagaaagctcacatgaacctaggactccaggatttttatctggagtcagtcacatagataccctctgcctagcatatgccaaaattccagactcccagaaggaaaggtgtgcagcacgaaccctattgtttgcacgaagcaatttaaacacactgagctactcttataagttagagaacggtaggagctttcccaaaatctaagtgcaaatgccaacacagtgaaaaaggcaaataatgtcttcgtattattatgaaaatagccctgaccttatggactttctcagaaaggggctctggaacttcatgattactgaattcagggcttggacagttcaatctgtttctttgaaccttaacttccttagctataaagtgagggtatactttctacaccacaaggtagctatggatagaaataattcatgtagtgtacttgttatagcccataactcatcataggttttcagtaactattattattgagccactcattaatctagccaagaacaactacagaaaagtatacataaaatgactacaggccgggtgcagtgactcacacctataatcccaacactttgggaggctggggcaggtggattacttgaggccaggagttcaagaccagcctggccaacttggcgaaactccatctctactaaaaatatacaaattagccaggcatcgtggtgcatgcaactcaggaggctgaatcacaagaattgcttgaacttgagaggcggaagttgcagtgaaccgagattgcgtcactgcactccagcctgggtgacagtgagactctgtctcaaaaaatatatatatctaaaatgaatataaacatttctggaatataattccataatccactttacagtgtaatccttaaggattatatactcatgatgctttggtacatattcattcatttattcatccaaccagctttaattaagctcccataatgtgacagccatgttgaacttccttgagttctttcttagcttggggcctttgcagatgccactccctctaccttattttttagatatcagggataatgtttcttcttctgttcaaccaatatctccccgctaaaggaggctatagtttcctgctattgcttccatacttctcctatacttccctcttataaagatcatcactttttactgttattactggtttacttgtcattttttccaccaaactgcaagatctgtaagagtagggttgcttccattatctactgctgtataacaaaccacacaaaaacaaagtgactttgaacaatgacaatttaatttttatgattctattttggttgggaagtttgtttacgggcttcatctggtctcactcatgtgtctgcattcaggtggagagtcagtggaattccatgtctaagatatagtcacttaaatgtctagcaattgatgctggctatcagatgggattccttgactctggtttacgtggttttcatcctccagtagactagactggcttccttacattgtggtctcaggacagcattttcagaaagcgaagataaaagccacaagacctcttgagaaatagactctagaatttgcacacattatattgatcaaagcaagttacgagaccatcccagaccaaatgatgtcgagaaatagattccacctttgtgcatactaagatgggaggaatttttggctattaaacaatctgtcatagttcctatttggtcacagattattcacattcctcccacatgcaagatattcttaccccttgatatggattggctctgtgtccccacccaaattcccagtgttcggggagggacttggtgggaggtaattggatcatgatagtgagttcttacaagatctcatggtttaaatgtgtgtggcacttccccgctcgctcatgctctctcctgctaccatgtgaagaaggtgcttgcttcccctttgccttccaccatgattgtaggtttcctgaggcctcccagttgtgcttcctgttaggcctgtggaactgtgagtcgattaaacctcttttctttataaattacccagtctcaggtagttctttatagcagtgtaggaacggactaatacatccctatctcagtaccccaaaatctcatcctgattatctcatcacacttgaagtctaggattttaagacatgaactagatgtggttcaggttcaccagctgggactctttctgattcagagaccaatgagccaaaaagatacattatcaacaccccccacacccaacaaacagtggtaagacaggaacagaataaccacagtagacaaaagagggtggaataggaggcgtatagcagccattagtccgtagcaattctgaaaaccagctggtcacattttaccagggcccctactctgaggtaaatattccttgattagggtctcatattactcctggtggcttcctattccattgttctccatgtctcttggctctgctacctgaattcttggctctgctctctgagaagtccttccttttcctaagaaatgcccatgtttgcagctgagtagctttctcagcctatctcctgactataggatactggggccccagaggcttctttttgatttgaactatgtcaccagttcaagcttgtggtactctcaataatgcgattatctcaaaaacttcatgggtttcctgcgaatctgattggattcatttcatatttcaaaagccacatccattatttttcaaacaagctttgctctaatttgagtggcttagatttctgtgggaaaatgcccttgagattcttagaaatttttttgtcgagctgagagggcctattatgtaccacctcaaatatttttgagtcttaataaagggttgtacaaccatacttttttttttttttaagacagggtctcaccctgtcacccaggctggagtgcagtggttcaagcacagctcactgcaacctctgcctcccaggttcaagtgatccccccatctcagcctcccgggtggctaggaccataggtgtgcgctaccatgcctggctaattttttgcatttcttttttgtagagatgagatttcatcatgttgcccaggctggtctcaaactcctggactcaagcaaaccacctgccttggcctcccaaagggctgggattttataagtgttagttattgtgtccgccctgatttgatctttatgctgaggcctatgagactcttttgctggttggaaagaataaaaatgttaaaatagttttattttctaacccagcacatcccgggatctttacattatctctaaattttgcttacaaacggagcagtttttccttcattttatttgttttctccccatactttgtcatatgtagcttaaaaagcagttgacattttgttctacattccacctggaaacttcctgaactgtatctacagctccattaggtatattttctatcttctatgttactgcaagtgacaattttgccagttaattctgccactgaataacaaggttcacttctctctagattccaacagcaatttcttttctgctcttcgagccttcaccagcagtctcttcattgccttcccagcttctgctcaccaaccagtccaaagtcaataccctgggttttgtattttaagacagtacctctcttttatagatataaatatctgtgttggttatctcttgtggcataataaaacactcccaaaactaagtggcttaaaacaacagaagtttattatttctcacagtcccatgggctacctgggcagttcctcttctcgatcacctgggctcattcatgaggttgatagaatttgcacaagatgtggccaagatggccgccttcatatatctggcaattggtggtggctgttggctgtctctattctcctttatatggccttttgttctccagtaggttagactatcttccttacatatattgttctcagagcagtactcttgagagaaggcagaaactgcatgtcacccagtttatccattcacctactgaagaaacatcttggttgcttccatgttttggccgttatgaataaagctactataacatccctgtgcagcttgtatggacataagttttcaacttatttgagtaaatataaaggagtgtgattgctggatcttatgtaagaatatgtttagttttgtaagaaactgccaaactgtcttccaaagtggatgtaccattttgcattcctaccagcaatgaatgaaagttcttattgctccacatccccaccagcatttggtcactgttttggatttttgccattctaataggtgtgtagtggtatcttgtagttttagttttttttttggcccggtggggtgggggttgcatatatgtgaaacattgtaacagctctaagagtcagagctatacaaaaaggtggagccagagaagtgtctctcactccctcttcatctctactatccagctcccatttctcttttctttccacctctttcccactcaactcctgcaggtaatcaatttctttagtttttgctttatgttttctatatttctttttcacaaatgagcagatataggtatattttcttatatccctttctttctttctttgagacagagtttcgctcttgtcgcctaggctggagtgcagtggcgcaatcttggctcaccgcaacctctgcctcccaggttcaagtgattctcctgcctcagcctccggagtagctgggattacaggcatgcaccaccatgtccagctaatttttttgtatttttagtagagacagggtttctccacatcggtcaggctggtctcgaactcccgacctcaggtgatctgcccacctcggcctcccaaagtgctgggattacaggcgtgagccatcacacccagcccatccctttctttcttacatgaagagtagtatagtttagatagctcttttgcacttaagagtattttattttacattattgagacatagtctcactctgttgctcaggctggagtgcagtggcacaaacagctcactgcaccctcaacctcccagcctcaagcgacctttcacctcagccttctgagtagctgggactacaggcatgcactaccatgtctggataattgtttttttgttttatttttagaaatggggtctcactatgttgtcccggcttgtctcagacttggctcaagcaatcctcttgcctcagcctcccaaggtgctgggcccactgcacccagccagaacagttattttaaagtctgtttctgaaaacacattatctggataatctatgtgcctgttttattaagaattttttttttttcagacggagtctcgctgtcacccaggctggagtgcagtggtgcagtctcagctcactgcaacctctgcctcccgagttcaagcgattctcctgcctcagcctcccaagtagctgggactacacgcgtgcgccaccatgcccagctaattttcgtatttttagtagagacgagatttcaccatggtggtcaggctggtctcaaactcctgacctcatgattcctgcctcggcctcccaaagtgctgggattacaggcatgagccaccgtgcctggcatatttttcagtttagatgttgtatttgtttttcaaatctatccttttctcgtattttaaacttcttttgtgtgtttaatcaacgtgtgtgtgctaacgttttgagagatctgatcttgctattgtgttaactgttgcttatggtacattgtttcctcatgcattttgtgattttggattgtgaagtcattttcagaggactccgttgtgcagcctgagttgagggcatgtcacactaaagcaatattgtgtttgcttctgtgaggcatcctgggatatctccatcctaagaccagtttttatagtaatatctcctatggattgagaataaatgaataccaagcccatgtaaggaagacgactttggttttaaattcttatgggagactccttaccccatccagaacctgggctgaaacaaacttccttgtcatctctaagtgctggagagcagattttaaaatctggattatttccaaaaggtatatcccttcaagagtgctggcttcatgtagagtcttggttccagttaactttcttcctgcaaggactcattttctgttcttatgtagatgttaaagcacagccagatatttaataagaccatctgttgcccactccaccaccattacctgcctagacagtcactggatcagctcacatacttaattgctttgattttcaattttctctttgtttttggcctccagagttcctttattttcttaaaggcatgacagtgctttccaaaggatatccactatattttcgttaaggcgagaagggcttcaggttatctaacctaccatattgctggaaatagaagttaaaccgtttttttcctagtctgtaactgccactattatggtgatgatataggctaagtctgaatattttatgtgaacatattaggaaaattatcctactctgcaagttttggacaatattttttctttgtttcctcaagaaacagccagagaacattctaaaggccaatctgcttgtgtccacttcagacccaatgaaggcagtgatggaagcaggcatccaggagttccctctgttgagaagtccagaggtgagacagctggcgatgagcggtgtgcaaaggggaaaggcttcgtgaagcagccctcctgtatcagggtggctgggcctgatgagaaaggagaggactccaggcgggcagctgcaagccttccaccgcacgatagccactggaagcccagcaggcggcatgacacagaacccaaggccaaatgtgccccccagaaaaggcgcactcaagagctcagaggaggaaggtgctctccggctggttctagccgccctggcagtgcccggggggaggcggtccatgctgggcagaatcctccccaccatcgtacaccaagaaacaaagtgacacaagccaagctcacaggagggctctattcacatttgccacagagcacagaggagttgaggtcaggagctaggaggctggagacatctaccctgtccgaggactttcaggtatctaaggagactgatccagcacctggtcccctctctgggcagagtgtgaatattgaccttctccccgtagagctccgactgcagataattcagagagaacgaaggaggaaggagctgtttcgcaaaaagaacaaggcagcagcagtcatccagcgcgcctggcgaaggtaggaaaatggggtgctgccgcatctgtggttctttgttactgatattctcaacatgacatctgtgctctttgatgttttcccagtgagttccatgtggtggcatggtaaggccaattttatagagcctacccatgaaattcacaccagatcctagtaatttacattgtataaaccatttggaagatgtttttgcctagaaagatgggaaagtgctcaggacagcatggggtaaaggaaaaagccctgggtttgtaaccatgaaatgtgaggttcaggtaagctctaacaggttatgtgactttgggcaaatcacatggcccccctgaccctctgcttcttcatctgtaaaacaggatttaataattgttgcacatgtcctgttaatatgacaggttgctggaatgagataatgcacgcttcattaattctaaattactacacataggagatactttatttttattcttatgtctttactacccaggaactagtcatactccaaacacctaaaccagggtctggatataacagattgagtgactaaactgtattatgtaaacctgtctgagcatctaccaagctcaaaatacatagtaggcactgggagtgggggtgaaggctgtcctaaaagcctgaaacagactcccaatatagtagagacaaatgccgctaggggatgattatgggaggacttgaggggtcttattgctacaaatgttcacgtctcataatctctttcatcctgaaagcctcactagagcctaaatctaaattaggccttacagtgatgaatgtccagagagaagctggacccatcaccaataggtgggagttggccgggcagagtggcttacacctgtaaccccagcactttgggaggccgaggagggaggatcacttgaacccagggttatgagacgagaccaccccaggaaacacggccaaactccgtctctacaaaaagtacaacaattacctacgcatggtggcacatgcctgtagtcctagctatttgtgaggctgaggcaggaggatcgcttgagcccaggaggtcaaggccacagtgagccatcaccatgccacagaactccagcctgggcgacagagtgagaccctgtctcaagaaaagaaataggtggaagttatgtcgccgccatcactggggagaggaagacggatggggagggagacaaggcaaggaaataatgcggcacaggtgtatgagatatcgaggttcccgtcaggagaaaaaggaagacgttctctccttaacattggcagggagaaaactagatagattcccaggaggtccagggagaggcctccgttcatatcataccagagactgcctaacccagagccgggtgatctggtttgtgcttgcacaggctttgcaatgtgttctccctatgtctgtttcagctcttggccattaacaaagtcctctcatgcctgaccccatgtgaactcccaaccacaccaggaagccatcatgacagggagcagtatccccatttttcagacgagaggaaaaactgacttgtccttttggtgcagatccagcacttgaacctctggctgactcaaatccaagggcctttcccttacattattagtgaagttagtttttgctgtggtcaagctaagggaggtggaggtgggccccatgcactttgcctgaaaataggctggagaaggctgcctggttggtgtcacacacatcagggtaaccaggagaagggtgatgttactactaccaattgttaacatactagtattatttattggacacttgtgccactgttcaaactagttttacctgtgcatgtaatcgtcactgataaccctgcaaggtaggtattgttcttatccccgttacacagatgaggaaactgaagcacagagaggttcatcaactcaccaacattacagagcaagtgccagggctggctttgagccaagacagtcggcctcgaaagccacaggtggaaatggccattgcactctgtgggacatgcactggctaccatccagatgaactttttaagtattctggctaaaatctaggatctaaacaagccagcaaggtttaccacgccagaccccacagctgctccctacctgaaatgtctccttctccgactgtctgactcctttgaagagtcagaagctgacaggtcctgtcagtaagtgaccagagtagcaaatgagccttcagtcattcccccaagaacagtgggcttatggtctaacatgcccacctgcgtaggtaactacacaggccccctctggatgtgccattgtgcaattctgaggcccaaaggacttctgggattgttgcacattgcagaaagccaagtctggtgacagtaaacacacttttattgattctattatattttaactacattttctattgtaaatacaggagcctgaagcgctgtcctgcaagtgtatctgatagcaaacctaagcagtgagggctggggcaggggtcagggctggacactaagtgttcagtgcaggctgtggttataggggacaggtggaggatggagaaaaggagctggaaaacaggcagggaagaagtgggcaaaatgaaccttgggtcctgagaaaatgaaacttgatcttaaaattgtcagtttaataaccaagtaagatgactattttaaagattgaaacaggatcctggacaagctgagcaggaaaggtgctgctgggcccactgagggctgacaccattaacagcttcagccactacctgggcttccccccaagttctgtgcccacaagagcagaaggtatggaagacagcatttcaaacaggagaaactgaattatagcgcggtagtgccatacttttctctagacttggctttttggaaatgtggtacgtattctagtagagggatgccatggtgttaccctccaggacagaaggaagagtagtgtaggctgactgaaatcagcctttggggaaggagggaggggctgcaccaagcgctgcaaggagcttttagcagacttaggaaaaagattacttcccatttggtgcagcccaaatgggatcactgtaaaatcagacatgaagcctgttgctctctgcagctacctataggctcactaggaataaagacagatacagataataaacattgctgcagctttcctttggaggcctcaaaatagttgttgtgctcagtaagtttgggagtgcatgtgggactgaaaacatcaaataaatcctagatgtaaatatagccatcatccccattcctcacccactctaaacccacctccaacagacttatcttagtaagatgcagctcatacctttaccactctaaagccccctttcgtcaccaaagacacagtgcttccacattgtgttactgactttctggcacaaatgcctctatctatctctgctgatgccagttctgctacgtagaatgcccttctctgcctggtaagctcctattcatcttttaaaatccagcacaaatattaaccttgtgaaaccttaccaaaccatcagtcagtcctgcatctgtttgcacaaccagctccttgctcttgcacagtactctcatgccacacgtacctctttacacagcagcctgttccactagtctgtgagctccttgaaggcaaggaatcatgattgaatcctagttcaggaggtgtttgataatggaaaaagaattccacattcaacatgctgccgccaaaattaggaatgggagcttgaatgaacctaccaggaattcagcaaatactactcctatagcttctagaaaccttaaggaaatttagttttctcagtactgtgatcttaaagcctctcctctcctctgacccaaccagctaccagctcaggaagcacctgtcccaccttcggcatatgaagcagcttggagctggagatgtggacagatggaggcaagagtctacagcattgctcctccaggtttggaggaaggaactggaactaaaattcccccaaaccactgcagtaagcaaggcccccaagagtccatccaagggcacctcaggcacaaagtccaccaagcactcagtgcttaagcaaatctatggtaactgtccttctgcctactttgtagttcacaagtacccccagagtaccacatcagaatctgaagtagaatttaattacattgggtaaacttccattcagataaattaggttggtgcaaaattaattgtattattaaaaatggtcaaaactgcaattaattttgcaccaacctaatatttctcaagcaccatttcattcctgcctcccagcgatactgggtcataattgtttggtttcgtgaggcattctagcatctcagcccagagtgccctcaagctttactgtttaaacctctccagacccctgcttgagtctcctccttgcattacccatttggagcattcacgacttagctagactctgcctgtatcactttgacttttcctatgctgagatgttatagggttgcccactatgagaatgctcaacacccatgcactatagtaaatatttgttcagcagattaactgctgtaaattgaaacattttcagctctgcaaagagcccatccaaatagacccagtagagttcaagaagccttgctggctcaagagaaaaaaagataagcaagagcacctttagaaagatctcctacagcatgaactttaacattcatttagcaaaatctcaggactttaccctgggcctacatgtttccacaccatacctaacttatcttgacacacacctgcaagctcaagcctttaccacaataaggaattcagaagttggtcaggccaaacgtatccctggccaaagaaaagtaacagttgttggttcatttcaggttgttctcacgaagggaaaatacatcatcctacaagatctgtaaaagcctcttctgtgctgcgtctcaactcaggtaaggcagccactgcaaagcagatggtggggaagaacatggggaagcattttcctttgtttcatccccaaagacagaagacattagaacagatatggccagggttttccaatggtcatttgatttcatgggattattactgtagccaacatctgtctccctaagaggcaaattattttcacaactaaaagctattattgttaacattaactccaacagaaataaatggtagctattattgatcacttttacacattttttcacacaaaggaaataaatgaaaatactgtcactcttcaaaggaataccttgggaatccttgttccattttggtgtcacactatgatcccctatttccttctccaagatgggaagaacaccatgaagagaacactgagagcatgtacagcccaggctcagctgtgcgtgctttccctcatacaggagaagctcagggaactttcttttcagccaccaagacaagagtgttttacttagggccccctcattcacaccagcattaaatatgggtgataagttcattgctgtcagcagctaatgccaggtccagtgtttctcataggtggctatggcaacacgctcccccctgcctcctcgatccacacagtcatcctggaggaacagagtgcagctgggaaggtgaacaatgactgtcagcatgaactttaatattcatttagttttttgatggggggcaaaaacctggaggtgggggacagagtaattactgccaaatctttaataagtgttggacaactcatgtaatacagacaggctgatcagggagtggtgggtggggtagttagaaactttcaaagcaatcaaggcctacagtctgtttaaaaacaaacaaacaaaaaaacccctttcattatacctgagcaaattaaagaatcatttcaaaaacagaattgtcagatatcactaccagagaagtggcatttagacaatcaaatactagcataaattagataactggatcatttttcagtcttaagagaaaaacaaatccaagactaccagaaatcttttaaaatggtgtttagcagcatataagttttttagttaagagactcagaagggacagagtaaataaattcaaatcaatacttaatgatttcttaggacttcatatgaacaagcaacttacttgtcctacacatatttttgactggtttaaaatcagacaaggataaaatgatcttttcctaaccccaaatttaggagaacacacagttttgttaggctcaagcccacccacattaagcattaaccagttaatgaatattattgctctcaccctccaacttggagaaccccccacccccgaggttttagtagtgcctttaccacttaaaaaggaagaagcagaaaggtggatatagcaaaatgccagcctccttgggctgtttctccacatgtatttgggaggcagcaaatcaatccctgctcatgtcagtcttctacacccagccttgcaaaccacccaccaagaatctcagcagagccttttattgacacacaacacacacacacacacacacacacacacacacacagccttgcaaaccacccaccaagaatctcagcagagccttttattgacacacacacacacacacacacacacacacacacacacacacacacctgggcctatctctttaacaataaaagaaaagaactccctttaaagttccattccagtgaatggaataactgtgattattagtattggtaccccctgtacaaatccagtttattcttgctcacctgcagaggggtacacagatgacaactccattcaagatacagtgaagacagccaaaaacaatagttcacattaaaataattttgtggaagttataaaaccaagagagaaaaattgagacatatgtttgttacttttaaaaactactaaacctttaatgtatttgcttatatgctccataaaaagttagaagcaaaatatagcaatgtcttcagcaaggtttctcatatggggcctcagtatcatttgtcaaagtatatcactaatgttttctgactgtggcatcctatacatttgttaattcaaagtcataaaaaggcctcaaaaatccattttgatattcccatcagcttatcattcatgaggatctgaatattttctaacaaacctattttctagaacaactattcaaagtgtaataggagagttaaaagatgtgttacctgtttatgtaatgtgttatgtgagagacccagagagagaatctatttgttatttcaggcagactgaagaccgaggttctggtaccagctccccaagtgcctgctctctcttaatcaagtctcccttgaagagatgtcccatatcttgagactgcaggaaatataaagctattatattaagtcatcctgcctctacagtaaactggcccatcatcccagggatagcctaaaccgaaatccttcttcctcaacaccaatgaactattcccttcagccttaaaattaataaccttaatatctatctggtatttgtttttaacagtgagcaacctacagtgtatacatctccttgagaacagtggaagatcaaagaacttttcttataacctgcaatcagctactcagccaaaaaacaaaacaaaaccttgactgcctatggaggaagactgtgttcgggggagctggcatagctagtgcagagttcagattttctgctgataatcttttacaccttgggaaaactttaatatccgtacctgaaggctgattcacctaaaaatgtgttaactgaaagaaaatgtcagaatgtttcctttctgctcttacacagcattgttttgtcaatcaacacagcctgcactgaaaggacctgcatagactatgtctgtgcaaagtgcctgagtgtctgctttcacctcagtctgtacagttggaaatgagaattcataattaacagcaaaatctaaggaaaactacggctgctgggttgggatttctgccagctagctggtactggcttcttgtttcaagagatgaacctaaatgagataggaagcctgtcccatagcagccttcctctcactactttcctggcatctaatgcaacaaacttatcacacacacacacacacacacacacacacacacacacacatatcacgtcccactattacttcaaaattaatcaggtttaaattttagatcagaatcattgcccactgttttcatttagaaattgtccaaaagaccatagatacattctggtgattccttacattttacagttcctacgttagcctctcaaggccacaagttgccgccacgtcttcactgaatggctttctcagtgctgaataccaacagccgtattacagtatcaaggattctgtcaggtagggtttacagaccagactgttcatgcagcaaggtgctaactcaggcgtcaacgttctacttgtattttctgaccaacttgcagaagtgagcaatcttcttaaaatgccatttctgttggcagggaagaatgaaacggcacacatcctagcattctaagaacacctggtttaaataaaatccagtgatgatgggctctttcacattgtttaaggggaaagctgctgtgagaatattgacagtaggcataaacagtgatatattttactcacaggtattttgggggttgctttcattttcttcagatcagtgccacttctgtgctaacggtaagagatagacagataggcaatgaagtgttcacttaattaccttggtttttagtttactaattattacattcatcgtttttgtgatcacaaaaacacaaagaaggaggtctgcctggatggaattacaaagatttagccagtttcttggtatataacagaaggtaccacagtatcactctctattttgtaaatatttagctcctatgaaatgcacaatgcacaaccgcctatgaccatgtatcgtgtgctagtccgggaagccagcctacacatcaataggaacgcccaaacattattttcatatatcagtgcaaagaaagaaggttcgtaaacttctttaaaagttcagctttaatgacaaagatctattacatcagtctttttcttcaaataagatagatgtgaataaacaacttcaaacagga

SEQ ID NO: 1205 - DNA, 6307 bp, Homo sapiens
ggaaacccaaaaaagggcataggggcgggaacagcccagcgggccgtcccatcggcttttgggtctgttacccaaagaatgataaagttggttttatttcaagaagtcgatcaaaaagaaagccccagcgctctagagctcagctgacgggaaagggggtgcgcagcctcgagtttgagagctacccggagctccaagacaggggtgggttccagctgcccgcacgccccgaccttccatcgtaggtaacgcggaagagcccgggagagcgttggtggcgtccgagagcgaggagcgggaaagaggatgggtctgcacggagagtggaaaggcaggctgtgtactctggggaaagtggagcaaggaaggagctacagtggccgacgctggaggtcggctgcagaaaaactagaaaaagtagggaggaaagaggaaaagaggaggcgtctacactgagggggttctagagagggaggggtggactccgtagatgggggtagttcagtctcgaaacctggggcgtgctctgtcctggaggagggaggcgggcagtcggaggggaattgaatggaagttctgtgttggaaatgttttgggagatcttctgtagggggactgtggaagggggtctacattggggtaagtgcaggaggtagaggcttacacgtgaatcgattctgcactgaaataactagggaaagaggatgctaccctgaaagtggggatacttactttcgatgatgtgggggagggaggaggtctatactggcggaattgagggagtggagggtctgcactgaagacgctggggaaggatgtgccatggatatgggaaggaaccctagctgattagagagcctctcgggaggatgggaggatgggaagaggaggtttcctgtttgtacccccgaaaatatgggtgaaggacctgtgccgtggcccgtgagaaggaggtctgggtgcggaaactccaggccaggtgggtccgggggaggccggtcgcgcccaggaaatgccctatacgcgcaggccggaccatgggaaccccaaagccacggatcctgccctggctggtgtcgcagctggacctggggcaactggagggcgtggcctgggtgaacaagagccgcacgcgcttccgcatcccttggaagcacggcctacggcaggatgcacagcaggaggatttcggaatcttccaggtgcgtgcgacgacctgggacgctggaaacccggagctgcgcgctgggcggaaaggactcctagtgggcccggctgagaaggcggaggtggcgcgcgaggggcgggctcgtgccaacgctggtgggtggggctagaacgggaggggcggggctagccggatccgctgactgatggtggggcgcaagcagggttggagctgcagggttacgggaataaaaccgggaaagccggttagtacgcaaaggaaatgcatcctgggggtttggggctttctagaggccggggctcttggttgtaggatagatactgggggatggttcttgaaacatcagaggtgaggcctggagccccaaatctgaggttcctaactaccgaattagtatatgccagaggtggtaaacagtgtgaggggcggggttatcacagagggtgtcgcggggcaggtggtgcacgggattagacaccaagttggacttggaagcctggcttagaaagaaaaggtttttgggccgggggcggtggttcacacctgtaatcctagcactttgcaaggccaaggcgggaggatcgcttgagcccaggagtttgaggccagcttgggcaacataggctccatctctttaaaaacaaaagcgaaacaaaacaaaaaccaaagaggtttcaaaggcttttgaagaggccgagcacagtagctcatgcctgtaatcccagcactttgggaggccgaggaggacggatcacctgaggtcaggagttcaagaccagcctggccaacatggtgaaaccccatctctactaaaaatacaaaaattagccaggtgtagtggtgcccacctgtaatcccagctactcaggaggctgagacaggagaatcgcttgaaccggggaggcggaagttgcagtgagctgagattgcaccattgcattccagcctgggtgacaggagtgaaactccatctcaaaaagaaaaaaagccttttgaaaactagaggtgggggatggaggtaggtgggacggggggatttggggatggaccttgcagagttagaacttgccagggaaagagggtggtgttaggactcgggagacagggttagggccccaggagcaggatctaagtcgtcctcccccaccatcctgacaccactgttgccccaggcctgggccgaggccactggtgcatatgttcccgggagggataagccagacctgccaacctggaagaggaatttccgctctgccctcaaccgcaaagaagggttgcgtttagcagaggaccggagcaaggaccctcacgacccacataaaatctacgagtttgtgaactcaggtctgccagcttggggttcgtgtgggaggctggggccccaagggttcctggcactcctactcccctcaccacttttctcaacaggagttggggacttttcccagccagacacctctccggacaccaatggtggaggcagtacttctgatacccaggtgagaatgtgcccaactttcatgcccctcagtctccgacctgtctccatgggccttgtcctctccctctagacgatccccccactcccctgcctccagcctgcccctcacctgagccagtgctgaccctgtctgtccctgccccggtctcctcaggagaaaattccaagtcttcacccagcattcaaggcccgagcacaccttcccgggatttcatggatttcgattcgcagggggctgtcagcctcttgggaactgaaaaactccctcaccttgatcctgctgaggcccaagctgggggagcatcccctctgaaattctacccagcctgctttgcccaggtcttacctgcatagagccagatccttgggttggaatggtagcacctggcgttcattagtgtttgtttggctgttgatgccatggctggctctgtccccaggctggaagccccttgaaggcagagctcaagcctgacctccctgcgttgctgagaacagacctggtccatatgaagtctccagaaaaggatatggaaatgcctgattctctttttttgtttccctccaggaagacattctggatgagttactgggtaacatggtgttggccccactcccagatccgggacccccaagcctggctgtagcccctgagccctgccctcagcccctgcggagccccagcttggacaatcccactcccttcccaaacctggggccctctgagaacccactgaagcggctgttggtgccgggggaaggtgagtgtcagctgcaggctgggagggctgaggtctgggcggcagcccctgattctcaacccctctccccttcatgccgctgctgccgctgctcagagtgggagttcgaggtgacagccttctaccggggccgccaagtcttccagcagaccatctcctgcccggagggcctgcggctggtggggtccgaagtgggagacaggacgctgcctggatggccagtcacactgccagaccctggcatgtccctgacagacaggggagtgatgagctacgtgaggcatgtgctgagctgcctgggtgggggactggctctctggcgggccgggcagtggctctgggcccagcggctggggcactgccacacatactgggcagtgagcgaggagctgctccccaacagcgggcatgggcctgatggcgaggtccccaaggacaaggaaggaggcgtgtttgacctggggcccttcattgtaggtgagtgagacaggggcttcgacctggccagtacaaagcagcctgcacagtggttaacaactcaggattggccgggcacggtggctcacgcctgtagtcccagcactttgggaggctgaggtgggcagatgacaagttcaggagttcgagaccagcctggtcaacatagtgaaaccccatctctactaaagatacaaaaaaatagtcgggcgtggtggcacgtgcctgtaatcccagctactcgggaggctgaggcaggagaattgcttgaacccaggaggcggagattgcagtgagctgagatcgcaccactgcactctagcctggtgacagagtaagactccatctcgaacaacaaaaaaaaaagaactcatgattaggactgaattcagacgctggctgcccttggcccgctgtataaccgaggcaaaggactttgccctgagcccgtggaatccaaggatggtctcctctctctacctgcctgccagcgctggggtgagacacaggcccagtacacagagcctgctcagggaattagctgccactgtcatcatcatcgtaactaatgatggtgaacagaccaatagcaggaaagctacatcccttagggtttcgctgtgcagtggcactttctgccatgatggaaatgacagtcacctgcactgtccggtgcagcagccactagccacaggggccaagcactcaggtgaggcgagtgcaaccaggacgtgattcgttttaattggttacaatttaaactgaaataaccttacatgactaatggctgcaattggacaatgcagcctcagacaggactgaatgccaaccagcttctccagattcactgagcatccttgggagcatgggccccctactctgggcctgttatgaatgctgaggcttgggggcttgggggtgtggccttccaacaaccccaccctgatgggagggagggagggagggaaggaggggactttccccaaacaagcagtcccctggtcgaggcagcagagggccttaggtcaggggaggtggtgggggttatcattcaagtttacggggaagggtgggtagagggtcctcttctcatccctgactaggctcctgggcccccagatctgattaccttcacggaaggaagcggacgctcaccacgctatgccctctggttctgtgtgggggagtcatggccccaggaccagccgtggaccaagaggctcgtgatggtcaaggtgcctgcagacctgagtccctggggctgaaaggggtggccttacagagggaagaggttgctcccaggaactccaactcccagagggccctctaaaaaactgcaacttccaagatctctgcaataaccagtttttcatccccgggagctccttcccatggcctcacctgcagaacctgttttgaactctctaaaccagtggcccccaaactatttggcaccagggaccagtctcatggaagataatatttccacggacagggaggtgtggtttcgggatgaaactgctccactgcagatcatcaggcattagattctcttaaggagcagccgatccctcacgtgcgcagttcgatagagtttgtgctcctctgagaatctaatgctgccgctgatctcacagaaggcagagctcaggcagtaatattcccccacccgctgctcacatcctgctgtgcaacctggtccctaacaagccgtaggggggttggggacccctgctctaaaccatgtagaagctggtggactcaagttttagctgccattgtgaggccatggctgtggctcccaggagtcaagatcacagactgctcagccctgacgtgtgtgtgtgtgtgtgtttgtgtgtgtgtgtaaaactacaactcccagcagccctaggcctatggttcagttacagcagggggtgtgtgtgtgtgtgtgtgtgtgtgtgtgtgtgtgtgtgtgtgtaaaactacaactcccagcagccctaggcctatggttcatcctaggttacagcaggggctgcagggagttgtagtcctccaagccctgactcctaccttggtggacagtggctgggtgttttccctgactcctgtccccacttcccctgcaggttgtgcccacgtgcctcagggccttggtagaaatggcccgggtagggggtgcctcctccctggagaatactgtggacctgcacatttccaacagccacccactctccctcacctccgaccagtacaaggcctacctgcaggacttggtggagggcatggatttccagggccctggggagagctgagccctcgctcctcatggtgtgcctccaacccccctgttccccaccacctcaaccaataaactggttcctgctatgatca

SEQ ID NO: 1206 - DNA, 54504 bp, Homo sapiens
attctaggcggcagtggcgggcgaagcgtgagcgctgcggtattttgtcccgaacggtgacccctcctcccaggcaggctgcggcggcgtcggtggcagcggagcacggagaagaggcccgggcggcccggcggcctggaggccgcgaaaggtggaggccgggccgcccttgtgcaccgcaggattgacccgggaaggggcagaagctagcgagccccgcccggccgccgggaaggtgggggaagccccgtgcaccccccgccctccggccgccgccgccccgctggccctgcagccgtcgccgctgcctcgggctacagccccgggctcggcggtcccggctggggaaggagggcggcgagcgcgtccggagccgccggagatggcgggagggcactgcggcagcttccccgcggcggcggccggcagcggcgagatcgtccaactgaacgtaggggggaccaggtgagtcggcgggtagcgggcttgcagcggggatgccttggcggcctcctcctttggtgtcgacggggaccgagagtcgcaggaacgagggcgagcgtgggaggccaagcctggaggggaacgtgggggcctccaggcggcaagaacgtcgggcggattttggagctggtgaagcatctgctctgggaagggagaggcagaagggacgcttggaattaccgaggaccaggcccatgtggcagagtagctgctgtcctagaatgccaacctttgcccctcccaacaggcaaggagaaccattacacagccttccttacctcatctcagattagagtgtatttgaggactttatttagtagaaacctggctttgtggtttggatgttggagatgaacttgctttcctttctctttggtcaacgaggtgtcggttttcttagggaagagtgcggtgttcttttccgcgcctaattaggggatttgtaatttgaaagatttctgtgatgggagtgcagtaggtttgcagtacctagttatttattttcagaatttcttggtgcatgggcttgaaggatctgttcaacttctaggacagtgtgtccagaaactgcagtttgaacatttgcttttaggaagctctggatattggcacggtgtgacgcccttggagtaaacagactgaatgctcttctctgtctgttctctttctggccttccgcccccccccccccccgccccttctgtgcctgttattaagtttgttgggggaaaaaatcgtagtttttgtggatttcctataacttatgagtcactcctctcagaaaagggagtttgccagctgtttgaaagaaggattagttgagttttaggcttggtaaggagataaacaaggaaatgctctggaatacagttaatttttctgtgcttgagaatatgattttcaaccagcattttaaaagtattttaatgtcttagaaccatagtgataaaaaatgtctactgtagtgctttaatcctaaacatttgatagctttctagaatttaacacagaaaaccatggtacttcgttcttagggtttttcctcttcccccaaatcaaaacttagataatttacaacgttattgcagttgtatagaaaccagtcttatggagatttatgtctcctaatgtaagaaatggagtttttcctaaaatcacgttaaaatattggaagtttggtaacttgtggaatacccctaaagaggaggcctgcaatgtgtgttgattatactgaagagtagcagtataatcatttacaatccctacactggtttctacttgctattgatagttaatgtatttcttttctttaattttctttttttttttttttgagacggagtcttgctctgtcgcctggctggagtgcagtggcgcgatctcggctcactgcagcctctgcctcccagtttcaagcgattctcctgcctcagcatcccgagtagctgggtcacaggcgcgcgccaccacgcccgggtaatttttgcatttttagtagagacgaggtttaactacgttgaccaggatggtcttgatctcctgacctcgtgatgctcccgcctcggcttcccaaagtgctggaattacaggcgtgagccaccgcgcctggccgatagttaatatatttctattcagacattcacaaggacatacagtattattgtaaaaattaagcagtattgttatttactatgtggatggcttaatactgagtgaactcttattagagactgcagaattcatttaaaagttttaactcataaggcagttatcttggcactgtaacttttttttttttttttttttgagacagagtctcgctctgtcatccaggctggagtgcagtggtgcgatctcggctcactgcaagctccgcctcccaggttcgcgccattctcctgtctcagcctggcactgtgacattttatcttgtgtttacattatttatgaaacttgagcttatcaggttctaattttttctaagtgatattagcaaagatacaaaatagtacatatattactggtttgaacagtttacaagacatgaaattgttagtgggaatggaaacattaaaaaacttcagaaaattgttaagataaaatggcttataaaataagtagtaatggtatggcccgtagaaaacaacatccgactccatattctaagaatattttctagatttgctttgaatcctacactcgtgcagcattttagagctagatgagatctagaagtcacctgtatcttgtacaaaacacagtgtaacatagtcacttaagccactgtaagagaaaaatcctgatatgattgccactgaagttcaggaactgctgtggcatagaattgaagttctgaagtgatagagtaaaactcaaaaggagagtttgttgggagcagagaagcatatgctatcggtaaggtctttttttttttttccctcaggagaatagacatgaaaatggatatactcaaaggaattatagaaatgactaatttttatggtttaatactttgtgggtgattcagaaagtagagtagatgaagtttcatttagaattgttagtattcgttatttacaaaaagtaatgaagtgaattcactatgactgaatttatgattaattctgttatgggcaagtgtgattttgggcctcatgcaagagggctgggactagccattgaggactcctggacaaagagcttttgagtcaggtatatgtttccaattcccaggctttatctctaactagcctagcaaccttggacaaatattttgatacttagtctattaaaatgtaaagtgacagacagtagtaccaatcttatcagattgttataggaatttgaagtaataaatgtgaaatgcaagggttagtggcattatcagtacttacagtgcagaataaataactagttagattgctaccaagttaatttagtaggaggcaagttgcatgaagtataactgtgggtatgcaaatttctttagtcctttgctgaaaccagattgtacatgactctgttcttgggacactatgggtatgggataaaaaacaaatcaaaacagaaaaggctttcaaatgattatgctcatcatgtgtaattttaagtgtgttagttttcatgaagttatattcgagactggttttggggccagaagtttaaaaaaaaattggtggggatgagggtctaattcctttgcccagaaattccaggttactaacctttccccaaaatgctgattaaaattgaaactgataatatgattttaagcagacctttgtgattttctaagtagcacataattttaattatttggaatacaattggtgaataagtggtgaatataaaagattgcaagttataagctgtcctcatttggaatgaatttgatggcctccaaaacagtgaatctgcaatgtatgaatccttggatccttcaatttaccattgagtggatttgctttgattttggaccaagtcagttttctgtgactggggtaatctgtgtattttttatttttcttaagagtctattaagaaacgcatttaggagcatttgcagtgttttcttaaagtgactcatttgttaatcagataaatgggcgtaggaactgcttataaacacctagactgtccataacctgtgaaattagttagtagtcaacttctatgtgttccctaaagtaccccttactgtagtttacatttaaatgtctttaataaatgaattgttttactgtctttccttcagttagccaatgaaagaatacttttccttacaaattgtaaagttgtatgtgggaagaagtggagataaactttttttttttttttttccgagacggagtctcgctttgtcgcccatgctggagtgcagtggcgcgatctcagctcactgccagctccacctcctgagttcacgccattgtcctgcctcagcctcctgagtaagctgggactacaggtgcccgccaccacgcctggctaatttttcgtagttttagtagagacggggtttcaccgtgttagccaggatggtctccatctgctgacctcgtgatctgcccgcctcggcctcccaaagtgctgggattacaggcgtgagccaccgcgcctagccgagataaacttttaattgtgattggaaagcatgttttgataatgatagaaaatttattttggagactaaggcactttttatggaacagtgcatacacggcttctgctgttactgacactgagactgatactgctaaatgatttaagtgggcagtttagtgacatctgtgtgtcaacaccagtgtattctgaaagtgctctgttgtaaccataaaatgcctgcagatcgtacagaagaatcaagtctccgttttgtacagaacatttaactgagttttagagtgtgattctgtttatcacacataagtttcaataaacatttactgggtgtgtgctaggtgctaagaacaatgcttttaggtggtcctctctggctttaagaaaaaacaacatctacttttttaatacaaaatccatttctgaaactgagtttgaaaagtgaatttacagataatccatttatcaagatatgtaaaatattatgagccattgttgcctcaggtgcctggatggacttgcaaagttgagagatctgtgagacttctgacactactctgtataagccttggtagtcacagtcaccctggcctgcaatccagtgctatttaatagcccacttagaagatgggaatgggaagtaggatgtattttgaggtttgttatgctgcagtgagcataataaaaaaaagtaagcaacttccacgtttttgataattccaggctgctaatttaggtaatggcagacaatagatggatgatacagtgtatacatgcacagcctgggaaacatcccttagccattttggctggggtttggcctgtgtttcctggtgatagtgcatggtaactagtgccactattcagtcaccttgtttagtttaagtatgaaaggtaaaaataaatttagggatttcatataatgccagaaaataaatgtggagtgaaagtagaggtttgctaggctgggtgagataacattgtagttcaaggtgatatcttaaaatgaaaatactcagagaagggctggactgaacaagtactatattgctttgtttgccatatcagtttacataaattattggtttgttgtcccagtctattatactgtactttggtaaagatcctcccttggtaatatacaagcttgatcaaatgacaacctcagaacagtgatgtatttggctgaatgatttttgaatgaatgaagtcagcagttgcagatagcccaagactgcctataaagaaggtgttaaatgagtaatttacagtgaaattactatgagcttaaaaagagataatacaggattggatatttagaaaaactattacagggaaggtaaaacctgagtggtatcaagaaagatggacggatcttgaattattggacatgaagagagtgatctagctgaataaagataccaaaatggtagtaagcatgaattttttggggatatgaagaagttttgtcctattagaggggaaaaccagcatttgtactggagagatgagatggaacctgaaggtaattttgaatgttatactgagaagttgagacttggtgtgatgggctaattgttgattcttcagcagagattagcttattggaaagtagtgttttaagatgcattatatggcggataacaagttgtttattgttattgagagctgcttgtataatcttaactctgaattgaaagtagcaacgtttaaaaatattaactgtaataaatatattggtacagctataactataaaacatcttgtaaatcattagccagtgtattaaaacaagttaactaatactgaaatttcaaatcatgttctcacttataataccagatgatttttaattgcagatttagtacctcaagacaaactcttatgtggattccagattcttttttttccaggtatgtcttataattctttagtgtatattttaatacatttatttaccaaaatataataatgtttgtcagttaaattttttttaataaaaaaggttaactcttaaaattatatatttttgaacttggaagatagataacttacttttagtggtctttaacatttggtaaagaattagcacatttgtttatactcagattttaaaaactaactttagattattaatgacttccagtttgctgagtgggagaatttcaacacttcgagatgaaactggtgctgtgagtataataataattgatacatattcctaaattaatgcttatagtgcttggtcctaacatatagttactctaagaatataggagaactgatattttaataatcactgaatgaaagtggcataattttatttcttgtcatatgtagttttttataatcagagaagatccctaagtagggaatactatatatggcaatttaagtattcatgattagagagattgtaggatatgagcttacattggcattagaagaaatttttttagatcaataattgaaactttaacagtaagtggataaatgtaaatattctaatatttttatattagaatataagaggttaaattagtaaactcctacagttttttattttattttggagaataaccttgcgaatttgtttatacagcattggtacagtgagggaaggaaagaattgtaaagtttcagtgcaaaaaaattggtttatccatttggaggcaacaaagtgaccaatggtatttatttgctgtggtgagatttgcagatgaaataaggcaacaaatgcagatatgtccatgtgaaattataaaaagttatcaataataagatctccacaaatctgtgatgtctcttcgatttttgatgtgctctaatgaaaacaaaagaaaatttataaagcttagaagaatctcattgattgtatatatatagttgatcatagtaggaagagttttattactggctgccatttccctttctaattgatttacataagctttaaaagatgttccgtttttatggccagatcttttgtaaatgattcaaaataggtgttggtataaatttccataaaaagttatcaattatgggctgggtggggtggcttatgcctgtaattccagcactttaggaggtcgaggcaagtggattacctgaggtcagaagttcaagaccagcatggccaacatggtgaaaccccctctctactaaaaacagaaaaattaacccggcatagtggcaggtgcctctaatcccagctactcaggaggctgaggcaggagaattgcttgaacttaggaggtggaggttgcagtgagcccagatcgtgccactgcactccagcctagatgagagagcaggatgctgtctcaaaacaaacaaacaaacaaaagttaccaattatgtattttacatttttaagcaatttgttttcctcttatgtattctgtggtgctttagtttaaaaaaaaaaaattgtcattacctttccccagctctgaaggaaattgagattagtaaaagtattatgagaatagtattcttttccacttttgacagcagtgtgcagtatttacttttctcaagtacccctgtgtgcattattaaagtacattgtagttttaatgattgaacagtataagaaagtattatttattcatgttttcgaagtattaattgaattctagactgtttcagataaaaatgtttcctcaggtgtcacttttaccaaaggtatcaatacaagtgattttattagacaagattttttctatgtattaaaatatcagtttaataataactattcagaggaagaaaaagacaccatctcaagaaaaagacaccatctcatgaaatgcacacagactacattccaattttagaaacattaaagtttaagagtggaaacaaggaaatgtagtatttaagtaattaagacttcattccctattagtgttacagatattaaagttaaaagattaatttgtaatttgaaaataaaactgttctcttttttacagatatttattgatagagatccagcagcatttgcacccattttaaattttcttcggacaaaagaactagacttaaggtaagaaatgcactctttttaaagtaaattcttactgataaatatgtgtttttaatatgttttatgaaataaaaggttttttttgtttgtttttttttttccttgagttgcagtcttgctctgttgcccaggctggagtgcaggagtgcagtggcatgatctctgctcactgcaacctccgcctttcaggttcaaacaattctcctgcctcagcctcccgagtagctgggactgtaggcacatgccaccatgcccggctgattttttgtattttagtagagaaggggtttcactgtgttgcccaggctgattgcaaacgcctgagctcaggcagtctccccgccttagcctcccaaagtgcagggattacaggaatgagccactacgcccagccagaaaaggtttttttttttttactaagactttgattaaaagtttcctcacactgaaactggatgtggtggtacacgcctataatcccagctactctagagaagaagctgaggcaggaggatcccttgaggccgggagtttgaggctgcagtgagttatgatcatgcctctggccagtactgctgtactgttaacacaaatagtttcgaaatagaataagaaagtttgaagctttttttttttgagactgagtcttactctgtcacccagactcactgcaatctccacctcccgggttcacgccattctcctgccttagcctcccaagtagctgggactacaggcacccgccaccacacccggctaatttttttgtatttttagtagagatggggtttcaccgttttagtcatgatggtctccatctcctcacctcgtaatccacccgccttggcctcccaaagtgctgggattacaggtgtgagccaccgcccccagacacaaagttttaagcatttttaatgttaaactagtcataaccagtttcacaaataaaaacaatttaacatagtaattgtatatatttatcaaggctggggaatatttttaaaataaggacaaattacaactgaaacctaagatgaattattagtattataagttctgaatcttccattttttaaaaattttatttcatgttacttaactttactactatgaagtagcatcatttcatctggataacatagcccttcccaaggctagtcttttttttttttctattttatttgttcaacaaatatttattacataactattttatacaagcactatgctaggcactgtgaggtatacaaacatagatcagaaatagatcatgctcgcagggaatttatagtgtaattggggagattaagatagatatgtatagaaataattgcgataaaaagttaaaagcaactaatgccataaaagaatggtttccattctatcgtttgccttctagacaatttatttgtactagcctgatagagccctaatctctcctttagtgacccaattcatatatatgtatatatatgaatggtttttaagtagataacagaatatttttgttcacatgcagtttttatttacactttttaatgattaaggataatagaaataaagagtattaggaggaaaataatttttaaagccttatgactatatacatgaagaacctagaattttttcctttcatgtcagatgataatacaggtttccagtgttagagaatttacatcatttgtttctttgtaggggagtgagtattaatgttctcaggcatgaagcagaattttacgggatcactccattaggtatgtgctcttttaatatttggtgtttatgatttgactcatgtatgaaagttgccctaaatgaaatgtgtttatatcaggtcctaatttttgatggacttgttcagtgcttagtttttgtggattttcatagtaaaaagatgttgtcaactctgacttaattaaaattttccttttctttccttatcctcttgaactagagaaaataaaaatggagtactgtttttctgtttgcatgtactcttgacaagtttgctttgaaatgtttttagtaagaaggcttctcttatgtgaagaattggagcgttcctcttgtggcagtgtcctttttcatggttacttgcccccaccaggtattttcactttattaaatcttttaaaaaattccttgtatcattaagcaagtacaagcatatgaataggaaaaactgctccttgattattgagttttttgtctataaatctattagaaatggtaagaacttttgatttttatagaaattaagtcacattatatattggagcaggggtttggcaaactttttctgtaaagagccagatagattttgtgagccagaggatctctgtgacagccacttaactccgctgtgtatactacatgaagactaggtttaactgtaaccactacaactttatttacataaatagcattgattgggctggattttccatggcccatagtttgctgacccatatgttagagcactggttgtcaaactgcttttttgcaaaatttaaggaattctgcagagataagtcagtgtcacctcagccccactttagttagaagagcctgattttacctgtgttataatggacttctgagcaagatttcattttaaaaaatgttcccctgtcaaataaaaaatgtttgaaagtatggggaatttcagttctaaagcagttaaattattacatagtacctaacacataatacctgtaccataattgtaaagagtggctggcagactgaattaattacccattaattcagtaacctaaagcttatttattgtaaacagtatgacaataccagaaatctgttgacagaattttgtctttgtctttgtttttttcattttcattttattttttaattgtaattaaattatttgtaataatttgctatattggaagatgtatttcggctttaatgaaattcacatttttgtttctttgtcacaatgtgatatttttaatttttgaaaggtgaacttaggaatgtatttgttttcttcttctctttataggtattcctagtcgtaaaataaacaacacagtcagatctgctgattctaggaatggtctaaattctacagaaggtgaagcccggggaaatggtacacagcctgttctctctggaacgggagaagaaactgttaggctaggtaagcaaagattacagaaatagaaaaagaaaaatacgtatgtttttagtgctgggtgatattgagtaattacttttaaagatttttgcctcatctccttttttatccagatttatcatttatatcttggaaaggtctcatttaacacttaatttttatttaaaatgttgtgtaatcttctatcttctctgaatctttagaacagggttgccaaaatttatctggtaagagccagagattaaatattttaggctttgtgggccacgtgttctctgtcagacctactcaactttgccattgtagcatgaacacataatggacaatatgtaacaagtaagcatggctgggttctaacaaaactatttttttttttttttttgagacggagtctcgctctgtcgctcaggctggagtgcagtggtgccatcttggctcactgcaagctctgcctcctgggtttacgccattctcctgcctcagcctccggagtagctgggactacaggcggccgccaccatgccagactaattttttgtatttttaatagagatgaggtttcaccgtgttagccagtatggtctcgatcccctgacctcatgatccgcccgcctcggcctcccaaagtgctgggattacaggtgtgagccactgtgcccggctcttaacaaaactattaaccaaaacaggcagaaggctgaaactggcctggtggctgtaatttgccaacccccggtttagaatgtaaaatatttctttttccaaaatcaacaggatttcctgtggatccacgaaaggtgctaatagtagctggccatcacaactggattgtagctgcatatgcccattttgctgtgtgttacaggtagtgtataattaataatgctttgcttttacaggtggcagtttgaaaattaattgtgattttatatttttagattgaaaagctatttttttttagtcatcaagttttttccctgcatattttacccatgtctgtatcatctgattaagatttagtgtacttttattttcacagctaatttggtaaatgtttctgatagcctttatctgttgtaaacatttagcagacaagtgtgaattgtcatgtaactgagatatcctgatgtattatttattgcttatacctagcttctgagactgtagtatataatgatgttagacaggattattaatgtgagctccctgatggtctatctctaatgattcagtgttttgtattctatagcaagggagagtacattggtcataaataccacattttgggaagtgaggtagtaaagcaggacagttattgcacaagtggtatagtttaatatctaatatgtgaaacttacaaagaagtagtttggttttactaatgcttacattctcagagcctgagaagcaatgaagaatagtgtagaccggtgatttttttttttttaattgggaaagtgataggactcttagttcaaaatcactgtactcattgagaaatgttgatgacagagaatggtgtagaagcacaaaagtggttggaatatactagcttagattattatttcatttaattgcagaaaaatcaaagatacataaactatttgtttatcactgttgagttcggttaagaaaaatagtcacaataagctgaaaaatatctaaaatgtcttctaaagtttacagatatagtttaaagaatcccagatgtattttttttttaaaaatctgaatttatgaaaggtttggcatgtctggtaagtgctgtttatatcagtaatctcaggtttatattttccttgtagtaatgattaagtgcagacttttatgttttaagagtgttttggctgggcacggtgggtcacgcctgtaatcccagcactttgggaggccgagatgggtggagttcaagatcagcccgaccaacatggtgaaaccccatctctactgaagatacaaaaattagccaggtgtggtgatgcatgcctgtaatcccagctactcgggaggctgaggcaggagaatcacttgaacccaggaggtgggggttgcagtgagctgatagctcaccattgtactccaacctgcgcaacagagcaagactctgtctcaataaataaataaacaaatttttaaaaaaagtgttttgtggatttgtaattttaattatgaaatagcatggaaattgttttttgcataatttctttggggatggttttgtatgaggcaagactaatttggtaaagtaatttttttttaggaagcattgttttgaatttatcatcttatatatttgaattgaggtgacttgtagacccttgtttacatattatgtacatatttttgtcaataaggaattccagaagaattgtgaaatgataagtgatccaagtgtaacagcataacttccgttttgttactgtacacaatactaaagattgctcttttccagaaccaccacattattacgcaaaatttaactcactgggtaataattgtatggaggatgatgctattacattttccagtctttgcgtttgcattgatcacgatctttctgtgctttcaccaagtgtctgacatttcagagcaatatactcatgtaaagtgacgaaggaagacaattgaggacatatttggatttcctcacatatagttaaatcattcaacacaatggcaataaaaagatttcaaaagaaagaaaaatatttaaactgtttaaaagtgtaatcttttttacaagttatttttcctcaagtttttgtatcagtaagttacaaaacctttaaaaaaagagtagtacagtgaagacctgtatgatgttctcctagcttcactaattttctacatggttaggttttatgtttatgtccctttttcttgctgagtttatgacagtgttacttctattaacgaagagtagttgtgtgaattgctgcccccttggggcttatattccactttagatctttaatccttgtggagtttacttttttgtatgtggtatgagatttaaggatttattttcttctcagtgggtaggtaattatgttctgacaatttattacgtaaatcattctttgtcagtgaatctgatagcccattttatcttgctttatgtgtgtgtatatacttggatctgtttttcagttctctcatttccttaagacatatgtctattctcatacaacttgaggtgaagtatgttcataataagtttcaaaatctcacagggcatgtcctctctactgtattttattgaggtcttcatgtaggaaataactagacgtaactctattcttcgcatagctgtcttaaccagagggttggttcactaggcagcagtaagatgatggagaggtgaaataacagagcatattcttgttttatattttgttttatttattattatatattttttgttttgttttgtttttgagattttgagacagagtcttgcactgtcacccaggctagagtgcagtggcgtgatctcgggtcactgcaacacctgcctcctgggttcaagcaattctcccacctcagcctcctgagtagctgggactacaggtgtgcaccaccacacctggccaatttttgtatttttagtagagacggggtttcaccatgttggccagactgttttcaaactcctgatctcaagtgattcacccgcctcagccttccaaagtgctgggattccaggcgtgagccactgtgcctggccttgttctacatattttaaatgtattacttgtatggaaagttatagagcaaatatgtaccttctttgtaattttttaaaaaacaggtaaattcacatatcttattaagagttaaattctgtagttgttatagttatttttaaatatgctgtcctgattcttttatccttttttgacatctctttattgtgtaataccctaattactatagagaaaaacaacttagaagtaatatgtctgtaaaagatgagattatatagtttttttttttaagtgaatccaagtttattaagaaagtaaaggaataaaagaatggctactccatagccagagcagccctgagggctgcttgactgagtatacttacagttatttcttgattatatactaaataaggggtggattattcatgagtgtttcagaaaggagcaggcaattcccagaactgaatgttcctcccctttttagaccatatagggtaacttccagacattagatgtcatttgtaaactatcatggggctggtgagagtgtcttttagcatgataatgcattataattagcgtataatgagcagtgaggacgaccagaggtcacttttgttgccatcttggtttcagttttggctggcttctttactccgtcctgttttgtcagcgggatctttgtgacctttaccttgtgctgaccttccttgttacgctgtgactaagaatgcctaacctcctgggaatgcagcccagcaggtctcagccttattttactcagtccccattcaactctggtttgaacacctctgacatgttttccccttcccttttacaagggtactcttaatcctaagggtttcagagggaggaagattcatcttctgtaacttctgcagtctgaatagggatgatggtatttctgcctattagggtcttctgcattcagagtagaggagagctcagttagaaactgtcagtatggtgagaactctgatttctgacaaaaagtgatgactgaaaaattaataagtgttcgatttaagaaagcactgagtaagcttatcttgcattcctacacaaagagaacaacagcagtatattctacaataacaaggcaaaataagtaaaattatcccaagtaaactaaataagaaggcttttcatgaactgggaaattgttgtaaccaagctgatatggagttggaaccaagctgatgtgctagccaattccaatacatgcccacaattagaatactgatccagatttctgtgttacccatgcctcttgtttcttctgaacagcagccacagatcactgcttggtccacaaggataagcaggatgagtccaaattgcagaaagaactcaaaaactactgatgagacaaatctaataaaaagcataccatagtttttgaaacaattttcctattttcagtctttcatttttactaaagaaatcatggtaggactgatttgtttgcaaaataagctttagtcttattatacttggcctgattatttgtataaagtgcagcaagaataattagttcctatataggctctttttaaattgactttgatagaactttgatccataaagaatctcaaatgagacttcttaaagccttgagccttgccatgggtttatcattgcctgcaaatacctgtatgagttgggtaagtttctttccttttgaggtttcatgataacttggggcttttgggcctgtcagaaagtgactttctttacttaccccagacaggtcagaaaccttgtacagggaccgtgtagacaagatatgtggccagtttttcccaggggcttttatcagctctatgagtcaaatttgattccttaaacaagtccatatctgaaagcatgctattccagtcaaagtcttggtaaaataaccagtttctccaattgtgtcctgttacaaaagaaaacagattcttattgtagttacatattgctgtaagttaagaatactcacaaatagtttccaaattctggagaaatcagatagagagaaagaaatatgctccaaattttgtttataagagtatactttactcagttgttaaaagctgcaaaatctcgaaagaaaagtgttcttgactccaaagtcagctaattggtgctgcagtctatttcctttgggttgggggtctctccactatctcatttcatggtttcccaggaagatgttactggaaaggggtcctcatccagacccccaaaaaagagttcttggatctctcacaagaaagaattcagggtgagtccttagagtaaagtgaaagcaagttcattaagaaagtaaaagaataagagaatgtcagcaaattttagtgtttattaggtaagtatttaagtattttcatttgtttatcttaacaaatgaatcccatctggtggctgaagagggtggttacaaattacacaatgcttaggaaaaattgatacatttttctctattgctttgaagtttagggaaatcattagttcttcaaattaatatgctcaattgtatattcttatgaattacagttgtattacttggcatacatatttaagggaaaatgaagttgatgtatttttatttaggcccttaggtgaccatcatttatgaatacctaagtttgctttttgcagcgaatgtcaggtagtgtgcaaaagaacgcttcttttccttcatcttctatattctctttaggtaagccaaaagagaaattttatagttatgtttgcattatttgttgagtttaaaaatagatacttcatagttcaactcattcattattatgattacgtaactgctaaagctctaaatgtatgaaggctgctatacatataatcgcatagaaaacatttctttaaaacctaaattcagatagggcagaaagaattattaaaaactgacaggatatttattagagaaattaggtattaaagaatacattagcttttacatatgggtagtcatatggaactgtagttccatagagttttgcatttagacctttaaaaactagtcttcagaggatatcctgcaccctatccttttttatataatagtgctaatgtattggaatgcatgtgatacactcagtgtttctggatagactgtccatctgaagtacaaaaagcaagagattcagtatgtgtcatttcagttaataaaccctgaaaagctgattaataactgaaaggaataataattctgaaattcagatttttgctgattgttcatactcacagaagatgacagtatcatttgtgtgtgtgtgcgtgtgtgtagagaaacatgaaagataaaactatctttttttaaagtttctgaaattttttaaaatttggaggactttactaaattattctttggggaaatatagaactgtagtctctttcaagtcgttatatgtgctatgtatgcaagtatacaataccccaaggataatattgtggcttcataggcaatatagatcaacaaaattttatttgtaataggaaggtggatgggtaactgtttagttttttttttgttttttgttgttgttttttgtttttggtgcattgatgtgtattccgtttgcttcattgctgctgagtctaccttatgtgcctgttcttccttaacagaatcaaagaatcttcaggatggcagcaagtgtttacgagcccatatttggattggactatcgaacgagtagctttaaatgcaaaggtggttggagggccacatggagacaaagacaaaatggttgctgttgcctcagagagtagcatcatcttgtggagtgttcaggatgggggaagtggaagtgaaattggtaggaagaatcttgtttatgttgcaatttgatgatattaatattttgaagtttataaaagagattgacactgaatatgaaaattaacctggactgtcagttagctagagctgtcacagtatttaatgtgggaggaatgatctgataatgaaggaaaaatgatgttttagaaaagacatggggaacatcttttcaccactttaagtgaaacctggctgctctatgaaaatattgcttttcctgaatcccacttagtggtggatgttttcactgttttctctccacccctctcaaactactgaacctgaatgtggggtaagtcactttcttgctcctcattgttgcttctagaccagacattcccaaactttttggtttcagaaccccttaatcctcttaaaaagttactcaggacctgaaagaatgtaggttattttcttttttttccttttttttttttttgagactgagtctcgctctgtcgcccaggctgtagtgcaatggcatgatctcagctcactgcaacctctgcctcctgggctcaagcaattctcctgcctcagcctcccaagtagctgggactacaggcacatgccaccacgtccagctaatttttttgtgtttttaatagagatgggtttcaccatgttagccaggatggtctcgatctcctgatcttgtgatccgcccacctcggcctcccaaagtgctggaattacaggcgtgagccaccatgcccggcctttctgtaggttattttctatcagtatttactatattagaaattaaaatggaaatttttataaatgttaatatagttataataatccattgcataacttaagtaacatttttaatgagaacctcattttccaaaaatgtgtgagaagaatggcattggtttacagttttgtaaatctctttttgaactgtgatatctatttctgcattcaatctgctgtgatacattgttttgattgaagtatatgaagaaaacttgatcttacacagatatgtagttggaaaaaacttttttcagtcttttcagaaaattgtgcatagtcttctttgattctttatcaaaactctaaaatcatatcagtgaacttttcatattctgttaaattaaaatccatcagactattttgtactttgagtggatcttttatcatacatgcttttataagatgttgggcatttggaaattgttggtttgctgagttatgtagatctaccaaatgttgatacctttcattgtataatatgaaaaaaaattgcattcattggtatccctgctgactacgtgtgagggagttgtcacactcactgtggcagataaaagttttccaaactgcagattttcacttgaaacgttgaatttttatcattggcaacaaataacatcagtggttttcctttagataacaggcttactttgtttattttttgaggatagttctgccaaacacccaattctgaataaccatagtcatctcaaattaaaatggtacttaatgaacagagcagctcctgtagctctttgctccagcatttgtgaaggtgcttttccttgacatagccatagtacttagtcatacagaatattaagatatatagttgaaattaagtttttatcagtacaaatttttactgcttcatcaaggacattctttagttactaagaccattacattctctgccacagactttcgggaacataaaaggccaaatctttaatttaatctttaaatctttgatttggccttttatgttcttgaaagtctatggcagagaagaatgcaatggtcactagtaaagtttagtgccactgtcctggtttgtgctaagtaaggtacctgctgtttttaccaaacgttgctttgcatcatcagtgtaaatgtcaacacagatgttctagaataagccatgaaattcatataagttttcaacactttgactatttcagcacttcctgtgtttgtagctatgcattcacataaaggatttttaatgatcagttggagctaataccagatgggtacaagtaaaacaccaggtctagctaataccagctggatacaagtaaaataccaggtccagccacatctatatattcatctgtttgcaaggcaaaaatacaattctacagacaagagattgactctctgccaaatctttagattgaagagttactgtattattgaaaagttaccatgttatttcttcatggacttttcatctagcaggcattcagcattgtcatctgttcaaggctttattagtctctcagcaattgggtatacttctctagccactgtgatgtcgtaacttacctttgagatacttcattagatttttcatttctagtttgaaggtctataccaaacaatttctggattaaatgagttttttacatctttatttaaaatacttaatttctttttcttcttttctttccttttttttctgagacagggtcttgctctgtcacacaggctggagtgcagtgatgtgatcctagctcactgcatcctcaacctcctgggcccaggcactcaagcagtccccccacctcagcctccttagtagctagaactacaggcaggcaccaccacgcctggctattattttttaatcactgtatagatagggtctcactatgttgcccaggtcttgaattcctaagctttagtgatcctgctaccttggctttccaaagtgctgggattacaggcatgagtcgctgtgcctggccaatttctttttgtttaaactcttgggtattcagtctcagtgaacctacaaccgatagatactatgcaaaaatgttttgctacataaagcacaataaggttaagttattaagatctataaagttgagggaagattccagattcccagaaggaaagaaggtgtccaacataaactgcattgtttatgcagttaggctttttgtcaccatagattaggtttcctttatctagaatttcatgagtagaattatatagtatttattcttttgtgcctggctttttattaagcataatgcttttgaaattcatccatgttgttgcatgtatcagttgtctgttcctttttattgctgagtagtattccattgaaataatacggcagaatttgtttatccattcacccgttgatagacatttggcttatttccaatttggagatattatgaataaagctgcagttaacattcaagtagaagtctttctgtggacatttactttcttaaggtaaatatataggagtggaatttcttagtcatatggaaagtgtatgtttaaggttaagaaaaactgccaaactgttttccaaaagtacctttttacatttttacttgcagtgtgtgagagtcccaggttctccacatcctaatcaacactttgtattgtcagtctttttaatttgagccattattgtggattttaatggttcagtgattttaattgtggctttaactgcatttttctgatgattaataatattaagcatcgtttcctgtacttaatgaccgtttgtatattttcttttgagaagtgtctctgtaaatcatttgccctttttaatgaggttgtcatcctgttacttatttgtaaatgttttttacatattctagatttgtgtttcacaaccaaggaaatcttatccaccaaaggatatttgaaaatgtctagagacatttttggttgacacagttgagggaggcctgtacctgtctcccttcctcttttctccatctctcccttgctcgctccctcttcctccttttgagctttctagatcactttatattaacctggggttgtgggagccctgattttttatttcatttttttctccattcttcagtttagatatcttttattgatctacctttaatgtcttttatacttctacagtattcaatctgcagttaagttcatctagtgaattttcatctgaaatgttggactttttagctctagtattactttttgattccattttctagtttgtttcttctgctaagatttcttgtctttttgttcattatgttcagctgtttaatttgttaaagtatttgtctgctaatatcaatatctggttaccatgtttttattttgggtcacattttcctgtttcacatgtctagagagttttgattatgtgctgtacttgtgtgtgatacattttgtagggttatgaattatgttacctttctttaaaagttatgagctttgttctggcaggcaattaaattactaaaggatcttgaacctgttaggcttgtttcagtactttgttaggagtaggtatcctcttctagctttatttgtaattttagggcagggctccttttcaaggctgtagttcttatttttaagatgttgcttttctggaatcttatttaactgaatgccagaggggctcagcaagaactctctacttttattgagttggaactactccatctacccacatatgacctctgatatctgatatctccagttaccttagtcctaaagcagctatctcccgttacctcttagtcctaaagcagcctttctttcttttctttctctctctctccttccttctttccttccttccttccttccttccttccttccttccttccttccttccttccttccttctctctttctctctttcttctctttctttcttagacagaatctcactctgtctccaggctggagtgcagtggcgtgatcatggctgactgcaacctccgcctcccaggttcaagggattctcctgcctcagcctctcgagtagctgggactacaggcacatgccaccacgcccagctaatttctgtatttttagtagagacaggtttcaccatcttgaccaagatagtctcgatctcttgacctcgtaatccgcccgcctcagcctccgaagtgctgggattacaggcgtgagccaccgcgcccggccagcagcctttctttccttgaggattcttgccctgcccaggtgcagttaggccttagccaaggtcttagggaaacgcttatgcaacttttatgccacccctctggcacagttcccttccttcttgtactgtatctactaactctagcctcaagttcttcgcctcctcagttcagggaaatcatctgtctttatttggtatattagtccgttttcacactgctgataaagacatactcaaaactgggaaattcacaaaagaaagaggtttaattggacttacagttccacatggctggggaggcctcacaatcatggcagaaggcaaggaggagcaagtcacatcttatgtggatggcagcaggcaaagagagcttgtgcagagaaactcctgtttttaaaaccagatcttgtgagacaatccattccctatcacaagaacgacaaaggaaagacctgtccccatgattcagtcatttcccatggggttcctctcacaacacctgggaactacaggagctacaagatgagatttgggtggggcacagaaccaaactgtatcacttaggtctcacctttctatgctgtgatagaaagtactcttatgcagcaagccagggggaatgtggggcttgtcagtgtgtttctgtctctcaggtcctctgctgcctgttgtccaatacctaaaaacagttgtttcatatattttgtccatttttttttttgttgttactgctgttttaaagtggagaataatcgggtgccatttattctatcgtgatcgacagcttaagtcctcccaaacaactttaagaaaagaaaatttaacataaaaaattttgaaattataatacactggtaattaaacagaaggtaaatcagttgtgatttctttttcctttttcaagtagctatttgtaacataccaataagtgaaagaaattttattacttgcttggtgttcaaaggctaatgtgataggtagctatgttatgagctggtacaatagtaatttgttcatgccctgtaaaaggagccatttgttgttaacaaatattcttcagaacatgacaacactatccaaagaaaattgttagggctggtatatccatgataaagctctcccagaggctgaactcccttcattataacttagataagacgagagttactgggtttctgctataagcaatattttaccaagagggccccttaagacaggaactggtcattacttctgttgtcttccctgtcactggtgctcaggattgtttagcctaagcaggagtgacactttaaatttcgtgagaccattcagagtgtctttgttgatttcctagaacctcatcctcctctggagtaatcgatgttagttggttttcctgttttcatttctgcctttcacatagcccataatactgaatatagttggcttcacatgttctaaaaagacatgttcacattgtttgttatcatcattaaagtactattatgtagaatccctaaaattgtatacaacgtaaaataatgactttatgctttgaagtggcaggttcatttcttaaccaattctgggcaacggacttagctttgtgtgtgtgtgttgtactttattttgttctagttttttgggctgagataatgtgtttcatgcacatgcttgtataaatatggattttatacatataattaaaaatgtttatatagaagatacttctaacaatacttagcaggttttttgttttggtttctttttgtcatgtatcgtcttcttgctagatgccttgcttttacaagactgattaaaagttttcaaggtgttgtttgtcactggtcttgagtatagtacagttctgaacaaaaagagaatacctagcaccagtataagattcaaaagaaatcagtaatctttctggcttatgcttttaaagcatgttatatttgcatttagttgctttgtttttcccatgagttcttcaaggtttcatgcattttttttctcagctaaatgctgacgaagttgtctgtattggcacaggtactttttaaaaataaactgatacttgaagcagccaaagatctacataaaacagtattgtagaggtgagacttatttcccagcattattagataaaaatatatttcccataaagtgtttttcaaatgattaagataatgctatttaagtgctagaattggaatacaactttttttttttttttttttttgagacagtgtcttgctctgtcacccaggctggagtgcagtggtatggtctcggctcactgtaacctctgcctgtgggtttaagcaattctcctgccacagcctccccagtagctgggattacaggcgtgtgctaccatacccagctaatttttgtatttttagtagagatggggtttcagtgtgttgcccaggctggtcttgaactcctgacctcaagtgatccacccgccctggcctcccaaagtgctgggattgcaggcatgagccatcatgcccggccgattataacatttttaagctcaagtgatcattgaaacatttagcttagaccctatttcgtagttgagataagaaccaaaaaagtggcaaacaaaggtactctgagagccaggatcccaaccctggttctcctgactcctagtgcagtactctgctaaagagagacaagtgtataaggccaatatgccgcaccaaggtgagcctagaattctctgcttaggcattgctgggtcttttgctactgatgtgtgataggtgctgcttacaacctctctcacctacacttactcttctgtttgctctgattccctgagcttgcccatattcagtctcccaatttgatggactcctattaacctttaaaaactccaactcagatggcttcttttctaagatatattttcaaccccctttccataccctttttaccccatagatactattataccctgtgcatccttctgttattattgtatcaaattataattggttgcagttttttctctactaaagtgtaagttcttagtaatgtcttgtcttctcgtgttttttaatcctaaagcctgatatagtgtcttttgaattaattaaatggagattgcagtgctggaacacatggggtttaaaaataagctctgagtaaaaggcccgaatgtttgtttttagtatcatgtgacttcttgctgcttttttctcctttttgcttatttccagaatttagacacattctagatagttaaggctgccaagtctgtgtgttcagatcactagttcttaaatatcgggtccatgagcaagctgcatataactcacctatggattttgtaacaatacagtgggttttctgatttagtgagtctggcatggatcccaggatcctttttgttttgttttgtttattttaaatctatcaatcaggttattttgatgatcagctgaggttaggaaccaagcttcaggataaggtgttatacagcagtatgagatggcttggagcagactcttccttgctttagtagttctgtaagctgcttaagagcttgtgagtttcttatttctagtccccaacacgtatagcacatagtttgtagtaatgagaatataaattagtcacctttaagatgtttttaatccaggttttgattaattctaaaaatggtgactgattaacctttttattttttattgtcatttaaggagtgttcagcctgggtgttcctgtagatgctctcttctttattggtaaccagttggtggccacgagtcatacagggaaagtgggagtgtggaatgctgtcactcagcactggcaggttagtttaaagcatattacagaagtgaaaatatttctgaaatgtatgctgattatgtattttttttttccttgtagaattcgtactgtttctggttttggttatacaaatattgaataaatgtagtggtaaatttttttgctagatgcatatttgagcatattttcaagagtttaagttactttggaaaataagtgagttttttaaactgtggttttgcatttctccatttattttaaatgttcgaagttctatgccttgagcatggtagtccaggcaaattttatttccagaataggagcacagatctgtgtgaaaacccataatctgttcagagatgatagcatgctaaatactctcaagtacttgagaggaataagaaagagataagactttaaaaaggttaatacctgattcttaaaggaaagaggaaaaaattaaggactttaagcagggagtgacataatcagatccatgttttagaaagataacagtggttgctaaaatgaaaagtggactggaggtcaggagggaatttactacagcaatccagcaatcaagaagcagagcacctcaactaatggcagtggtggtcgaggtggcaaagatgagtacatttgaagaatatttcatagaccttcctaaaatgacaggtctgctgtctgattgatgtgagaaattaaaggaagagaaatgtatttctaattttgggtttctagtttgacaatccagtagctagtagtattttgaattgataggaaacataggaagagaagcagagaggctggtgggtagggtgaagaattattagattgattaatatgtttactttgagatccctatggttgttcaagtgtagatgttaagtatatagttggaagtactcctttggaatttgggaaagaagaaagggtgagaaatatttggagtccataatatttatgtgataaaaaattaataagattttccattgagtgggtatatagaaagaaacaaaagtcaaaattagaactctgggggaacattagcatttaaggggacaggatagacaaccaagagccaaagggacacattatatgatggagaaatgacattaattttggcagtagatatcatttgcaaatatatattagttaggtgttggtggaagaaagctaggttgcaggaaatgaggaagtaaaagatcagagaagagagacagcaaattcaaatacctttcaagaagtttggtggtgaaggaaagcagagaatccaagtgatagcttaaggatcaaggctggtttgaaaaaaaagataattggtgctttatttttcctctaggttaggacaggcttgagcacacttgtagctagagaggagagttgccagaaggacctgaagactgaaagaatggagattatttccggtcccataaaagtcaagagtgtatatgggatctacagcacagctagaaaggtttgacccaacagggagtagagacatttctttctctgtgacagaagggtaaggaaggagtaaagagaaagacgttgaagaatattatcaaatactgcagagattaatcgtacatttgcagtagacctgggatcccatgtagttctttagttacataatcaaggtagattttaagtatttgagtcaaatgaaccaggtttgtatgtaatcttaaaagttttttgcaaaatcatcaggacagtttcaataaaatattaatgaaaatgttataaaagcgttgactctgatttgggtaagaaaagtaaaaaaaaaaaaaaagaaatgtttcagtttcttgtttcctttttttgtttaattccaccccctcgcccacacacacagaattacgttacaaaagaatattaataaggaattaattggtattgtcaaataggtagcctaggctgttacatagcctaatagcaatttttaggcactgcttcccaagttgatattttaaatttagatttatattggaaacataggttatacatgtttcattctcatatcaacgtagacagctttggaagttggctctagaaaggcattatgtactttacttcctaaagaatcagataactctgtgtgtattctgagaaataagagatcttcagccatagtaccatctgagtgatagcctagcctctaaatacacagtggaggctgagtttggggaggaaatattggttctgggaacaagaattcaaagtgaatttctgtggtctgatgggctaggctggacaagaatttgggagacttgtttgatttagcttctctctttcctgttgtgaggcacctgtagcactgatgttagaagcacactttttctgtgtgtgtgataggtttacagacctctgcatattaggaataggaataaggcaggcatcctaggaatcctaggcccacattttgttggggagagaggggattgacttttcagtattgtcttgactgctgtcttaactgtggtctgtttgcttacttacagaatttatagtaagaaatatgagatacttacttagatttagactttctaaatttatatatagaaatactagatacaaatattgaaacaatgtatattgtttatactaagtattaagttaattgactagtttgtttatacacactttcataccacataccaaagtaaaggctctgggatctgggattttagcaaaagtaggaggcatgatttcatgggacagtagaaattgagcctcctacaaaaatctgaagttttaagtttctcagtccctgagaagactgggaaaagtttgcccagtaatcttggaacaagaaagtttgatgtgtgtttggtgtcttggaatgggaaaaggagatgcaagaggaaaccattagaaattgaaaccaacatattcaaattaggagtgaattgaagcacaaagacttgcctttgttctatgagaactccaatttgagaaactgatctaggactattgacatttctagatacagatatgacaccagttagaacactttctcagaagagagcacacaagaatcctgtagaaagagtaatttctgctaaaataacctcccaaaacttataaacttcacatggaaacaaataacgaaaagtcattaaacaagaaaaaatttgcaatccccaaattggaaataatggaacaattagaaagctgctgtattgaaggaataggacaaatcagaaaatggagggaaataaaatactgaaaattaaaaggtcattgaaaaaaaatttttaattttatttaatggttaaatagaagcgcagctaaaagaaaattagtaaattgacagacacgtctgagaaaatcatttccagttgagccaagagtgagatagaaaatatgaaaaagaaggaaaaagtgagaaagcatttcagataggaacagactagaggagccatattgaaaaagataacaactgctaacattttggagaaatgaaaatgggcatgaatttattgattaaagaaatgtaccaagtcttggcagcctgaatgtttaaatgtgctataataaaagataaattatgataaaaagtattcatagaatagtgacagtttgcctgtcattagactttgatcagatttctcatcaccagtagtagacaccagaagacgacaacgggcattctccaaatggtagagaaagtaactttcagcctaggttttcatacacagcaaaactatcattcaaacctgaatgagaagggttttttttcagagagaatttttgaaaggactactaaagaaaaatgccttttgagaagaacgttatatttgaaggggaagaaatggaatgcattaagcagtgattaggaaagatgttggtaaatacgatggtaaatttagataagtgattatttaaaaagtaatggacgaaggttaaaacatcctgtaaaaaataatgataagtttacaggtatagagattgtagttaaaagattctaggggccttatatgggaagatagactggtattttaaaactgtaaatttaaatttacatgtagaaattagtggtaatcactgtgtgctaccttataagagaaaaatccacttccattttatatttgtgaccacatgactgaaccatgcatactaatcagtatggtttcttggattcttgccatgaagttgttaggacgaagaagaggaggccacacagtggctgcttccttgcttgtgctgggagagaagaactcagcagttgtaactcactgtaactctgcttatcctctgctttctctgttttcccgtatggaggggtagacatggaaagaaaggcagatcatgattaaaggttacagaaggagaagtagcaaggctttaatcctagagcccatcctcccagagaataaatggtaaaaatgtttgcctttgtgccttgggaagcgctaggctcctgctgctctttcattgaaaaaaaaaaaaaaaaaagaatgtatccaaagggagaagaatctcatggccttatctgtccccattttcctgccatgaagaatctggggcaggagttgaagccctttcctttagtgctagaactaaaatgatttagctaacttgagtaagaaaattggttagtggtgtgtaaagcagtctcccctccatcctttagacatctttactgatatcactgaaaagtactcaatgttttcctggtataaaatgttttggcattggctttaattaaaagcctgacctcaggatagggcatgatgattgagttctttgagatatttcttgtgtaactcataactgcatgacattgagagggtacagaaattaggattatatacaggaagagcttagaggaatgattatttccaagttttagttatttctgtttttaattagaatgaacctagattctgtgctttttttacttgctcttcagatattccctttccccttgccctacctaactcatagttgacttcagtcttcaagcttcacttcctctgtgaaccttccttgatctttgctcttcacccaccagcactgagatggcagttcttcccctctctcctgtgattgtattgtagtctattttagtgcctgtcacactataattgtctgttatttttctttctcacaagttaccagctcctagagagcaaggggatacctcacatcccttatctctagttcattgtttgttttcttggataatatgtggtacataaaaagtacttaaatgttaagcagataatgtttagattttaacttttcaaatgaaagccaggtatagtatatgaaaagtaaaagtcccttaacatttttaacttttaaattattggaaatcttttagacttgtatgcaaaacttggtgtcttagtaattcaaatgtcatctgtgaagaagcttaacaggcttgtctggcctggctgtaaacagggaagattcattttgatgaatagtagaatatcactctagtaaaatagtattgcaactatcctagcaaacacatttttttttttttttggataccaagtctcactctgttgcccaggctggagtgcagtggcacaatccccgctcaccgcaacctctgcctcccaggttcgagcaattctcctgcctcagcctcccgagcagccgggattactggcatgcgccactacgcccagctaattttgtatatttagtagagacagggtttcaccgtgttagctaggctgatttcgaattcctgacctctggtgatctgcctgcctcggcaggtttcttttagcacaaatatgggaaggtattaatttgtaaactagattgattttcctggaaaaactaatttttttattcctatactttaaaaaaataaatacaaatgagactttgtttcccttgccatttcctagaaaagaagtaacctttagcaaggagaatgaaaaatagagaataccaccttttcagagaaataataaattatcaagggagcaagtactttctggaaatcagttgctttgtttactagttctgattctgtcacttgcttactgtgtaactttggacaggtcatttaatctcttgtatgagaaagggaaaagagagggacctggtcagactcggccttccagttctagtgggctgcaatctagtgatcacatgcaaaaaaagaggagacaaccaatcgaaattgagaaaggaaagtactgctgtgggaaatacaatttaaaaaaaatattttgaaggaagtatattgatggttctcctctgtagcatgtttgtgtatatgtgtgtgcacgcgtgcacctaaagaaagtttatttcctaagccctactaaaattggatattggttgcctctttaccagaagaatcaaagttttgaggaaattgaccagaaaatagaaattataattactatctaacatctgataatactctcactacatcaggttcaagatgttgttcctataactagttatgacactgctggatcattccttctgcttggatgtaacaatggatcaatatattacataggtaagtgttcagtcacttaaaatgctcctgcttaatgtaattttttaaatgagaacaagaaaacattacctttcagttttaaatagatatgctatttattttaatgctgtttaaaatttttatgttttagatatgcagaagttccccttgcgaatgaaagataatgatcttcttgtaactgaactgtatcatgatccttcaaatgatgctattactgctctgagtgtttacctcacacccaaaacaagttagtacatggccaattatatacattcttgactttttatctttttattcattagtttattatgtgactaggtcaaattaaactggtttatttctttttgagaactgcagtgcctaaggatttcatctctactaagtctaaaatttgtattcagttttatactgaagtcaaacatgaccagtaaacaaacataatttgaggtggaaaattggaactccccttacgctgaattgcatttgttgagccatattattataatgttagctgaaatttcaaaaaaaaaaaaaattctgcacatttgtcttcctattaaaataactaatttttcacttaaaaattaggagctttttaaaaaataaaaagttcttagactactgctggaaactaagcttattttcttgggaatttaaaaatttaagctgtagaaaaaaggcattttataactttcagtgcattttagaggccattgcaataaaagtaacagactagttctgtaaagtagtaagaatttttgtattctggagtaaaagataagcacaaatgggaaatttaaaatttatctgtaatgaaaggagttctaagaaacaatttgtattcagtaatactaataggtttggatgtgctacttatataagtcatcatttcatttaagttattaaaagaaaccataatttttagtatgaaagaaatattcaagagtatacctatgaatttgactgaaaccatagtaggacttaaattgtattgctctagaaatagggtttagtaaaccacggatttctagccaagctggctctttttgataccactgtctttggatgtttttatgccacaatgacagaattgagaggttgtgacagagacagtgtggcatgcagagtttaaaatgtttactacttggccccttacggaaagtgtaccaacccctgctctagaatgagctgtggattttttttttaaatctagttaaaaggcaggcataaaactgggaaagttttacaaatcaaagcacttcttttgtagtggcagggggattttaaggcatgaaaaatggagtcatctttctggttctaggaggtgtttttcatgacatgctttttttcctttgattcaagtattttcagatgaatcagttagtaaaactagaacagccagtaaagctaagatgttctctatccatgaagcttttaagagtataggtcactgaattttttcctatctaaatttgcaatggggtctgggcactttttgaaaaaaagaaaacaaaagacacagctgaaccttagatgattagaagaaacaacatattttaagtatgatgtaagcaatgtaatgggtatgtttattccctagcacagtgttttgaaacttaaatagtatatttaatgcttgattatttgagaatgatttagtattgtagtttaagtaaagcagatggtaattctaggctagacataataaggaatattgcttttggaatactatgctgtttcagtagtgttcttggcatggcagatttatgaattctttaaactatgttgagtacctgcggtgtctcaggcactctgtgaggtgacagataaaaagatgattatgattcagtctttgtcaataaggaatagaagtagctagacatagaaataagtacagaattagtgtgttataattactgtgatagaacctaatagtgcaaggcaggaggtgaatagttacgtcttggagtgagggttaggaaaagatttatcaaggaaataatgattttaagatgaccggagaagtcttaagatttttttttttactgaactggatttggggctgatataaacagtgaatccagctctgcctattttatcatagggaagctttgcgagggtagcttttttattatcgttccataatgtatcacctgtcaactcttgactttatataggtgtcagtggtaactggatcgagatcgcctatggtacgagctctggagcagtacgagtgattgtacaacacccagagacagttgggtcaggtcctcagctttttcagactttcacagttcaccgaagtcccgtaacaaaaatcatgctatcagagaagcatcttgtatcaggtaaaatgatttcattatactggtaaggaacttggctctgtgtgttattttcattaaaagaatgaaaacgcagtgtttatgtgagaaaaatatactaaaagaagtactagaaaagtttaatgactgaagaaattatgattgtcttttaaagatttctttgagctggtcgtggtggctcatgcctataaatcctagcagtttaggaggccaaggcaggtggattggtttagcccaggagttgaagactagcctgggcaacatggtgaaaccccacctctaccaaaaaagaggaaaacaaaaaaaagatgttttttattttacctggttttaatatacttaaatttaggagatgtgatttttttttttttttttgctctcttggcatatcttattgcaaaatatttattatgaccctgctaagaggaatttttattaaatttttcaagttttacttttaatataaattgggttgattatattatggtttaatgctaaaactgtagatttaaatgtgtattttgatattttgtcatctcaaaaataataaaaattacaattgtagagattatttgaagaaaataagcttttcttgggtttgtagttcttcataatataaaatttttaattaaatattaattggatacataaaaaattaaatactaattttcaagtttaacgaatagtactttctgattacaaagtaaaattctattgaagaaattcattgtgtatggaagatgatttctaaaaggctttgtgaaaattgcattgtgagttgggtgtgtcagtaaagcttgctttctagaggagtcttacattaactccttttgtagagcagttcttgcccaacttaaaatttttacaaacatggttttcatgtgtcagatttgtttttgtgaaggctggctagaagataatgcatcttttgtgaaagatgtagtgaaagtttctcaatctaattaaacaccatgtggagctgaaattcagtccatagctgaatgattatgcttttattgaatgtgtaattgtttgtggtataagtatgccttgctaaaacagtctctgttaggttttcataaaacattactcccctgccccactgaggagtttctaactcttgctggttcctcatcttttgcccagttgctgagtgttggattgcccttgagctctttcctggactctgtattctttatctgcactttcctagttatttgaatagtaattatatgtcagtggttcccaaactttcctccacctgtgaccatccaaagagttccaaaccctgtatatccagtgtctggatctctggttgtatgtttaataggcatctcaaatttaagttggacaaaataaaacttaatgatttctccctcaaaagccatcttagtatacagtatcaccatctacttatctactcaagctgaaaatctaggaatcacccttgatttctccctttctttcacctcccacatagtacaattcatcagtaagtcctgttggttttgctgccacattatgtcacaaatccagtcacttttcattgctgtcagtctagtgtctcacgtcatcatcctttctcccctagatgactgtagtaacttctcaacttttccctctctatggtacatgttccacacagcagccagaagcatcttttagaaacacaaacgaagtttgattcctgatggcttctaattgtatttagaataaatttaaatttctaccatagcctgtatggcttttcttgttctagattctacctacctttaaaatttcttcccaatcccatgtcacttttctcattgctgataacactctaacctgttggcttttctatttcttaaaaatgccttcgaacttttgtgtttgttctttttatttgaaatggtttgcccataggtatttgtttgactgcattcttgtcattctggtgccgtttcaaagcccttctcaatgagtgccccttggccacctgctttaaattaaattagccaaacctctgtccaacaataactttctctaacggtaccttgctttgtgttcttcatagctttatcacttattcatttatttgcttgtttattatctctatctcttctagaaaattctccaatagcagaaactttgttgtgttctcagcacttagcataattctgacacgtaaaagatgctgaataaatgttatgaaataaggcaattcagttctctgagaaaatgggccgttttgaagggttattgtgatgtttagatgataatgtatagagatactctgtaataattgctattattttggtggttataatgttattgtgggatgtgataccaaggaactactttgtaaaacttgcattttaacatcagatatttcatgtaggtttgaaacttttgtaagtttgtcaagagaaatatcctttttaacaaaaaatctggagtattttgtgtatactcagttatgttattctgccacctggtggatattaacacatatgtaatgacattgttttccctatagtgcattttaatcccttaaagaaaaactttggataatgactaatattagcaaaattgacgtaattgtccaattgaatcaactaaaaatatttaaattatttttctgaatcctagtaagcttagtagtgaaatcaggaaatgatttcccgtgaaactaaatagcctagaacaaaatgtccccttttcaccagaaaactgacagtctaataattgagaattttgttatataagaatagaaagtacacagatgttacttattgctgtttgccaaaattaaatttctttctaaagttttgtttaaaatatgtgtaactgtagaatatgtaacacatttttacccagtagtaaatattatgtatgtgtgtatataagaaattttagatactttcctaatatttactgatgagttcatagttcattgctaataataacatattttctaaaatcataaatggcaaaatcagtatattttttattaaagcatgccaaaaaaagtagtttttgcattagtgatacactttatggtgtatattttcaaatagagtatctactcagacaaaaaaaagtacagctagacgaggagacatttcagtatatgctcagttaatattctattcacaaaataaataaaactaattggagtatgttttttaaatacagactttatataaaaataatgctcagctttagtacagaatcttaattttccttaatgtaactatgagttggcaataaatagctgattgctcaagatgtttgacaaatgtcatttgtgccaataatttttcggtaagttctgatctaggttaatagttgagtagcataagcagaaacagtttctatagttaggaaaaataaactaggaaactgtttactatgtagtttggccacagaacaggataatattcagcatcttttttcttacacacacattatttttaacctttactacatttataacctacaagctatttttatgaggatctgtaggtttacttaatgtaccttatattttgcagcaaggtaaaacatccagttttctcacttttgttaagtagtcacaaatcaagtatagttttaagataaatatgtcatttgccacttatactctgatctgtgtaatatagatgatagtgaaaaaagttaaaatgagtttttaaaagtaattttgtattcttttgtgttctctttctctgctagtctgtgcagataataatcatgtccggacgtggacagtaacacgattcagaggaatgatctctactcagccaggttctactcctttagcgtcattcaagatactatccctggaggagacagaaagtcatggtagctattcctctggaaatgacataggtgggttaggttattttagggcatttttaggtactatattaactgttcagaagaagcatatcaactaataaaaccacaaaaatgagttttaaatacaaattttccattttaattttgaaattctaaacagaattttagtgtgtttttctgattaaattctataaattcacaaaattattttattgcagcgtttttccttaaaatgttagagcaaatttttcctcttattaatgtttcatcatttaaagaatgtcatcttcacatgttaactacttttatttattattaaaactatgataactgtgtacatttgacatttgaaattttttttgttaatctactgaaaataaaatttgaagctagaaaaacgttggtccctataaatgagagtcattttgatgacatcgtaatattcattaggaaacaatgtagtatgtctcctttgatattctctgatttcagcaaaaggtgtataagtttagtttaggttttctctctatacaccatacatacgtgtgcacatgggcactcacacatccacacatgtgtgcatacacatatacagtcttcatagagatagatcattccacccccggccccatttgaaagaatctcactgtccttataagctacttaagagaattctactaccacagccttactatttttagaaagagaaatatgcagtgttaccagttttaacagttgttatataatcccagttctctgcatgattctaggcactggaagtttatattgttatttattcaacaaatatttatcgagtacttgtgttctagatattagaaattttaaaaagtgcggtgaacatcaacttacaatgtagtgagcagtgggaattaaaataaaacagttgcattttgcaactttgcttaaaggcataggtcaaaaagaacccggaggagatagtgccaggatctatgttagaggttgtaatatatgctctcgtttaatcttgacaatttaggaggtagataccccacttaatgttgacagaagctgacattcagacagagaacacacagaggttttaatgtttgaactgatacatgaaggatagacatttgttgggtgtggaaggttctaaggttggaacattcctggcagagaaaacagcaagttaaaagggtagaggccaagggaacttgacaagtttagaaaatgtcaagaaggtcattaattgttggattataggatatgtgggtaagaatagtaagacatactgagtgaataggccagtgccggatcgtggaaggcatctatacatcaaactaagaaatttagattttatcttgtaagtaatggagaccttttgaagaattttgagaatgatactagatttgtgatatatataattcatctttcaagagcatgcaagaagacttgacagtgaagacatgagagagtgaagcaaggaaaccagaaaggaggaatttattaaccaaagtgcatggtggtcattgactagatgtggcaggcatgagagaggaaggagtctaaagtgaccctaaggattcttgagaaatggagtagctgagtattatttactaaataaagaaatataggaagaagaacttattttgaaaacaaagatgaattcagacttgtatattttgagtgatgatgcatatggatactattctgtggtatgaagatatacctggttctgtggtatgaagatatacctggtttctggagaaagaacttaactagaagttatgtttatgagtattcagcatataagaagcacctgaaagccccaggagtagatgtattgttcagggagagcatgtgtattgtgaataaaaagatatttataaacagccctgtaaattaattataaaacccagtaagataaaggggacagggaggcttttcattcctctttatagtggtatttaaaatatatatatcttcatagacaaatggacatacagattagtggaacagagtagagtccagattcagtagagtggtaaaggtgaaatctacattgtaatgggtaatggggtaatagatattggaggtgaccatgaaataaagaagtaatggagctagttggaaggcagggaagttcaaaggtcatatttttacacatgatcttagccaaaaggccaagaagcgatcaaaggtcatttttttttattcctccaactttctccctcattaaagttaagaaagacctaggaatattttgtattccaaggaaaggagccagtttgggaagggaaactataaatgggaggtgggggaagcgagggcaaagaaggtatgaagaataggttatgggtcagtctcatgtcaacatgaagttcaaagggagagaagatacagttctatagtcttctcattcctagttattttattctgagttattcattgtcaatattttgactttgtttatgagttattgaatgaggattgtcatttcattttaataaaattagagatcagaaggttccagtaattgagcaactgcataatatactgaagagccagacaggtttgtttgaattccacttccatcatataggacctatgagaactttggttaactaatctcttggtgccttatttttttcatctgtaaaatggagatggtaaataatagtacctcccttatgtggttattatggtgattaaaatgagtatatatttggaaagcatttacggtggcacatagtaagtacagtgtaagtattagctaataataaagatgacattggttcatttaataagtacatgtatgattcatgtaacataacgggatatattgtctttaaaatttttattgtaaatctttttacaatactttttatgaattgtaagttgatattattttagctactaagtgtaatgggaaaagagaattattaaaattttatgtttaagttttaaacaaaaactttttttctttacattgttgttcaggatctttctaaaatataatgggctatttatctgtcttgccaaatacaataaagtgaaaataattgaatctttccttttagattgaaaagcttcagggtgcaactcagtagtacattttatactgtactttaatcttcatactgtgtttttctcttggtttaccaattaccttatataaaattgtgtgtgtgtttttttaatttgcatctttaaaaagaagaaatgtggttaacagaagcttcaactaattacattccatctgatgaagtttcactttatattttaagattttgtgtgttgtcttctaaaaagtaaaatcactacatgaaatgacttaatgtatacgtctcttttaagttataagaatctaagcacatccccaaagatagtaaatatcttaacaggtctcctgctagtactgttaatgtggcaccttaggaaattttttcttttagcttttacagccttagttatatataaaatataatttagaaataattgtgtatttctttaaaaatgttctaatgcaaattgaagtacttgtatacatttattgcatgtctgatgttgagctgaaatgtgataccatattggtacgtataagaaattcttttcttatattaatattaatgttccttttgtaaaatgagaaaaaataaaattttaattaattttttgacatttttgttttctgatcaaggaccttttggagagcgagacgatcaacaggtgtttatccagaaagttgttcccatcaccaacaaactatttgtaagactctcatcgactggaaaaaggtaacactttattgtaaaaatatttgtattcagaagccaccttttgtcttacaaaacatatggcataatttgacatattgaccaaagagtgctactagaaacaaattgttgggacagaagtctgttatctcataatcataactcaaaattaagacagtagactttatgcttactttctgggatttaagagtttcactgatgctgtggacagttaggagggactagtgatagaataagaacacagtgaactttttttcatggccaaacataaatacttattaattttgttattataaacagtttctatctttaaaaaacctggaacttaaatattttccatcccatataaatctgtatacattattgatgtttctcaaataaaacattacagatttcctgattcagtatccccttttaaaataaaaatgatattaataacactaatttgcataatcttggcacagcttacaacatagcacacattttttttttctattttagacctatttccatctactttaacatggagagaaattgtctgtctccgtgagagtaggattcctgtctttatgcagtctcctcagtatttgtttgtgaatgctgcacttatgcttccattatatggcactggcagtattcctctgcttttgtcttcagaaatgatttctattcaaacttaaagaacatagtgaatttgctggcagacggctgaactaattctggcacttcctgttactagctatgtaaatacaactcaagttattttatttcccttatcccagtttctttataaaataaggttcaacgactttggcaggatttcataggataaaataaatttcaaaaatgaaatatctctcatagtacctaaccataatagatgtacagtagaagttaatttcctcttccttttctattgactgaaattttacttcttttaaaattattatttataacctcagattttgcttcaacattcctctgcattaaacaaatttttttgacgatgagaacacatggacacatggaagggaacaacacacaacaaggagcctgttgggggtgagcggggccggggagagagagagcatcaggaagaatagctaatggatgctgggtttaatacctaggtgatgggttgatctatgcagcaaaccactatggcacatgtgtaacagacctgcacatcccgcacatgtaccccagaacttaaaagttacagggaaaaagttttttgcatgtcaaacaaatgaaaaaagtaactttcctgttaatagtccattaggaaggttattgttttcattttatttatttatgaatgagacggagtcttgctcttttgccaggctagagtgctgtggtgtgatctcagctcactgcaacctccagacatgtgtctgttcgtgtcgtttgcccactttctaatggagtcatgttttacttgttgatttgagttccttatagatgctggatattagacctttgtcagatgcttagtttgcagatattttctcctatcctgtaggttgtctgtttactctgttgatagtttcttttgtggtgcaagtgctctttactttaataaggtcccacttgtcaatttttgtttttgttgcagttgcttttggagtctttgtcatgagatctttgccagggctgatgtccaggttgatatttcctaggtttccttctagggtttttacagttttaggttttacatttaagtctttactgcatcttctgttgatttttgtatgtagtaagaggaaggggttgagtttgaatcttctgcaaatggctagccagtaatcccagcaccatttattgaatagggagtcttttccccattgtttattatcagctttgttgaagatcaggtggttttaagtatatggctttgttttctgggttctgcatcctgttgctttggtctatgtgtttgtttttgtaccggtaccatgctgttttggttattgtagccttgtagaatagtttaaagttgggtagtgtgacgtctctggctttgttcatttgcttaggattgctttgtctattttatttgggctcttttttggtttcataggaactttagaatagttttttttttttttttttttttttttttttaagagacagagtctcactctgtcacccaggctggagtgcagtggtgtaatatcagcttactgcaagctctgcctcccgggttcacactattctcctgcgtcagttcctgagtagctgggattacaaatgcatgccaccacgcctggctaattttttgcatctttagtagagacggggtttcactgtgttagccaggatggtctcgatctcctgacctcatgatccgctcacctccgcctcccaaagtgctgggattacaggcgtgagccactgcatccggcctagaaatagttttttctaattctgtgaaaaatgtcattggtagtttgataagaatagcattgatgtaattactttgtgtagcatggccattttaacaatattaattctttctatccatggtcatggaatgttgttccacttgtttgtgttgtctgctttcttcgagcagtgtttttgtaattcttgtcttaaagatctttcacctctgtggtttgctgtatttctaggtattttattctttttgtggcttttgtgaatgggattgcattcttgatttggctctcagttttaatgttaattggtgtatagaaatgctactgatttttgtacattgattttgttttttaaaactttgctgaagttgtttattagatgtaggagcctttggcagagactgtggggttttctaggtatagaatcattttattttcattttaatgttactaatcctgttcattttaaaattttatggctgcattttcaacatatctgttaatattttgatgaataaattctttgagatgaattttttacatcaaagttcattatcaaattgcataaatgactgtgatgtagtgttctctgcatagtgaagaaactgccaaatgttattaaaactggtatcataacattctctaacaatgtagtatatcatatttacttattcaattctaatatcccctcttctgttatttctgatatccccctttctgttatttctaacagtaacactgtgcaatttctgcataataaaacaaattttataatttttaagtttatgattccaaaggaaaagctatagttacaaaaataacatgcagaaattactctgtagaattgaatagaaaattagccctttataaagctatagtgaaccaaagattttgtttaaggacagttcaggctcttaatagtgagaagtgaaatgaaagggttttatttaaaggaagcaagaaaaaaccttgtagaaaattttaaataaaggagtagttttaagaaatctatcccggccgggcgtggtggctcacggctgtagtcccagcactttgggaggccgaggcgggcagatcacaaggtcaggagattgagaccatcctggctaacacggtgaaaccctgtctctactaaaaataccaaaaattagccaggcgtggtggcgggtgcctgtagtcccagctacttgggaggctgaggcaggagaatggcatgaacccgggagatggagcttgcagtgagctgagatcgcgccactgcactccagcctgggcgacagagcaggcctccgtctcaagaaaaaaaaaaaaaagaaatctgcatagggggaaaaaagttcaaaattatgtttgttttgtggaagcagaagggtcacagcagatacccctttaacaaaagataggctagcaagagaaaacattacaaattgattttattatacttttatatgacacgagagccttcagaatgaagacccaaagacacaaggaaaagtgtccatttttatgcttaggttagaagaagcagggacagccatgtagaactgtgactggacaaaaagttgtaagttaacagaaatagactgagtagggaactccagtggagactgtctctgtgtggcattcctttctcccagggatggggcagaacccctctgtagtgagggccttaatttctttatggctagctgttcacagaaagatagggacatgttagggtaatatttttatgcttcatggctagctttggggaaagagcgttctggtttctgtgagccaccttggggaaaaagaagattgtctctatggcttgccttgcaggtcagagagaaactttgcttctgagggtattttctgagacccaagttttcatatgcatacaaatgttgatttgttttatttgaaacataaacaggactctgaggagggagttgttgaacattttaaatcaatttacagatattatttaaaaataaatgtaattcactaaattatgatcatcttgataaatacaggaataaaatctgataatttgtcacctatttatgatttaaaaaaaccctagcaactaaaaaaagggaaattttaaaatctgataatgcccatgaaaataattctttcaaactttatattggcgaaatattaaaaacttccaggccgggtgcggtggctcacacctgtaatcccagcactttgggaggctgaggtgggcggatcacctgaggtcgggagttcaagatcagcctgaccaacatggagaaaccccatctctactaaaaatacaaaattagccaggcctggtggcacacgcctgtaatcccagctactcaggaggctgaggcaggagaatcgcttgaacccaggaggcagaggttgcagtgagccgagatcacgccattgcactccagcctgggcaacaagagcaaaactccgtctaatgaaaaaaaataataatttcctttgtgtgatattgtgaaatacatatttggtctttgtctctgtttcctggtatattccttcaaaaattcttaaagtcttccaaatgataagtgtctttttgtatgccaatgagttgactgatggcaggtcaccagaaagaccaagatgggagtagaaggttggcactttcagccccacccagcaacctttgagaaggggagaggagccgaaggctaagttgatcaatggccaatgatttaatcaatcatgcctatataatggagccattataaaataataataataaactgagttcagagcgcttccagatagctgaaaacctggaggttctgaagggtggcgtgcccagggagggcatggaagctctatgctccttcccacacaccttaccctgggaatctattgttcatctgtattctttgtaattaactcgtaaatgcgagctttcctttgaattctgtgagccactctagcaaattagttgaacctaaggaggaggctgtgggaaccctgatttacagtcagtcagttagaagcacaggcaaaataacctgaggcttgtgatcagcctctgaagtggggctcagctttgtgagaccgagtcttctacccgtgtgatatgacagatagtgtcagaattaaattgagttagaggacacttagctggtgtctgctgcagaatcgactgcttgcttggtgtttggtgaacccctccaccccatttggtcacagaacccttttttttgccaaggagtgaaggacattctgccccaaaataggccaaattggtatattgattattttgaggtgaaaacattagagaaattgtcatttcagaaggggatagctgacctctctcttcctacatgcagcaagccaaaagattttctcggagttttatcctccctgtaccaggacaggagagtgggaactgggggctgcagtggacctgagtgaatatgcttaccttccactagttttacattgtcccactatatatatatataatgtatatatataatacatatttaatatatattaaatatatattacatatatttagtatatacgtaatatatattaaatatatataatatatatgtatatcttctagtgactcccttagaaatttactgcctctagtcagattttctttatcctgtcatttgttctacagtttatcattctttgtctgaattgtataaaagcatcttgctgtggccacttctttggacctcactctcttgtgaagattcccatgtacatgtaaaactaataaaatgtatatgcttctctcttgtcagtctgtgtggtgtcagtttggtttctagatccagccaagagcccacataactaaaagggcatttggaggtaaactttcactttccttagagttgattgttgcatgagagtacaggaaaaatactttggtttgtttattcctgtattcacaaaccttgagctcaagaatgagactaggatagtctttatcactacatgtgggcatgtaggaattatctttttccctcctttttgtccggcctactaggaagctcatctaagcttcatattctattcctgtatgcttctcaaattcatgtggattgtatttttttttgtctatttttttgaccttgcgtttgcctatactgatttttcttttttaataaactccctcaactcttttgaagtaggctgggataactaattcagtcaagtacaattcagttagcccttacgtgactttggaacaatcatttgctgatgttatcccattgtttcctgatccgtcaatgtggataaaaattgttctctctcaggttcttttatcttttatgaaaatcaactaaaaagtcataaaaatctttttttgaagttgagtattatcctaatgatggatacaatatgggccatctccatagagctgtatattttttctggtttcagattttaaagatttacacataaattttaaatgattttttaaaagtcttttctagtataacatgtttgctttctttctttctgtctttttagtttcatagcttctttttaaataattgctcattcccatcagggctctttctgcttttcttttgcagaatatgtgagatccaggctgttgactgtactacaatatcctcatttacagtgagggaatgtgagggatccagtaggatgggctcaagaccaaggcgctacttgttcacaggccatacaaatggcagtattcaaatgtgggatctgaccactgctatggatatggttaacaaaagtgaagataagggtaggttctcatacagaaagatgtttgtcacaaggttaagcttttcacttaagtgattttaatgactatttgttctcctaagatgtaggtggtccaaccgaagaagagctactcaaattactcgatcaatgtgatttgagcacatctcgctgtgctactcctaacatcagtccagcaacttccgtagttcagcatagccacttacgagaatcaaattctaggtaggttaaagagttgggtattataaacaaaatttatttcttttggggaaattgactgaaatattgtaatcacatagttgttctagaaagccatacttctcaaggtacattttaaattcagacattatgttaactttttaacagttttaccaaatttcttgataggcatatctggttcttttcatagaaaaacatttttaccttttaacttattttgtgaattgctgcccaattggaagcctattatgtgatcaagaatttattcaaaggaaattaggaaaattacatgtcaccttggttagtatgtgaagctttaattattgtcctgtctcagggacaatatttatctgtggttctattatgttgtctagtcttacatttaagcattatgtaattttaatacaaagttccataatgtctttttagttatcatattgataaattccaaagtctgaagaaccaagggctaaatactgaattatgatggtttcacattggtttcaaggatttttcctcccatcttttttttagctgttcaaaaattcagcatgtctgtgaatatatgatggtattatttgcattggtaattttatataccatctatataataaagagtacttgataagtatatttttacaaagagaaatatggatataatacactttatgtatttatatagtgtgttttattggttgtataattaatatgttcctgagaaatcacagagtgaaatctgaactgtcatttttaaaaactgtatttcagccttcagcttcagcaccatgataccacccatgaagcagctacttacggttccatgaggccttacagagaaagtcctttattagcaagggcaagaaggactgagagctttcacagttatagggacttccagactattaatttgaacagaaatgtagaaagagctgtccctgaaaatggtaacttgggtccaatacaagctgaagtgaaaggggcaacaggggaatgtaatatatctgagagaaagtctcctggagtagaaataaaaagtttgagagaattggatagtggattggaagtgcataaaatagctgaaggtttttcagaatccaagaaaaggtcatcagaagatgaaaatgaaaataaaatagagtttaggaagaaaggaggatttgaagggggaggattccttggaagaaagaaagttccctatctggcgtcatcaccaagtacttccgatggaggaactgactcacctggtactgcgtccccatctcctacaaagactactccatctcctcggcataaaaaaagtgattcttcaggtcaggagtacagcttgtgaaaactcaccaaaatgaatagttgtttcgttacatttagatgaaagttaaactttactgaatttcagtacattagtttttacactaaaactttacaagataaaattggacttcatttagtatctttttaacagaattacttggaataatgagatacaataatcatatctcttttgacattttggaaatttttttaattttacaagtacatttaacagatcatttataaagcaggagtccattttaacacttaccgactttttttggtttggaaacatattaccacgtcttaataggatggtgcccatataggtgagcatccctttagatcatgggaaccagcagactgcattcctaatcttcattatgcctgagacttgtcttacaatgttacctttaagtgaatcacataattgtctttggaacttggtctcccaacacttattgtgattgcaaagtgtttaccagatatttgatgaggtgctatgtttgtgaaaaacatatcatgtaattcaaaaacactattgatattgaataccagataccactatgtagtaagtcttttaggatgattttaatttagtcgtgcgtcattttctgattctcatcattgggagatcttaaatcttagcaagcattagcaatattaaatgccaaaattccattgaaactttcaagttggagcaattgtctgtgtttgaaaagatgaaataaaaataataatcaagggcaaagctttgagtgcccagaagggaaagctgtaccagttgctaacctgtcttgtttcaggagccaccatgtttttttttcagtgttaacaacaatcatgataattaaattaaaacactagtttgttcacttgtaggactgcagttctgaattttgggttaaaggttttggctgctgtaagaatgtgaatttgaatgtattttgaattgtaagagcaaaagaacgtttttgtacaattttttttcatttaattggaatgatcttcaggtttctacaaatagggtaattgtaaatttaaagcattagcatttattggtgaataatgtatatatccccattccaagaaatataagtgagtgaagttgaaataaaatctttaaaatttactatattgccagtggtttcacaacagttctcttgtatttatttatcaattaaatcaaataaaaatgattatgtcaa

SEQ ID NO: 1207 - DNA, 49493 bp, Homo sapiens
ttagtgaagattgtgaagtgggtaagtatgctatacctaaagtagaagggagagggaaactttctaatgtctaccttgctccggtctcataatgtattgactacttcttgacagcaggttacagagttctaaaaggcactgaagccgtcatcattccctatgcattgcacagagatccgagatacttccccaaccccgaggagttccagcctgagcggttcttccccgagaatgcacaagggcgccatccatatgcctacgtgcccttctctgctggccccaggaactgtataggtttgtatccatctgaattggtttgacctttcaggcccacttgatggtgggtttctcacagtgatttctttgagatgtgatgtgacattgcccatatgcaacagccttaaaaaaaaaataggtggtttcttttttccctcactgtgctttgtagttttaaaatattacggtcaaaaggtatattagtatattcgcctgcatgggcttccatagcaaaataccacagactgggtggcttaaacagcagaaatttattttctcacagttctggaggctggaagttcaagaacaaggtgttggcagggctggtttctcctgaggcctctctccgtggcttgtagatgccattttctccttatgtcttcacttggtctttcctctgtgtgggtctgtgtcctgatcttctctccagtcagactacactagggcctaccccaatgacctcacttatacttactgacctctttcgattacctgtctccaaatacagtcatattctaaggtatggggggggcttagaatttggagagagacacaattacccataacataaaacataattagcttcatggtagagtttcaaaatgttgtagagttttaattacagtagaatataacttattgtggtaaaaactttattaatgattacttatggttaacctaatttttgtgtttattgcttttaagaatttcattttgcaaatcaaaacagcaaatgcttgccatatggccagctagtacttaagcaaaatgaatgcacatcaccaccctgcattataaacccttttggttttagtatctctagcattttgtcatttatgtaaatgcagacatcggtaaaatgaggccagagtgaaacgggtgaatctgaagcttttttggtgaatccatagtaaatgaaagacccactaagacataatctagggtagtgagtctcaagcttgaaggagctcaggatttatctggatcagctggagtacaaattctctgatcctccccagctatagatgtgcaaggtgggatcagggagggaaactcaagactcttcatctttaacaggtgttccaagccattctggttctccttccacctactgcgaaaatgtaaagtggctcgcttcctatgacaggacctcttgtttctcacatttggggtaaatctataactaaagcgatggtatctacattaatttgaaggtcaaaagtttgctgtgatggaagaaaagaccattctttcgtgcatcctgaggcacttttggatagaatccaaccagaaaagagaagagcttggtctagaaggacagttgattcttcgtccaagtaatggcatctggatcaagttgaagaggagaaatgcagatgaacgctaactatattattgggttgtgcctttatcatgagaaaggtctttattttaagagatccttgtcatttacaatttacagatcatgagttcaatatgcttgaatcccctagacctaatttttccttgatcccactgatcttgacatcaagtctaacaaagaaaaagttttgagttttgtattttcttttttcttttttctttattttttttttttgaaaccgtgtctcactctgtcgcccaggctggaggagtgcagtggtgtgatctcagctcactgcaacctccacctcccaggttcaagcaattcttctgcctcagcctcccaagtagctgggattacaggtgcctgccaccatgcctggctaatttttttgtatttttagtagaaacagggtgtcaccatgttggccagactggtctcaaactcctgacctcaagtgatccacctgcctcagcctcccaaagtgctgggattatagtcgtgagccaccacgcctggccagagttttttatttttatcaccaccatagatgttacagttggctgtggtcacaaaagtagttaattgtgtcagcacccaaataaacatctaacaggtttctcaacagaggaatccacagtccaattccacttcaattgatagacccaaaaaatataatttaatcaaagttctagagtttttgtttgtttgtttgagatggagtcttgctctgtcgcccaggctggaacgcagtggtgacatctcggctcactgcaacctccacctcccaggttcaagtgattctcctgcctcagcctcctgagtagctgggactacaggcgcctgccaccacgcccagctaatttttgtatttttagtagagatggggtttcaccatgttggccaggatggtcttgatctcttgacctcgtgatctgcctgcctcggcctcccaaagtgctggcattacaggcatgagccaccatgcctggcccaaagttctagaattttttaaaggtattcatggtgactcaggaatacacacatacacacacacacacacacacacacacacacacatacacacatataatttgaaagaggtgagtatgtactctgacttcagctctcaggttttaaaaattatattagtgggaccagttatgacaagaataatcattatagtacttttcagattttataacctggagcagattattttaagttgattagtaggttctgttacagtttttcttttgatcgtgcacttatagtcttcatttaattcctcatagaatcccagtcacctttatatatcatattattggaagagattcatcttcataatctccagttttttcacagtgcctcacagagttaatcatgccttttggagctagaaggactttagaacttatctagttatgctcctttatattataagtaagggaatagaatcaataagacagtttctgcccaaagtcatgttaccagttggtgacagagctggaaatacgtagagatctatacccttaaatctctccactcacatgctgatatactttctactacaatatgctatagctttatggaactcagggtgatgatcagacgtgtcattagaacatgagtcctctgcttctgattcaggcatacttttgggattcttccatctttaaaggaaaaaggaagccattcatctatatttagtaacccagtaatatctcacttagtttagggttagatctttagttaattcaaccttatagatcatacttatgaaggtgataactgacacgtgttcactgaattttaatttgataggcaatacatctacccactccattattttttaaaacttcatttaatagtttaaacaagattggttttgttttcaatttttattcactcttcatagaatcacaattacctttatatatcatatgttattggaagagattcctcagtaatctccaatctctcatagtgcctcacagggttggtcaatggcttttggaactggaaggaccttagaacttatctgttatgctcctgatagccaatagcagatagaagcttgcaatcaagagggtaggacatgtgttcttcaatggatatcaaaggaagaggttgcaaaccaaagccatttggcaagccctgtagcctgggccatttaagacaggggcggtctcagccaaattgcacccatttaactatcccaaagagccacagtgcctacaacccaggccctaagttgatgaagaaaaagtcaaggaaggaggtgatacaattggaaatattcccatcaaatggttaatcttatttagaaaatgggcatattagaaaaagtccttccaagatgattttggataataaaagttgtatttgtggaaattggtattatctctgttttatgcacttacatttatcccttacattttgtttttagtgaccctacatgacattaaatttaaagtaaaacattgtttaatgttaccttttggcttgagaatgtctttcagctccagaattattgttactcatattttaatcagtaagtcatttaagctatgacagagtaggaattgagaaattatttcatatgctacagtattgaaatgtggatgctgccttgttttataagaagatgatcaaggtttgtgtgcccattacctttcctctgcctgaaagacgtgtctcaagaaaaataaattctattttagatgcaggtactgcattttattctaagaattgatatcaattcaaaacatagaaaactgtaaaagataaatcaggagatggctgattcataatgggtaataaaataaatagcactttcgagctgatgtcgtcagtgactcttggattttctaacaaaaggttcctttactgttgtcatagagagattgtgaatttctctgactctgaagaatcaactagaagaagtagaatcaccagaacattttgctcagctgaaagcacaaagtaaactcagttactgggaatcagcaaaaaccacaggcatcactggtcccagggatttagagtccagaaacctctccaggtgatggactgttgatttggggctctatgcattgtcacagacagctggggatatcagtttctggaccaaatgacccaataagagatgctggtcgtaaaaatccatttttatctggaatgtttctagaagatcaaaacctttttccttccagcatctaatgcctgagtgatacatttaaaaatttttagtctgcgtgggcaccctctttttctaggagcagcactttttatttttgaaattatcctacaatgaattaccggcttttcttctgttctcatctttttccttccccagcatacacacactgtaaatatgtgccatattcttaggcaatcccactttctcaacctttgttgagtgacccaagcaaggttaaattcgagttctccccaacgagttttcccagctgcaattgaagaagagatacagtccatctctgtggtggaaactccaggttgtgaaactcaagatcaatcagcaatagaacctctggagcagctgctgggtgatgagaagaagcaggcagaagaaatggacagaatcctggaggaacctgagtcccacatggcaggtgatgctgaggctcactgcatgtctgccctgctcactcttcagtgggtccaccctacttgggaacccaagagccagtatattgccgtttgcttaaaaggactgtctttcatttatgaccaaaagcgagttagtgtgtgtcaggtcagccgaaggatgaaggaagggcccccattctctggatatgatcttaggtcttcaccctattttctttgtgctgttcaataattctctgtattggatcatcagcatatatgcccaccagtcctttaaatgcaataccatttaagaaaatgcagagttttctcttttctagatagtaggaaagttaaagttacactgcattgttttagaagacagctaggcttaacctaacacatcagtctagttttttggttctgccatgatgactttctggactaattagtcatttttctcctctaattaaaccaggttcattttcctgctggctagctgtatgccacatttcagggataaatctctcatctctaattactaaaatggactcgttgcatccttgcctcagtttcttgtccagaagttcaccaaatggttatttccttgggctgaattcagttttggaattaactccagcatttagctgttgatcttgttctctttatcctagtagataagtttttggcacgttctttctccttcccatcattatctctcctctttacccgtcactttctttctgttgtggtttgcatttattgatctctgcctttcctgatactactcaatttatgtttcacagaaataacggctgtacttaaatgaaactcagattcctatataaaaatgttgggataactttgttccttcagtaagggtcatacagacattatagatcttatcgggaagaaaaattatcacaatatttagacatgactgtcttattttaaaaatgttttcagtttactttcagattccatatatagttttaaaatacatgttttagctgaatagtaaaaaaaaaaaaaaatatgtaggcacaggagtatctattgggcactcctgggaaggagagtagcctttctttctctttctttctctttctttctctttctttccttctttctttccttccttccttccttccttctttccttgctttcttctttctttccttgctttctctcttgctttctctctctctctccttgcttgcttgctttcctttttttttttctatattctacctctaggctttgcgtccttgcttgcgcaagtcaagcccaagttttaagttttatgcttatggaaatacagtaaattaagacatttatttatttatttatttatttatctatctatctattttttgagacagggtcacctaggccggagtgcagtggcgcaattgtggctcactgcaaccttcacctactgcgctcaagggatcatcccacctcagtctgctgagtagctaggactacaggtgcatgccaccgtgcctggctaatttttgtaatttttcttgtacagttggggtttggccatgtttcccaggctaaattaagacatttaaatcactcaggcacaactaattttttcatattgccacatcttcctaggagtgggattgtgcttcagttttttcagctgtctatgccttaattttgactcccatcaataatgcttgatgttgtagccagtgttggtttattattaccaaaagcaatgctgttctggaaaggcaaggactgcagtgtctcatatgatgcaattggacggaacctcaagacgacatttgctcccagcaaagggcattcagcagaacaaggaccaatcagaattcatccaacaatcattttcagtgtcatctaagactggcaggtaatagcttacatgtgcgattgtgactttcatgtgaggatgagatggtccacaactgcggggaaagcaaccttcctgtcctcaatctcttgtttttaaaagatatttcattccttattcatgtgcttatttatttatcgttttactctttcattcataaaagtctgccaagttctattgagggagctggggaaagacagcaagcaagccccagtcctaccagcaaggtgttacagacagtgggcgtctgaaaaacaacagagaaatggacaaggaggtaacagaatggcagggagtgagaagcgttacgcagaaagacaaagaatggtgaagagacaggaggtggaagagatggaaggtgccttttcagatgagatgcttgctggaggatggtatcctgaggagatgatgtttgagcagtggtctgattgaagtgagtcacgtggggatctgggacaaggggaggtggagagggctccatcctggcacgtgtctaaggggaggttctggagaaaaatcctctttcaagcacgtgcagtttgttggaatattcagtgctttgggatggtaggggtgaaatccccatgttctttttggctcttgtccagagatgactctcaggtccttccccgtgacccatctcaaagccagcgctggagcacttccctgctgtcaatccctcttaacgctctgaatctctctgacatctccttatgctgaccgcagaggaaaactctgcttttaatgggctcatgtaataagatttggcccactctgattgactccattttgattggcacaaagccaagtgtttagtaatcttaaccccatctgcagaattgcttttctcatgtaacataatcatgggcagatgtgatatctcgttttattcactgtccccaggatttgagtgggagatttgggagaatgttttagaattctacttaccacgcctcttttcaatttagttctgatttggttcacctgaatctacagaggtttttttagttttattgtgctactagaatgtaacatgtttcactgtaagaaaactccaactaaacctagaagcatatttaaataggttaaaagtctgtaatctcaccttttagaaaaacaaaccctgagggtttctgctgtgatgtgaaggcagggtgcttttgtcccagttgttttgttgttgttgttgttgttcttgttttctgctgagcctggtagctgatgaaatctaaaatataaactcttttctactgcacaaagtggagagatttgttgactactgctgcaccacttgatatcctaaaagacagcacaacatgcatatttaaaatatgctacttccttctcaccagaaaatattttattggcaacattatcctacatttctaataaatgtagttctgcattccagtaatatacataaaatatttatttaagaatcgactccaaaaactctaatgtactaatcaagatgatatactgtaatttcaaagaatagaaaacaaaggagatttagtgggcaggtcattgtggtctttaaatattttaaaagcagaaaaaggagaatcagttgttttgtgtgggtctagtacgtaaatctaggactgaaggatagaagtttgcaaggaggtgtatttcagtatacaggaagtttttttcttttcttaaaaataaaattaaaatagagctccctgagctctgaaataaaataaaattaaaatagagctccctgagttggagcaggctgcttaggaaaccagtttctcctcagtcgaagtattttgacaggaaggtctaaagtctatgtcagaagtgttatccagcagatttcagccaaccttatctgtagagtcagatagtaaatcttcttggcttttgaggccatgctgcctctgtagcaacttcttaactctgccattgtaaggtgaaagcaggcatagacagcaagtgaatgaatggccatggctgtgtttcaataaaactttatttacaaaaacaggtgcaaagccaaatgtggtctgtgaactgtggtttgtcaagcctgatatattgcatttcctgaattgggtgggaataggacctaaacatcaagccagtcccttccaaatctaagatttcagtgttatatgattctttggtagggtgtaggaaggcatagatatcatttgctaaaatatccctctaggaggagctatccatacccatccattattcactgtgcctgcaagcaactctaataaaaaaaagttctgttagatgaggtttcaactacatgccactaaatactgggaatgttataagcattttttaaaatggaaacctgtgcataaactgtgtgaccctaaaatgaaattagggtccttttgagtgcagcatttttctacctttttttatgtatcatttacaaataaaaattatatatatctactgtgtacaagatagtgttttgatatacatgtacattgtgaaatgattaccatagtcaagctaattaacatgtccattattttacatagtgtgtgtgtgtgtgtgtgtgtgcgcatgtgtgtgtgctgagaacccatcagatctattctctagtgaagttcatgtatacgatacagtattatgaactatagtcaccatgtttgcattagtcagggttctctagaaggacagaactaataggatagatgtacatataaaggggagtttattaaagagtattgactcacacgatcacaaggtgaagtcccacaatagtctgcctgcaggctgaggagcaaggaagccagtctaagtcccaaaacctcaaaagcaagaaagtcaacagtgcagccttcagtctgtggtcaaaggtccaagagcccttggcaaaccactggtgtaactccaagagtccaaaagctgaagaacttggagtacaatgttcaagggcaggaaacatccagcacaggagaaagatgagggccagaagacttagccagtctagtccttccacgttcctctgcctgcttttatcctagcccggctggcagctgagatggtgcccacccagattgagggtgggtctgcctctcccagtcaactgactcaaatattaatctcctttggcaacaccctcacagacacatccaggaacaatacttggcatccttcaatccagtcaagccgacactcaatattaaccatcacaagtccaccccttgtctacttgaacccatacgcatctcctgaaatcatatataatcttcaaataaagataataataaggtcataattatgttaggtaatacataatacagctatccttcgtacaaccagaagtgtaccaatccccaacccaaatgctgttacataaagttaacaacatttaaatgctgatttgaagtaaataaatcttatgtcacatgataaaggaaaaagaaaggaaataaaatgaagatattttcttagtacaagtgtatacatacacaaacatgttcctaacaaaataaggaggaaatatgacaattacagtcctcatttctgcagctggtcacgtgggcatagccggtattgatgactaccttcttctactacccattctgtattccttttgccttcagcaagcatctcagcaggttgtggttttttacctggtggagtgacccaaacattcattcctaaggggtctgggccttatgtagcactgcctggattgggctgttgtagtttcccattgaccttaatcacagggcatggtaatactaagagttgcctgaagggatctcctgtattccttgcatactcttccttacctccactgtggagtaatagactaacttcatcttgatagtccaggtcaatcaccacagccaacactgcaactcccttctgagcctgttgacttagaggtaaaaggatctcaaagtgtccaggtggcaagcttaacttccagtttaatggaatccttgttgtgtcttctggtggcagcatttttccctctgaaactaacacaactaagcaagcagaaggtaatgtattgggaacaggaagcaaaaattttgctagtggatagctaggggtgatggtgagtggtgccacttccacttctgccccttgattcctagacctgtgaatcctggctatgggagaaacggtgccatatattggatgttgattcagagcatacatagccttctggagaattttgccccagccctgcaaagtattgtcccctagttggcattgtaattgtgacttcaaaaggccattccaccgttctatcaatacagctgcttcaggatgacgggaaacaatgttgtacattagatcctccaacttattcacactgcataattggaactttggaccttttgaccaaaaccaccccatagctggcactccccatactctggctaccaccattctactctctgttagcatgactttgacttttttagattctgcatgtagttgtaagtgcctctcttcagatgatcatatgatttttatccttcattttgtgaatgtggtatatagcatttattgagttgcatatgttgaaccatccttgcatcctaggctcagttgatcatgatccttttaatgtgttgttgaatttagtctggctaatattttcttcaggatttctggatctatgttcatcaggaatattgatctataattttaattttattttattgtgatgtccttgtttggctctgctatcaaagtaatgctggcctcattaaatgagattggaagtgtttcctccttttcaattatttgaaagagtttgagaaggattggtgttaattctttaaatgtttatagacttcaccaatgaagacatcaggtgctgagcttttcttagttgagagtttttatttctgattcaacctccttactcattattggtttgttcagattttctatttcttcctgattcagtcttggtaggttgtatgttcctaggaatttatctatttcttctacattatttaattagttgatgtactgtttttcatagtagtctcatgattttctgtatttctgtggtatccattgtaatctttcctccttcatttataattttatttgagttttttttctttttctcctaattaggctaaagatttcttgatttatctttttaaaaacaataacagtgtcattgaccttttctgttgtttttctagtctctatttcatttatctctgctctgatctttattattttctttcttcctctgtctttgggcttagttttttttttttactttcttattgcttcaggtgtaaagttaggatatttcagatctttccattttcttaaggtaggtatttatcgctataaacttccttcttagaactgcttttgctgcatcccataaattttcaatgccacaaattttgtttctcttttcatttttctcaagacattttttgattttccttttgatttcttctttgactcattggttgttcaggagtatgttaattttcatgtatttgtgaattttccatttttccttctgttactgagttctacttttatgccattatggttggaaaagatacttgatatgatttcaatccttaaatttgttaagatgttttccatggcctaacatataacctatcctggagagtgttctgtgtgcacttaaaaagaatgtgcattctgctgcttttgaaaggaatgttctgcacatgtccgttaggtctattggtttatagcattttgaaatccacagtttccttgttgattttctgtccaggtgatctattcattgttgaaagcatgttgctatttatttctcctttagttatgttaatatttgctttatagatttagatgcactgattttgggtacatgtgtatttacaattgttatatcctcttaatgaattcacccttttaccattatataatgaccttctctgtctcttgtgacagtatttgacttaaactctatctcatctgttataaggatagccacctctgctttcgtttggttatcatgtgaatgcaatctctttttcatcccttcacttccagcttatgtctgtccttaaagctaaagttagtctcttacaggcagcatatagttagatcttgttttttattcactcatccactctctcttttgattggataatttaatacatttacatctaaagtaattattggtaggtaaaggcttactactatcatgttgttaattgttttctgattgttttgtagttcctttgttgcttctttttgtctcactgtcttcctttgtgacttaataacttttttggagcaatttgctttggttcctttctctttatgttttgtatatctactacagactttttctttgtggttatcatgaggtttacataaaatatttcatagttataaccatccattttaatctggtaacaactttgactgcatttaaaaatactgtattttaacttctcctcctcccacattttattattcatgccatagtttatatcttttgtatgttgtgtattcattagcaaattgttgtagttatagttatttgttaatacttttgttttttaacttttatactagagttaaaagtgactgttgcacaataacagtattggagtattctgtatttgactgtataagaatacctttaatagagttttattctttcatttgttttcatgttagttagtgtccttttgtttaaacttgagaattccctttagcattttttgtaaggcaggtttaatggtgttgaaatcccacagcttttatttgtctggtgatatgatttgttcctgaacttccacccaaatctcatctcgaattgcaatccccaggtgtcaaaggagggacctgttgggagatgattggatcacgaggtgttttcccccattatgttctcatgatagtgagggtgttctcatgagatctgatggtttaaaagtggtggttacccgtgcgcacatgctctctctctctcctgctgccttgtgaagaaggtacctgcttccccttcaccttccaccataattgtaagtttcctgaggcctccccagccatgaggaactgtgagtcatttagacctcttttgtttataaattacccagtctcaggtgatatcttttagcagtgtgaaaataaacaatacagagaattggtactggcagagtgaggtactgctataaagacaacctgaaaatgtgaaggcaactttgaaactgggtaacaggcagaggttggaacagtttggagggcttagaagataggaagatgtgggaaagtttgaaacttcctagagacttgttgaatggttttgaccaaaatgctgatagtcgtattgacaatgaagtccaggctgagatggtctcagatggagacgagaaactattgggaactggagcaaaggccattcttgctatgctttagcagagactggcagcattttgcccctgccctagagatctgtggagctttgaacttgagagagatgatttagggtatctgtcagaataaatttctaagcagaaaagcattcaaatataacctggctttttctgaaagcatacagtcaagtcatatgcgttcacaaagagatggtatgaaattggaacttatgtttaaaagggaagcaaagcataaaagtttggaaattttgcagcctgaccatgtggtagaaaagaaaaaccaattttctgaggaggaattcaagccggctgcagaaatttacataagtaatcaggagctgaatgttaattgccaaacaatggggaaatgtctccagggcatttcagaggtcttcaaggcagcccctcccattacaagcccagaggcctaggagggaaaaatggtttcatgggccctgctgctctgtgcagccttgggacttggtgccctgtgccccagccactccagctccagctgtgactaaaagggtccatagctcaggctgtcgcttcaagggtgcaagccccaagccttggtggcttccacgtgctcttgggtctgcgagttcacagaaaacaagagctgagctttgagagcctctgcctagatttcacaggatgtgtggaaacacctggctgtccaggcagaagcctgctgcagggacccagccctcatggagaacctctattagggcagtgcagaggtgaactgtggggttggagcccacacacagagaccccactggagcactgcccagtggagctgtgaaaagagttcccccatcttccagatgccagaatggtagatccactgactggaaagttgcaggcactcagtgccggcccatgaaggcagccgtaggggctgtaccctgcaaagccacagggacagagctgcccaaggccttaacagcccacaccttgcatcagcatgccctgggtgtgagacaggggctccaaggagattattttggagctttaaaatttaatgacttccctgctaggttttgcatatgcttgggacctgtggcccctttattttggccaatttctcccatttggaatgggaacatttacccaattcctgtacccacattgtgttttggaagtaactaacttgttttttattttaaaggctcattgagggaagggacttgccttgtctcaaatgagactttggactcggacttttgggttactgtggaatgagttaagactttgggggactgttggaaagacatcattggttttgaaatctgaaaaggacatgagatttgggaaaggccaggggaagaatgatatggtttggctctgtgtcctcatccaaatctcgtcttgaattgtaatccccacatgggattacatgggaggggcctggtgagaggtgattggatcatggaggtggtttcccctgtgctgtgatctcatgatagtgagggatttaaaagtgacagtttcccctgcacatacacactctctctctcgtatcaccttgtgaagaaggtgtctgcttcccctctgccttccatcgtgattataagtttcctgaggcctccccagccatgggtaactgtgagtcagttaaacctcttttgtttataaattacccagtctcaggtagtatctttacagcagtgtgaaactggactaatacatctgggaaattctttttgtctccttcctttctgaaggacagctttgcctgatattatattcttggttgccaggttttgtactttcaatactttgaatatatcatcccactctctcttggcctacatgatttctgctgagaaatccaccaataatcttatgaagcttcccttgtatgtgaagaattgcttttctcttgcttctttgaaaattctctctttgtcatggtgaggatttcttttttttttttttttttttagatggagtctagctctgttgtccaggctggagtgcagtgtgcagtggcgcaatctcggctcactgcaagctccgtctcctgggttcacaccattttcctgtctcagcctctggagtagctgagactacaggtgcccaccaccacgcctggctaaattttttttgtatttttagtagagatggggtttcactgtgttagccaggatggtctcgatctcctgacctcatgatccacccatcttggcctcccaaagtgctgggattacaggcatgagccactgcacctggccgaggatctctttatatttaatctatttggagttcttttgggcttcataaatctggatgtttatttcatttatgtctccaaattttgagagttttctattcttatttttttaaataagtttctgcaactttctctttctctacttcttctggaactcttctaatgcatattaattttcttaacagtgtcctataagtcttgtcagctttctgcaatttttatcattccttttattactctgactgggtaatttcaaatgacctgtatctgagcatgctgattctttctcctgcttgatctagtctgctgctgaagctgtttgtgaattttttcaattcagtcattttgttctttagctccagaatttctgtttcattcttttttatggttcctatctatctttttgttgaacttctaattttgctcatgtattgttttcctgattttgtttactgtctatctatattgttttgtagcttattgagctttcttaaggcaattatttttagctcttgtcatgcagtaaagatctccatttctttagggtcacctcctgctgctttatttccttcctttggtggtttcttgtttccccgattatttgtgatcagtgtggccttgcactgaagtaggcacctatttcagtctttacatactagcttcagcagagaaagccattcactagtcagattgaccagagattgttggtgggctgtctgttggggtctatgcacaggatttctgctggagttctaaggtgggaagggctggattctgggttcattcactgtggttgtctgtattctgtgcacaaggactggcttgaagcatggatccttgggggctgacttggcactgaaatgagccttaagcctgcgtctgcaggggccagcctaacatggggatcacctggcacctgagttcatggggataggcctgttcctgagtttattcaggctgtcctgggaacaaggtccactggggtgagcccagcatctgggtccacatggcccagcatggagccaagatctctggaggctgacctggtgctggatctgcaggggatggcctggattctaggcccatgggtgccaacttggagcctggggttgctggggctaacgtggaggctagatagagtcttgggggccaggctagagctggagcaggcctgaagtctaggttttgtgtggccatcttggagcctgaagccccaggggctgacctggtctggggtgagcatggggctgaggccacagaggctggtctggcctgtggcaggcctgaatcctggtgctggggtttactggagtgggcttggtgcttgggatctgtggtgaagttaggttctatcttaactgtccctcctccatgcaagagggcatctctctccatactgtgctgcccaggcttgaaggtgagatgacaccggtaatgtgaaattgtccttcctatacacttctatgtgtcttttcttatttctgtgctgcaaccaggtggcataacctctcacctgattccttagctctagtgaagttattttcgtgcatggatacttgttcgaattgatgtttctgcaagggatgagcgctagaaactcctgttctgacaaactcctattcctattcttgctgacatcactccctgaaatagttaatatacttaacagctgaacacggataggatgttcatggaatatgttgacaggacaaaaagttgaaactgttggcagaaacccaaagtcaatattgaagccaagcaaaatattgcctgcagtgccacattagaacagcttgaagaccgttcatttttaagtgacaagagactcacctccaagaagcaattgtgttttcaggtagcaaatttttattattctgattgtttccaaataaactataatttttaagtataattttttactttatgagaaaattaatcatttatattctaatttcctgagtatgtagagagtatagataatgttcctttatgtagaaatatttaaatgtaagatgattttaaatcagaaagaatatttgattgatttaaaatttttaaatgggctttaatattttcagaggttttctttacttagggatttttggactgacattattgccattatttattaattttgtttttgcccaaatcaagaggtttcataattgtttactctctctctaccaattccctttccaacattactagccacagagttggccaatgaacaataaacacaacagtagtctggaggtctcaatttgtatcttgggaagcattataaattttccaactccctagacacaaatgtaccaaaaaaaaacccttgttttctataccagtaattgtgtgctttgtcttgcaattcagacatttacaagaaaatctaaatcaccttaaattaagatttatgttaaatgtggtctaaaaccagcagagttatgtattgttttcttttttagaatgattttattcaagcaagcaacttatttcatttccttgtttgctacagtttcctgtggtaagtgaattatctataaaacatggaattcaggctaagacaggagtagccaagcaagtggcaccacccctggagaaagctattgaacatacagcttcgggggtggagattgtccctgatgattcaggacacgtgtctatttaatgttccacaacaaggaccacttgtcaggtatattgctgtagacatatgttgcagaccagaggaaggagctcagaagtaggaatgtcttgggacttgtgttaacaaaaacttctgttcgcagatgacactctgcaaagcaaaacttgaaacaaaaaaaaattagtcctctatttttattatcaacagtaaaaaattaaactttatctgaaaattcaaaagagtgctaggcattttatagtgtctgggtccaatccaagtatctgttaggaacaccatacatagttttactctggaccgctagggaaccatttcaaaaatgaaagtaactggtttaaatttaacttagcaaaccatgcatttggatagttctaggtgaatagctttcaacaccagatttagatctcatttctctattaatttcattaatttttggagaataaaaatgattctggacatttcattaatcattacagagggagttttctctgtgtccccacaaggcatgattctgggtctatggtgacttaagagggccacacaacaatgagtatttaattttcctcagatgtatggctacaataaacatctataggtaaggtttacattcataaagagacctttttttttccaggaaaaaagacttttattccccctaaatcacaactcccctgtgtctgtccctcaaccctgatttctcttctaaaccgtaatttacaaacccatgtgcaaacccactgaaaggtgagaaggagcataagccagagacactgggaaccacagccaactacagggggtttttcatttttttgttttgttttgttttttggcaaaataaatcatgattatggctaggaaaatcagggatgtaagtaagcaaaaatttagaaactacatattgcatgtagtccccaaattcagaaacagtcatcgttaaacatcttttatttagtctttcagatatttttctacatatacctatttgcacatttcacaaaaaagagttattaactgtggacactctttgacttgcattttccacttatagctatcttttggtgcaaataagtaatatattttggagcttgctattcttctctttttatggtatttttgtgtgcacattcttatgctcttattcagttatttctgtagaatacaatttttgaaataaaaatactagattcaaaggtgtgaatatttttgaaggttttgtggtgtggtatcatgaaattaggtttcagaaagtttactccatagttgactttttctaccagctaataagagtgctcatttaccccacttaggccaactctaacaggcttctgttgctttgcatcctgacatatttatctttctggaaacagtgtcctaatttatttctgcagagctactgcctctcagttttggtccatgtggttctggtgaccctgattcttctgctgaaccagaaagtgcacacatcctcctggctgtggtgacccaatcagagccaacgtcttgcaatgaagcttttctttagacatctagaaataagactcttatgttttttttttccaatttgacttgaaacttaagacaatacacaggcctgagttgttggtactattttgctactacgtggagcttgagagtaatggtaacaccaagactggagcaagtggaaggagacatattgtccactgatgctatcagttgagcacaatgtgcagttactttttaagccagattcaccatgggctttttggctcctgaaccaatagatttcatttgttttcaagccactttgtactaggttttccatcatttgcaatcaaaaccagtatacaaacactggttatttaatttttcatttttgctaatctcagggataaaatggcttctagttgttttaacttggctatatttgtgattcttcccattttcatatacttactaatcacttctatttcttttgtaaattatcttttcatatttgttatctaattctttaaaatttgagtactttaattctcattattgtttgtggaattgttaaacaagactgaataatctgcccaaagtccatggacatgggggcccatgtaaaagctttgaaagccaccatcattatgagataaattatataatagtactttacataggctccaaaatacagcacagacacagctatcattgtcatggtcatcattatcatcatgatcaccaacttatgaggataagcaagaacacctactagaagtttctttccattcagcaacaaaattggtgtctttctagtcactcccttccctgactgtcacatagcagttcacagaggctcagttgcagaatgagaagctctgggccaggacctgccattgtatgcatccttgcatgggaactgggggctggaagaggagtgactgcttgataattatgagtcagtcaaaaccaccaactgtctgaaaaaaataggcctttttgtaactagtattgtcactaaaccaactcctccatgttttgtgcatacatgaaatctaggcaatacacttgtattcccaaaagcttccacttgaagagatctgtgctctttccaaatataaaccttacccgagaggtggtcatcttggccacacctcagagagggagagaggcagtcttgttgggttgggtggtcataatggggctcagggccaaatccccagggggtaggatagtgcagagaagatggcactctccagtgcttaataaaatgcacgtggtctaagctgcccactccctcaaaggcaataaaaaataggtactatttaaattgaagagtaactactgccccagggaatggacaggttgtcattggaatagccatggttaatggtcccagttgacaactgaaatgaatgtgctacctgaacaggaaagcttattaaccagatttcaaagacagtctttcccggtaaatccaaatttacaaattaaagccagtaaagacaccgaattctctaataatatgtggggtgcagtatattttagagctgggaataattccaaacagcaaatagttcaaaatttattttcaatttagcatatgcatgcatttgcttaaactgtcttaaaaatgagtaaaaaatactgtcagtttgtttcaatcatactgagatgaggaacaatgtttagcattgcatgctagaaaaggacacaggattgggagtcagggctgggtgaccgtcacaggactttcactaactgtgtggatcttgggcaagtctgtgtgccctgagactcagttatttaactttcttttaaaaaacatagtccagatgcagataacaaagcctgcctctaatttcccttacagaattgtgagaagctggtggagatgtttgttacaaaagtgttttgaaaatagagcaaatattattctttttaaggcatgatgttttcatagcatgtcaggcaacaggaaaaaactaagttaggattttattttattgtggggaatttatgtgcaaattattgtgcaatttaatgaaaataagccaatgttttatacagaagtacccagaaaattaaataacactatacattgttcaaatagttgccttaatatattttattttctcagcataattagagttgtattatacaggtctttgagtagtcagtcagtgggagaagttaagacaacagatatctttttattaaaattattatatgaattatcgcaaattaatttttatggttctgtcacaggatgtctgactcaactctatgaaaacgccttcttcagaggtggggatgtagcttccatgtacaccccaaatgcccaatactgccagatgaggtgcacattccacccaaggtgtttgctattcagttttcttccagcaagttcaatcaatgacatggagaaaaggtaaaagttggtatttcattattggagaagctgtttttcaaaactgaatcagttttgtgcagaaaggtgtagtataactgagagttcttcctcacacggggttcaaggaccagcttcagcaaaatcccgtcaagtggttcttacaaatgcagattcctaggccacaacccagatctgctgaaccaaagtttcttgtgaccaggaatctgcattttaaacaatcactgtgtttctttaaagtagtagaagctagtcattttctattcaaagcctcaaaatgcttgaatatcattgggctaagggattgtctcaagaaagagtctaacaggtgcacatttcatctgaataaagaaacagatttaactgtgtgacccatgatcacattagcggatagcacagtccaaagaaaataacataagacaagcattttgctgagaatgtaattgagaaagatctagaacttgtgattttgggacagggcagttctaaatggggcctatagtgagccagtttgggcacctgtggcatgatgctatgtatggtgtgtgtgtgtatgtgtgcttgtgcttgtgtgaatatgtattattaactggaaatttgtaaaagtattggaaaaatagtacttacgattttgtgtgtgtgtgtgatggagtctcgctttgtagcccaggctggagtgcagtggcgtgatctcggctcactgcaacttccacctcccaggttcaagcgattctcctgcctcagcctcccaagtagctgggattacaggcacgcaccaccacgtccagctaatttttgtagttttagtagagacggggtttcaccacattggccaggctggccttgaactcctgacctcgtgatccacctgcctctacctcctaatgtgctgggattacaggcatgagccaccgcacccagcggtaattacaatttttattaggtcagagagatgcttattaatcacgagccacagtttcatcttaatgatttttccttttgattaatatccagagtaagcttttctttgttgttcccatttccatgttcataactctttactcatcttcactctatgtgagtttaccaactagaaattggatagtcattctctgatcccacatgttaaacttgtagagaaaactcagattgtatgtgaggatcatcatattaaaagtggaggaaggttctagaattcttataaataatgaaattaacatgaaggtggacatctaagacagagggaagtcttccattaagtgcagactacaaggagttaataagcaagatgaacacgatatacaaatccagctcttatcactaagttaactttttaagtaaatgaaagtatttgcaaaaataattaccaattgagaacatagttgcctgaaagtttaagaacacaggaaaaatcattaactctttaatatggttgatttcctgtacttaaaaaatgtgagtgtaaagaaaacgcagtgatggagttagatattatggggtgttataaaattagctctaagagtgttctttccagcaagtattggggaagctatattattttccttattcctggttttatttgttagtgtgtagaaaatgctagacatttcctcaatgtatgtttattattctacttcctaagtaaagctacttttaaaataggtttggttgcttcttgaaagatagtgttacaggaaccctgccaaaagtacatcgaacaggtgcagtttctggacattccttgaagcaatgtggtcatcaaataagtggtaagttgtgaatttcttagctacatttgagttaatattggatctcgcttagaacagcttttgctcaaagtttgtactgctacagctttttggaaggcatcactcataaagataggagatggggcagtattctggacacaaaagagggacccatattcatctggacacttctattgtctttataaatcaacacatacttaatgagcctctattatttatgaggttagcgctcaagtgtaagatttgcagaaaatgaatccaaataattgtgtctcgtttccagataagaatttttaagaaaacacaagggaacatctctctcaagttcacttgagggtaatttttacatcagtgattctcaaccagcagtgattttgtctcttccactggggacatttgacaatgtctggagacatttttggtggctacaactagggaggatgctattagcatttactaagtagaggccagaatgtttgaatgctgaccaacattctacaaggcacagggcagtcgtccacagcaaataattttctggcccaaaacgtcaacagtgctgacatcaagaaactctgtgatataccactaggcccaaattgaagaactgagttctgcaaatcttgctaagaataatacttcctaaaggaaacttgaggactaggatgctagagaactttgattctgacatctgaagctactgatgtcttgggaaacagtttccaatgctatcctaataaatttaagacaaatgaactatttctcaaacatgactgggactgataagaaagtgaaaagtgctgaaaagattcaactgatgggttgtcagaatcttaaaataactgctgttattctatgtatgactatatatcattactattttattttcattatgcacaattaattttgtaggttcaaatttcagatgtttttaaatttgtcatcctttcctccctcattgatatcacctcttcaatacgtacacactttgagcctgctgtttgcattttaaccagttatcaaaggatggcaatgccttcattataaatgtgggcctgacttagccagtataataggtgtagtctacgtgaggtggagtacatttcctattttaaaagatcaatttttatgttaatccaatttggtataaattattcgagtaagtgctatttctgattgttgtatcttgtagcaaaatttaaagaaaaagtaatttgtgcctttctcaatattcctgttattgttcatgtattctaaaactcactgttactcacttagcttgcttttaatgttttttaaagtgaaaaattgttcccaagtacataaaatctctacactcaagaacaattctagtcaaaagcatttagagcttccgtatgaacacttaaagagtttttatttgtaagagtcgcatcccaactcttagcctgttcttttctcacatgcagaaaaataggaaagagacttcgtttccacagtctgcaaattcctgtgtttaagaaccacagtgaataatccacctccctgcccaactcatcgtactgtcatatagttttcctgacagtttgtgtattttctgtctttcccacccttaaatttagttttatgacttcaaccatacttcttaggagtggaaaggtatctgtagtagattatggtttattccacataatcttggggaataaaactttaaaaaagtatacagtttatacttctggttacattacttccttaaccaaaagtctaaccaagaaatttgaatctttaaaaaaaaaagaggccgggcgcggtggctcacgcctgtaatcccagcactttgggaggccgagacgggcggatcacgaggtcaggagatcgagaccatcctggctgacacggtgaaaccccgtctctactaaaaatacaaaaattagccgggcgtggtggcgcgcgcctgtagtcccagctactcgggaggctgaggcaggagaatggcgtgaacccgggaggcggagcttgcagtgagtcgagatcgcgccactgcgctccagcctgggcgacagagcgagactccgtctcaaaaaaaaaaaaaaaaaaaagagcctaattttgcttcactgtctgtgaaaagaattatctgtatcttttgcatgtaagacaaatctcaatgaaaagggtgcttaaatagaagttaacactattttaaagcaagaatggaagtggtttcatcatgcgtaaacaacaactctccacattttgtaatgattgatctggatgcaatttgtcatcagacaggagaagtcgaaagcaaagaaataacactgggagatagagaagctctttcattcaatgcgaaaggtcaaaggcacatcagtttctttaataatgcaaacctcagcacacattatcagtgtcctcattattattgccttgtttatttcccactgctcattgataatttcaacgtgaaatttacctgtattgctgcatgcatcttgcagtttaagaagtgaagtaacccaatttcaaagctagtgctttagggaaaatattggattgtatttacttcaagcagagttcgataatttatgtacataataaaaattttaaatcccttagttaatatagcagttgccaaaactgggctattatcattctaaactaccaacccaaatggtagtgggtatctaatctacctctagaaagaaaatggactgtatttgctctatgtatttttcttgtacagcttgccatcgagacatttataaaggagttgatatgagaggagtcaattttaatgtgtctaaggttagcagtgttgaagaatgccaaaaaaggtgcaccagtaacattcgctgccagtttttttcatatgccacgcaaacatttcacaaggcagagtaccggtgagtacaattcaaggtgtgtgttctttgtattggtgcctccaggatttcactgtattcttcttaacctcttttgttcccaaactaaaaaccaaacagggcttttattctaaccactttcctcatttacttactctattttatttttttatcttttatttatttatttatttattgagatggagtcgcgctctgtcgcccaggctagagtgcagtggcgtaatctcgactcactacaacctccgcttcccgggttcaagcgattctcctgcctcagcctcccgagtagctgggattacaggcgtccgccaccatgcctggctaatttttgtatttttagtagagtcggggttttactatgttggtcaggctggtctcgaactcctgatcttgtgatccacccacctcagcctcccaaagcgctgggattacaggcatgagccactgcgcctcgcccttcattttttaattaaataattcatttaatttcatttgtttctctactcttttcccctggcatgtaattgtaccgcatcttcaaagcctgacatcctcttcccctacttctccaaagctgattcttgcaggtctttcctcaaataccgtcccctccaaaagcccatttctgagcattctcttttaagtcacactcagctctgtttatttcattcatagagctaatcacaatttgatattaacttgtgatttttttccttatttttaaatcttatttttatttgcatagatgtatggggtacaagtgtaattttgttactttgatgtattttacagtggtaaagtctgggcttttggtatatccatcactggagtcatgtacattgtacccactaagctatttttcaacgcccgcccccttcccacctctctgtcaccttcccagtctctactgtctatcgctccatgctctactcaattttggtgtcattttttcctgaagcaaaattttggtgtcattttttctgaagtcattttctgaagtctgtgtcatttttcgctttcctgaagcgaattttggtgtcatttttcctgaagttccgtttgccccacacataggccttgcttatagaatgagggtttagtgtcacggagtctcctgcctcattctcaccctaacttttcctttacccctttgcgaggggaaggatgtccattaggttaataatgcagacccctaacccactcattatcagggtcattgtttttccactgtgcattttaatactaactgttacctgcactgctccctgcccctcaaagtgcagaaagcaaagtaacctcttttcttcccattcaggaacaattgcctattaaagtacagtcccggaggaacacctaccgctataaaggtgctgagtaacgtggaatctggattctcactgaagccctgtgccctttcagaaattggtaattgtaggactacttcactttgtgattgtggtaggtggaataggagcccccagagacgtccctgtgctgagccctgggacctgtgcgtgtgttcccatagctggcaaaagcgtttctgtcaatggcatgcagttacgggcttcgagatggggagtttactctggattttctgaatgggcccaatgtactcacagggttgagtgctcacaaggctcataagaaaaagagagaggcggaaggctcagagccagagagagaggtttgaaggtattacactgctggctttgaagatgaaggtccgtgagccaaggaatgcaggcggcctctagaagttgaaaagggcgaggaaagagtttccctgtggagcgtcctggaggaagaagccctgctgatgtcttgattttagcccagtaagacccaatctctagaacagtaagataattaatttgtgttgtttttaaccactaagtttgtggttatgcccctagagcagcagttataggaaactagtacagtgatactgttagagttataggacagtgatataggacagtgatactgttatagttataggaaactagtacagtgatactgttagagttataggacagtgatataggacagtgatattgttatagttataggaaactagtacagtgatactgttagagttataggtacagtgatattgttatagttataggaaactagtacagtgatactgttacaggtacagtgatataggacagtgatactgttataggaaactagtacagtgatactgttagagttataggtacagtgacataggacagtgatactgttatagttataggaaactagtacagtgatactgttagagttataggtagagtgatataggacagtgatactgttatagttatagaaaactagtacagtgatactgttatagttataggacagtgatataggacagtgatattgttatagttataggaaactagtacagtgatactgttagagttataggtacagtgatataggacagtgatattgttatagttataggaaactagtacagtgatactgttagagttataggtacagtgatattgttatagttataggaaactagtacagtgatactgttataggtacagtgatataggacagtgatactgttataggaaactagtacagtgatactgttagagttataggtacagtgacataggacagtgatactgttatagttataggaaactagtacagtgatactgttagagttataggtacagtgatataggacagtgatactgttatagttataggaaactagtacagtgatactgttatagttataggacagtgatattgttatagttataggaaactagtacagtgatactgttagagttataggtacagtgatataggacagtgatattgttatagttataggaaactagtacagtgatactgttatagttataggacagtgatataggacagtgatattgttatagttataggaaactagtacggtgatactgttatagttataggtacagtgatattgttatagttataggaaactagtacagtgatactgttagagttataggtacagtgatataggacagtgatattgttatagttataggaaactagtacagtgatactgttatagttgtaggacagtgatattgttatagttataggaaactagtacagtgatactgttagagttataggtacagtgatataggacagtgatactgttatagttataggacagtgatattcttatagttaccgtggtatagttatagttaaaggtacagtgatattgttatagttataggacagtgatattgttatagttataggacagtgatgtagttacagtgatataggtacagtgatattgttatagttataggacagtgatatagttataggacagtgatattgttacagttataggtacagtgacgttgtaatagttataggacagtgatattgttatagttataggtacagtgatgttgtagcaaaactgtaaggtcattccttggttgtgtccctatctagtgaaatgactctaccaggggtagggaaataaaactctgtcgtttcacacataaaggtaatttcaatggaattatccagaaaattgccatgacattccacctcatttagcatgtcaggatgttaatgacaagatgttactaaaagcaaatcccttacggccagttttccgcagtactgggtgctggctctgtgcctggccctgtattgggtgctgggctaggatttccctgtggaagattgggaaggttggttacaaggtggctattttcctgtctcctctttgcgacagcacaccttctccatggtgtgtgccaggttcacgtgtactggtgatttaattttaacgttcatattatttttttctgggagagtttttgaaggctgccaggaggcaggactcgatgcaaacatgctccattctgtacccagccctgttgctggaaggatttgctgcacttacccagggaacaggcaagctcgtgctgtggctctgggctgtcacagctgctgtccacacctgggagagcaccctggatggctcatctgtgtacttgctttcttgttaaattgcagtgagttcacatgtgatttaatcggatcaaatggcctttacagactgataaaaatatggctgtttcaggtggtgttttgagctgctaagggcgtggcttttcactgagtacgtggtccccgttcctcagggaacacccagtagccacatgcctcctaaacctagagtagggctgtctcctggcctaactgcccaaatgagattcataagttagggatgatctgtagttatcactacagatttgtccttggtttcaccaaggattttcctaattttacaaacaaaacccctaaggctcctggaaggagggtagaagtgaaggtgctccgggggcaacacagctgatgagctgaaccagaactcgacccttgggtcacacacatttcacagtgctcactccaccttttgtttttttaatggatttaatggtgttttaaagcctcctgcctctcaacacatatgaattcattatatttacagatttccttctcttgtggtccatcttcctgcatagatcttgagagatgtcaggctaaccacgtttcctcagttaatttaacaaaaccatttgcaactctgacatggaaaattcctaccatgtgacttattaatttatcaattgagatggtacacatattttcaagccaaaaggaggaaaacataaattggaaaaaaaaggtttttttatttttatcacctctggggaagaaagtctgataaacgaagctggttgataaaattgcaattaggggaagcaacatcatggtttctgttcggaggctaaccagatggcatacttgaaatagagaatgtcctagaaatcaactggttgcttggccaaaatatctataaatagtgcccaacatattagataggaaaagcaaagtaaaaacaattttaacaggttaggacattgggctgaagtattgcatatatttaatgtcatgtgcgtccgtgtgaagagaccactaaacaggctttgtgtgagcaagaaagctttttaatcacctgggtgcaggcaggctgagtccgaaaagagagtcagtgaagggagatggggtggggacgttttataggatttgggtaggtagtggaaaattacagtcaaagggggttgttctctggcgggcagcggtggggggtcacaaggtgctcagtgggggagcttctgagccaggagaaggaatttcacaaggtaacgtcatcagttaaggcaggaaccggccattttcacttcttttgtctttcttcagttacttcaggtcatctagatgtatacgtgcaggcctgggcccagaggcctgacattcctgtcttcttatattaataagaaaaagaaaacgaaatagtggtaaagtgttggggtggcgaaagtttttgggggtggtatggagagataatgggcgatgtttctcagggctgcttcgagcgggattaggggcggcgtgggaacctacagtgggagagatgaagctgaaggaatattttatggtaaggggtgatattgtggggttgttagaagcagcatttgtcatatagaatgattggtgatggcctggatatggttttgtgtgaaatgagaaactaaatggaagacacaaggtctgaataagagaaggagaaaaacaggtgttaaaggactaagaattgggaggacccaggacatctaattagagagtgcctaagggggttcagtgtaattacttgcttggttggtgagtttttgggctctatccttgacagagtcctcctttttaagttggaggctgagcttggtgaggtgtgtttttaaaagaccattagtctgttctacctttcctgaagattgaggatggtgaggggtatgaaggttttactgaataccaagagcctgagaaactgcttgggtgatttgactaataaaggccggtctgttatcggattgtatagagatggaaaggccaaactgaggaattatgtctgacagaagggaagaaatgaccacggtggccttctcagaccctgtgggaaaggcctctacccatccagtgaaagtgtctacccagaccaagaggtattttagtttcctgactccgggtatgtgagtaaagtcaatctgccagtcctgggcgggggcaaatccccgagcttgatgtgtagggaagggagggggcctgagcaatccctgaggaggagtggagtagcagatggaacactgagcagttattttttgaggatagatttttacgacggaaaggaaaagtgaggttttaagaggtgggttagtggcttgtaacttacatggaagagtttatgaaatgatgacagaatagaatgggcctgtgaggctggaggagatattttccttggtccaagaattatttgccttgtgtgggaagagattgataggtggaagtttcaatgggggagtagatgggagtgacagatgaggaagaaaaaaactggctgtgagggatagaagttggaatgctcgctgcttttttagctaccttatcagcataggcattgtcctgagcagtgggatctgatgccttttggtggcccttgcagtgaatggcttcagcttcctttggaagtaaagtggccttgagaggagtttttattaaagaggcattaagatggagaacccttgtgtagtgaggaaacctccttcagcccatataaccgcatggtggtgcagaatatggaaggcatatttagagtcagtataaatattgacacgtagtccctttgcaagagtgagggcctgagttaaggcaatgagttcagcttgctgagaggtagtggagcggggcagagcagtagcctcagtgatagatgtggaagatactacagcatagcctgcctttgctggtgagtggtgattaggcctggtggaactgccatcaataaaccaagtgtgatcagggtaaggaacaggaaagaaggaaatatggggaaatggagtggatgtcaggtggatcagagagatacagtcatgggggtgggggccagcctaaaacagtaaggtcaagttgtttgaacagaaaggctacagggcgtggtcctggctcttgtgtaagaattttgactgcgcagccctgcacttcggctgtgtgtaatgaaaagggttgggatgagttagggagagctagtgtgggagcagtttctagggctgtttttaaggaatggcaagaggagtggctaaaggatttaggatctttggggtcagctagctttgcttttgtgagtttatataatggtttagtcaggatggtaaaacttagtatccaaaggcggaagtacttaaccatacctaggaagaaaaggagttgttttgtagaaggggttggggtttgggagatgagccagacacaatcagcagggagagcacatgtgttttcatgaagaattatgccgagataggtaatggatgaggaagaaatttgggcttgactgaagtaatgggggctgtcctcgaagccttgtggcagtacagcccaagtaagttgctgaggctgacgggtgtcagggtcagtccaagtgaaagcgaagagaggctgggatgaagggtgcaaaggaatagtaaagaaagcatgtttgagatccagaacagaataatgggttgtggagggaggtattgaggataggagagtatatggctttggtaccatggggtgaataggcaagacaatttggttaatgaggcacagatcctgaactaacctgtaaggcttgtccggtttttggacaggtaaaatgggggaattgtaaggagagtttataggcttcaaaaggccacgctgtaacaggtgagtgataacaggctttaatccttttaaagcatgctgtgggatgggatattggcattgagcggggtaagtgtgattaggttttaatgggatggtaaggggtgcacgataggttgccaaggagggagcagaggtgtcctatacttgtggattaaggtggggacacacaaggggaggatgtgaaggaggctttgaactggggaaagggtggcattgaggtgtggctgtggcctaagaacagtcagggaagcggataattgagttaaaatgcctcgacctagtaagggagctgggcaggtggtgataactaaaaaggagtgcataaaagaatgttgtccaagttggcaccagagttggggagttttaagaggtttagaagcctggcggtcaatacctacaacagttatggaggcaagggaaacaggcccttgaaaagaacgtaatgtggagtgggtagcctctgtattaattaagaaggggatggatttaccctccactgtaagagttacctaaagcatctgtgatggtccaggaggcttctaaggtgatcgggcagcgtcagtcttcagccgctaagccaagaagatctgggaagcagtcagtcagagagccttgggccagagttccaggggctctgggagtggcagccaggccagttagacagtccgatttctagtggggtcccacacagatgagacacagcttaggaggaatcccaggctgcgggcattccttggcccattggccagatttctggcacttgaaacaagatcctgatggaggaggtcctgtaggaatgcttgaccactgcagtttaggcattttgaagtttttgtgtgtgctggagatgtggctgggttttgtctcacagcagaggcaaggaatcgcaactcagaaatacattgctacttggctgcctctattattgtacatcttgaaggcgaggttaattaagtcctcttgtggggtttgagggctggaatctaatttttggagtttttttttgtttgttttttggttttttttttttaatgtcaggagctgactgggtgataaaatgcatattgagaataagaggccttctgacccttctgggtctagggctgtaaagcgtctcagggttgctgccaaacgggccatgaactgggctgggtttttcatatttgatgaaaaagagcctaaacgctaactgatttgggagaggtcggataaataaaaaggaacattaatcttgactatgcctttagctccaaccacctctttaagaggaaattgttgggcaggtgggggagggctagtcgtggaatgaaactgtaagctggaccgggtgtgaggaggggaggtgatagaaggattatagggtggaggagcagaggctgaggaagaattgggatctggcttggcctggcaaggagcagcctggggaggaggggagaggtcagatgggtccatagaaaaggaggattggaaagactcagcaacacttggggttgggattgagaggacagatgggttgggattgaggggacagatgggagggaaagaaggaagatttgggacaagttgcattgggaacagagactagggagggaccaatgtgtaaaagaatgcctggacgtcaggcacctcagaccgtttgcccattttatgacaagaattatctagatcttgtaggatggaaaaatcgaaagtgccgttttctggctatttggaaccattgtcgagtttgtattggggttaagcagcattgcagaagaaaataaggcatttaggttttaggtcaggtgtgagttgaagaggttttaagttcttgagaacataggctaagggagaagaaggaggaatggagggtggaaagttgcctatagtgaaggaggcaagcccagagaaaagagagggtagagacatggagagaaggggtgggggggtgcttgcccccaggaaagtggttcttgccactaagggtgaaggatcaaggcaggcattcgcgcggtgatcagatacctctgaaacgtgggtgaataatcaagcaggtgtccctgcagtgattaaacagcaaggaaagactatcttcccaagtccatgaccagtgccagagttttgggttcatggataaaacgcgtctcctctgtctctaccagaaaatgaaaggaattgaaattaagagaagggagagattgaaggatggcgccaagattgaaaggaaaaagaggttgagggatagggagagaggttggataagagagtaaaaagaggctgcttacccaatttaaaatcggtgagatgttccttgggcttgttggtctgaggaccagaggtcatgggtggatctttctcatggagcaaagagcagggggacaggggattgatttcccaagggaggtcccctgatctgagtcacagcaccaaatatcacgtgtgtccatgcgaagagaccaccaaacaggctttgtgtgagcaagaaagctttttaatcacctgggtgcaggcgggctgagtccaaaaagagagtcagtgaagggagataggggtggggacgttttataggatttgggtaggtagtggaaaattacagtcaaagggggttgttctctggcgggcaggggtggggggtcacaaggtgctcagtgggggagcttctgagccaggagaaggaatttcacaaggtaacgtcatcagttaaggcaggaaccggccattttcacttcttttgtcattcttcagttacttcaggccatctggatgtatgcatgtaggcttgggcccagaggcctgacatttaacatggataaatgtaaagttcttagaatcatacatacactttggaaaagatggggcttaatcgcactttataagacttgaaggatgtttgagaatcactatgaaactgctgaaaataccaagaaaatttaattcttatgtatataaataatgtgtctgttttacatgaatcccttctacaagcttggtatttaatatggcatatattgttttttcatagtagatttaaaatttttgatatctaatttagataacataaaattaaccctttgaaagtgtacaactccgtggtttttagtatatccacctgattgcacaacgatcaccactgtctagttccagaacatttttatcaccacaaaagaaaggctgtatccaggccgggcacggtggctcacgcctgtaatcccagcactttgggaggccgaggcgggcggatcacggggtcaggagattgaaaccatcctgggtaacacggtgaagccctatctgtactaaagatacaaaaaaattagctgggcatgatggcagatgcctgtagtcccagctactcaggaggctgaggcaggagaatggcctgaacccaggaagcggagcttgcagtgagccaagattgcgccactgcactccagcctgggcgacagagcaagactccatctcacaaaaaaataataaaaataaaataaaaaaaaaaaagaaaggctgtctttctcctttcccattggccgtctttctccattccctactcctccaatcccctggcaaccactaaatctactttccatgtctgtggacttgactcttcgggacattttacataaatggaatcatgcaatgcagcacattttgcatctggcttttttcacctggcgtgttttcaaggctcattcgtattctagcatatatcaatactttgttcctatttaggactaaataagattctattgtatgaataaaacatattttgtttatatacttagtttgatgaacatttgagttgtttctggatttttttttttttttttttgcctcttatgaataatgctgctatggacaacagtttttgggtaggcatgcattttaaattctcttatgtatatacttaggattaaaattgctggatcacagagtaactccatgtttaactttttgatgaattgccaaactgtttttgagagcagctacacaatgttacattcttaccagcaacaattgagggcttcagtctctctacaaccttaacaacacttgttattgtctttgtaattattgcctttctaggcagtgtgaagtggtgtctcactgtggttttgatatgcatttccctaatgactaacaatgttgtgtatcttttcgtgtgctcattttcaatttgaatacattctttgggaaaatctctgtttaaatcttttggccattaaaaataattgggttattttcattgttgagttgtatgaactctttatatactctggatactacactcttatgacatatattattttcaaaaattttctgtgcatctgcaggtcatcttttcactttactgatggtgttctttgaagcaccaaagtttttaaacttgatgaaatccagtctggctttattcttgcacgtgctttacctaaaacgccaaaacctaattcatggttttgaagatttttgcttatgatttgttcttagaggtttatagttttagctcttacatttaggcatttgatgcattttaaattaaattttgtatatggtgtaaagtagcaatccaacttaattcttgcatgtgggtattcagttattccattgtcttgaaacccttttcaaaatcaattgtctataaatgtaagagtttatttttggaccatcagttctatcctgttgacctatatatgcctatcctaatgccagttacacacagtcttgattaccataactttgcagtaagttttgaactcagacagtctgagtgcttttattttgtcctttttcaagattaatttggttattccggatcttttgcatttccatatgaattttaggatggttgtcaatttctgcaatagaaaagcagcaggattttgatagagagtgcattgaatctgtagaccaatgagtatcaatggaattatgtgttatcaaatttagtaaactacataaacgatatgtacacaactaaaacaaaactaagatataagatcatattaatgtaatgataataaaagtggattgtctcctgttctaattttaataggcacaaggcatttttgttaatcacttcttattaaagaattttttataatattcaggaaaatacaacaaaaaaacccttacattcctaaggcctcagagtcagagtaatataaaggaaatgtaaacacatgctgagtaatgcaagcatttggcaatggtggtgactggagctgggagcacagcttttatttctctgaaataggaatttgccccttagagttagaccaattttgccttcctctaaatggcaaacagtttggagatactttaaaggacattttttcacttaggatgtttagtactatgaataataaatagtcacaatttccttaactatggtgacaaaatacaagcaaatttagcctcatgtcatttcctaaggaacatcttctctctgtgagttcacaggttgccacatgaacatcttccagcatcttgcgttctcagatgtggatgttgccagggttctcactccagatgcttttgtgtgtcggaccatctgcacctatcaccccaactgcctcttctttacattctatacaaatgtatggaaaatcgagtcacaaaggcgagtatgcatggaaaatcgcatcacaaaggcgagtatgcatggggagcacttgctgctgtactttcatcacttttatagtctgagttcttaaaagtttcgttcatttccctcaaaacacttgaacctgcagtttcagtaggtactgttctgccaggtgcagattagttaagagattagcagacttctctgcctatcttctcttactttaaaacaaatgttaccattgaatcaaggaagcaatagccatgagaaaaaagaaggatctgacgcctttgaatgaagattcaaaacatgatcttcatgttttgtattagcttggagtaaaatccacttgctggcaatatagcccttaagcttgttgcctcttctctttgtttcagaaactagagccctgtttattctgatcaaggctctggcccactgtctttatctcagataacccaccctcttctgcacacagcatggagctaagagaagggtgtctagttatgtaatatcatcggcagcataaattcccagaatttgttctttgatttttttgtttgtttttccagttagaaggtggaacttcatcattgtcctcttttcaggttgtctgtgcctattagttttctccagagggagaggtggcttgatttacatttaatctctgcaatttattagagtcctgtagttggatttactttgaagagagtttcccagaagaataaaatttgctgcgttgctttttgggtgtgagctgcttttgtatttgcctaatgcctttaatgcaaatttctttctttctctcttgcttttttttaaaaaaaatagaaatgtttgtcttcttaaaacatctgaaagtggcacaccaagttcctctactcctcaagaaaacaccatatctggatatagccttttaacctgcaaaagaactttacctggtaatgtgatttgataataatattacataaaatgtaacctatttcatgacttttaacagcaacagtgatgaaacaatcctcaaggtaacagaaacttgtgtaaatgtcgttcattgcttttcccatctgatatctttttgtgtttataattgacacagaaccctgccattctaaaatttacccgggagttgactttggaggagaagaattgaatgtgacttttgttaaaggagtgaatgtttgccaagagacttgcacaaagatgattcgctgtcagtttttcacttattctttactcccagaagactgtaaggaagagaagtaaaggaaattttatttttcaaagacagttgacatgaccatttcatattctctttccccctgtgaaggcttactctttctactgttcatttcatctaggtgtaagtgtttcttaagattatctatggatggttctccaactaggattgcgtatgggacacaagggagctctggttactctttgagattgtgtaacactggggacaactctggtgagtaacctcactttttcgtggacctgtcagggatgtctgtcatgttgatagtttgcttagtcttaaggaattatgtgtcttgttctccttggttagaagggactttgattcacttctaattccaaccattagcgtcaacgctctcttttcagtctgcacaacaaaaacaagcacacgcattgttggaggaacaaactcttcttggggagagtggccctggcaggtgagcctgcaggtgaagctgacagctcagaggcacctgtgtggagggtcactcataggacaccagtgggtcctcactgctgcccactgctttgatgggtaagtgttggatgcatctcatccagagtcttatcttggcttttcattttgaaggatctatgatcagctgcttcaccgccatgtgactttatgaatagagacgtgttaaagcggggatggtattcacaacatttaacttatagggtccaagcactgaccaacctgaccattagaacagagtgtggtctctgtacagggcagatggcgctgagtgggtattctccacagaaagagaaacgaagacagtaccccactcctccaacccaccacccaccaccaatcccaccaccaattccaccaccaatcctgccacccaccaccaatctcaccaccaatcccaccaccaatcctaccacccaccatcaatctcagcaccaatcccaccaccaatcccaccaccaatcccaccacctaccccaccaccaatcccgccacccacgaccaatcccaccaccgatcccgccaccaatcccaccaccaatcccaccacctaccccaccaccaatcccgccacccacgaccaatcccaccaccgatcccgccaccaaccaccaatcccaccaccaatcccaccaccaatccctgatgtgttcttcaaagacttatttgtcaggcccatagaaatgttacttcttgctctttgattcataaatatactaagtcataataatttttaaaagtgagagtttcgtactctgtatatttcaatgtatataatttgatctatttcaatttattggtcaaatagtagacatgttaggtaagtcttaaaatactgaggctttggagttagacagaacatggcttaagtgacagctttgctgcttattagaggtgtggccctagaagatttgtaaatccctctgagctttatttgatctaaaatatgaatagtaatagtcccgaatttgtaacgttgttgggaagattaagtgacacatttaaaatgcttagtactgtgtgtagaacataaacacttcaaaaaatgtaaactgtgatttctatattcaataagaaatgtagaaatggacaaagcatataaaaagcaaaagaaatactagaagacacttgatttttctcaaaaataaacacaccaagtatttttgttttagtgaaattcatgcttacatgctgtatactaggattgaacatactgccaccaaaatatagcagtcggtggtacatgtgggtggagcaagacccctccaccttgtcatcgtgtgaaggggctctgccatacatgaccttgcatgtgactttaaggtggttggcctggaagaaaagtcccaagatgggaaatagtaggtgtcttttttactaaatgcactccaatttgggaccaaaaattttcattcttgaaggctcagtattgtgagtttataagagataatagacataaaagtgtaatgatttcattgcaaataaaaaaaggcccctttgcacctgatatctccatcatttttctagaattttgtgcacacatgccttgcactacttggtgatgataaagatttccagatctttgcacagaataaggctttgctttagatcagaattttggatgtacttagtatacattcatcttttaaataatctatttacattttcatactttccaaaatacagatatattttattttatttatatatttatttaatttattttttgagatggagtctctctctgttgcccagagtagagtgcagtggcacaatcttggttcactgcagcctctgcctcccgggttcaagcgattctcctgcctcagcctcctgagtagctgggattacaggcgcgcgccacacctggctaatttttgtatttttagtagagacgaggtttcatcatgttggtcaggctggtctcgaactcctggcctcaagggatccacccacctcggcctcccgaagtgctgggattacaggtgtgggccactgtgcccagctgtatagagatattttaaacaacactaaagtcctcctactttgactaattagaagagcattagaagatcagcctgacttcttgacagttctgaatttagtggagcaatgaggttcagctttggtgaatgagcttaatttttccatgataaactgctagtttcttcccactacagtgtctctcaaaaatgggacagcaacattctttttgttttcacttgcagtaagcatgatgcaattacataaatgtacacttttcaatttgttaaatagaatcttcagagattcactactgccgctattggtgatgaaaaattaccagaaggaggaattaggtaggagaaaatgtgtcctatgtatttccttcccagttctttgaaagagagtgataggaaaaaggaacactattgaaggaaggactgcccagtttcaaacaggtatttatttttctctcctaggcttcccctgcaggatgtttggcgcatctatagtggcattttaaatctgtcagacattacaaaagatacacctttctcacaaataaaagagattattattcaccaaaactataaagtctcagaagggaatcatgatatcgccttgataaaactccaggctcctttgaattacactggtatgtagcatatgtaagaaggtggagagcagaattgcgctggttgatattttcatatcagtttgaacaagagggcagacctagagagactgtcgtcgttttctgactggtggagttgagggaaacgtgagggttgctgggaagtgaagaccccgcgacttgccgtgaaatctcttctacttaaagagcaagacatgtgaattaattctttcagggagggatacaactgcatgcaggtgatggaaataatgggcgtgggaaatgtctgtgccgtctgagaggcactgggcttgctttgacaagagtagcagaactgtcattgctttgggcttagggatattcgaatgtgtgagggcaagtgggatcagatatctacttccaggtataatttgggtaggaaagagactcatgcagaaagaagccctggaaggccagagcatcgtggtcagaggtgttgcctttggagggtcattgctgccaggagccgaatacccactgtatccaataacattcatggtcaggaatggtggctcacacctgtaatcccaacactttgggatgcccaggtgggaggattgcttgaggccaggagtttgagaccagcctgggcaacacagtgagaccccgtctctacataaaattagaaaaaaacaattaactgggtgtggtggtgtgcacctgtagtcccagctagtcaagaggctgagacaagaggatctcttgagcccaggagctcaaggctgtagtgagccaagatcgtgccactgcacacaaacaattatgtgacctcgggcaagttgctttacctctttacacctcttaatttccttatctgtaaaatgaggatgataatttcttcctgggtctgttgtaataattaatacatcaaagcacttcatgtctggaacagtgaagataccctgctatgactattaaggatagtatacatggaataagacacaggaacttctaaatgcttttgaccatagatttaggttctgagttttaagaatttaactcaggaaattgtaacaccaaaaatgtcatgtgaaaaatggtggtgacaaattttcttgaatcattagccttagaggttgggcagaaagcaaaaaattattcttgatgctactctatagaaagagaagacagaaaaagagaaagatgtatttttaaagtctatatccataactttatttgaccaaactctaatttaaaaattatgtttcagaattccaaaaaccaatatgcctaccttccaaaggtgacacaagcacaatttataccaactgttgggtaaccggatggggcttctcgaaggagaaaggtaagcatgacgctttaaatattgcttctagagtaagtctcacatgttgaaatacatggagtgggtcgttttaatcggtttctgtctgaaattatatctaaactctttatctttcctatctatttattcccaaatatttattcagttattcttaaaaaatgtatttttgctttggcttgaaaaaaaattttagggagacttttaagcatcttacttcattataaagatcagttgcttgactttgcatgaagcagattgggcccttctagggctgacaagcccgtgcaagaccacccgctcctcagtgttagtagcgttcccgtctcccaaaaccatgttctcccttgatgctaatggccgggagcacaggcaggtgtgtcgtctcactatggagaataatatttgtgtcattctttacagaagaaggtagcttgccaaactgtctccatctttcccgattcagtcttttgttcaagtaattcacatttttagattttttattggtaatctgagacaagaagaaatttaaagtaatcttcactaagccatgaaagctcccaacattgttctccatgagagatgctggcctgcatttattcaaaaacaaaagacccctctgttgccaaagctcggagggcttttcagaaacgatatagttgtaaattataattttgaatatataaagcaaaaaaatgaaaagtgagaacttccaggctttggattgttgtaggtgataaatataaaatgggatttctggggggctgctactgagatgaggggatggcagaaaacatggaagcaaggtctctggtcagcccagggtgctgggcttgtcccaacaccacgtaggcaataagaggacagtacagggtgccgtctctctccctcttcctctctctgtctctctctctctgtgtgtgtgtgtgtgtgtgtgtgtaacactaccttcccaatttttactgtctatttgtattcaaagataaggtccttatgaaaaatacactgctctgattcactttaaaacttatttccatatttattatttattgtgggaataataatattcccaatattattatttattatttaagttattattattaacttccctctgaggttatatattggttactcacaggtgaaatccaaaatattctacaaaaggtaaatattcctttggtaacaaatgaagaatgccagaaaagatatcaagattataaaataacccaacggatggtctgtgctggctataaagaagggggaaaagatgcttgtaaggtaactcatgagattatgaaaaacacaataggctgcttgagaaaattcatttcaaaatatattttccaatagcataattcaatcatagtttttaaaaaaattcagagacaaatgatctgataaattgataagcaacttttaacaaattgaatatacataatatatatttatattatttatgatatatgtcacaatctatgcatgtgctatttaagaggggcaaatatacatgcaataattgtgctagaatataaaaacattagacttcatcattgggatgatgatatcaagatttctttgttagatttatttcagatagaaaaggggatacgaaaaatgcaggcacatgagatacttggagaactttaagaaagagtgagtgtgtgtgtgtgtgtgtgtgtgtgtgtgtgtgtgtctggcaagcaaggtcttgcacacacacagcactttgggaggccaatgcaggtggatcacttgagcctaggaatttgagaccagtctgggcaatgtgatgaaacccatctctacaaaaaaatatgaaagtatctgtgtgtgtgtgttgctgtgtagtggactacagaactttagaggcagtcacttatttgaatcccattgtcgtaactttctactattttatttttccactgtgactcagggagattcaggtggtcccttagtttgcaaacacaatggaatgtggcgtttggtgggcatcaccagctggggtgaaggctgtgcccgcagggagcaacctggtgtctacaccaaagtcgctgagtacatggactggattttagagaaaacacagagcagtgatggaaaagctcagatgcagtcaccagcatgagaagcagtccagagtctaggcaatttttacaacctgagttcaagtcaaattctgagcctggggggtcctcatctgcaaagcatggagagtggcatcttctttgcatcctaaggacgaaaaacacagtgcactcagagctgctgaggacaatgtctggctgaagcccgctttcagcacgccgtaaccaggggctgacaatgcgaggtcgcaactgagatctccatgactgtgtgttgtgaaataaaatggtgaaagatca

SEQ ID NO: 1208 - DNA, 49553 bp, Homo sapiens
cacaggggtgcctgggagggggctcgcgcgccgcggagccggcgagaaggtggtgccccggagactccgggcactggggagcccagaggtaggccgaacaccgcgggaggtccccagggggccggcccggagacagagccccagatgccccgggcgccccgggccgggcagctggccgagggcgtgtgtaagtgggtttcgagaggtgacagctcgcgcccctttccccaccccgtccactcacctgggctcgccgcgcccggccgcccggcaggcagccccaggccccggccgctccgtcccgccgccggccgcagcgctgctccggcgcctccttttgtttgtccctcactgcaccactcagcctcctccgccccggaagtgacgtcaccgccgggcgcgaacgcggcggccagggcgtcgccatctttatgaggagaattctagcggcgctttctcccgctctcgcctccgcgctagcgccctgctgcttcggggcggaagtagcggagccgggctcggcccccttaaagggacagggactgctgcaacctacggggtgtacttgggaacgaggggtgaagcggcccaggtgagggtgagtagctgtgtcggagcgccacttccccaaggtcaggtgccgaggctgggagggtcggctaacggttccgagcttggttgtgctagagtgcttaatgagtttgatgctactaagtataacggagtggctgcacagaatgattgagccgcccgcgggaatcaactgcgcgtgctgctcgctgattctcgctcggacactggggctggtcctgtctgcacccaaatccccctcccacgaccgcgccggtggagatgatacccgagacaacagaattctggacagatctggggttggaattgggtccccagactccaactctgcagctccataaatcccgctgggtcctcgcaaattccctggctgataacagtaccggcaaccaaattaaaaaataatccatacagtggaatactgtgcagccattaagacgaacaatgtttaatatgcactaatgtagggtgacttctaagataccttaggttaaaaaaggaaacaacagtaaaaacagcgttgggccggttgcggtggctcacgtctgtaatcccagcactttgggaggccgaggcgggcggatcacgaggtcaggagatcgagaccatcctggctaacttggtgaaacctcatctctactaaaaatacaaaaaaatcagccgggcgtggtggtgggcgcctgtagtcccagctactctggaggctgaggcaggagaatggcatgaactcgggaggtggagcttgcagtgagccgagatcgcgccgctgcactccagcctgggcgacagagcgagactccgtctaaaaaaagaaaaaacagcgttgatgggtgctatccatctttgcgtagaaggacgcctgagggtgggcgtatctgcgggtgtgcgcgccagctgtctgataagatgcacaagaagttgttaattgcggttgtctccgacagaattggggtcttgggtacctgggccagggcgagaaatttactaccatgtgcacagatagataattaaaaataagatgatgaagatagtcgtggctcccatccatcacgtgttaagccaatgcctagtttcacttctgttgggaggtcttatttttcccttttaatagaagagaaaagaaccttagagaggttaggaaacttagcaatatcatagccagggccgggcgcggtggttcacacctgtaatcccagcactttgggaggctgaggcgggcggatcacgaggtcagtagatcgagaccatcctggctaacacggtgaaaccccgtctctactaaaaatacaaaaaaattagccgggtgtggtggcgagcgcctgtggtcccagctactcgggaggctgaggcaggagaatggcatgaacctgggaggcagagcttgcagtgagctgagattgggccactgcacttcagcctgggcaacagagcaagactccgtctaaaaaaaaaaaaaaatcatagccaggaagtggagaagctggaatttgaaccctgggagatttacactaatgcccatgatctagcttatccctcgccactgagatgctttttctgttgtcagtcacgcaacacccgtcttggggcctggcacacaacaggcatccagtaactatttattgacatgatgtgtggtgtgaaaagcaaacgttgaaggtcagagcccaggcttaaagtccagggcttgggcacctctttccaacctgtggactgtgggcctgccaggtactccgtgggcctccatgtccccgcctgtaaaatgaacaaccagaaccacagttgtagacagtgaatgttcccacgtattatactttgtattttacacgcagataagtctcattttacagataagtgaggcacagagagattaagaaagttgccagaagggggttcctacaggtctccctccctccctaggaaggctgctgggctcccaggcctctcccttagcttcccaggatcatctgtgctaatgcctgggggacctactctgtgctgggtgagctgccagaggctgaggatctggtggagaacaggtcaagcacatagttcctgtccttggagttgagcgcccccgtgctgagtactttgagggcggaagcccaggtcttgggaccacctgggaggggacatgtggcttagcctgggtggagtcagaaggggcttctccaaggaagggactttcaatgtgactggaaactaggatgtccagaaggagaaatgatgaggctggagactcaaggagagatgggctcctaccctggacttggccttggtgtccactaagaaactgagggtgaccaacaggattggagaatatacaagttagacccattcagtctggcttcagcaggaatctttcctcccggagaatgcctccattaggtgccaaccaccagaacgccacactaacctctccaagctccaaagagtagggcgcctgattttataatccaggtgggggcgataaaggaatgcaggagccttcacagccatgaggcagtcactgtaactcctgccagaacagacctggggccacatcccactcctggatggcactgccagttccctgcataattcctttttttttttttgagacggagtctcactctgtcgcccaggctggagtgcagtggtgcaatctcggctcactgcaagctccacctcccgggttcactccattctcctgcctcagcctcccaagtagctgggactacaggcacccgccaccacgcctggctaattttttgtatttttagtagagacggggtttcaccgtgttagccaggatggtctctatctcctgaccttgtgatccgcccacctcggcctcccaaagtgctgggattacaggcgtgagccaccgcgcccggcctcccggcataatttttaaaatgctcatcctatgccctcattccccagcttgcagctgggggcctcctggtgcttttctgggacttcgagtaagtcatttcccctctctaagcctcagtttccccacctgtaaagctgatgccacctcctccaaggctcccgcgaggctatctgcctatctgttgtgtgttcctttaatgtatgggagtgagattgtggtttttgaatctgggtcctgtgccaggaggaataagtggtgagatacctactgtttgtgtcactcaggtcttccaccaacccctccagcctgtaaacctgccgtctggactccagaagtcatttctctctcctctgccaattcctaagcccagggggactgtgtctgagtgacgcaattgttagatctcctcagacaggctgttctctccaggaaaacattggctcaacaaattgtcaccaaacatttgtcttcagggaattctgttttttttctatcaaaaaaaatttggattcattatataataagagatttttcattttgcttggttactaattttatggaaagcctggtaggtttaaatgttaatagcttgttgactgggtgtggtggttcatgcctataatcccagtaatttggaaggctgaggtgggactatcgcttgagctcaggagttcgagaccaacctgggcaacgtggtaaaaccccatctctatcaaaaatacaaaaattagctgggtgtggtggcacgtgcctgtggtcccagctactctggaggctgaggtacaagaatcgcttgaaactgggaggcagaggttgcagtgagccgagattgtgccactgcactccagcctgggcgatagagcaagactgtctcaaaaaaaaaaaaaagttaatagcttgttgtcattgacaagtggctgtgagccaggacccacagtatattctctgtggattcttgtcaccttcattgtacagatgaggaagctgagcccccaagaggctgcggcctggcatgaccaaggtcccatagctagtttatggtggagctgggactatttgatccaagtccaaggtttggtcttctgtggttattcatgcactagactggtcttcctgggcatggtatccccagttctgtaccctttctctagaggtgccacgatgtgtgttgtctcagtaactgggagtctcctggcattttaagcccagggatgctaaacatccttcaaggctccagatagctctccccagtgaagaactgactcatctcaaattctaagtgtgcccctattgagaagctccaaaaccgaatgtcataattgacttgagtgatgtgacgtggggccaccctgggaaggcatggtcacctcgcctgcccttgtaagcagccatgcaaggtgaagttggacaagacatggctcctgtccccaaggggctggtggtctcctgtcagccctagcacccgcctgagaggagatttcacgggacagaatttggactttggaaataggcaaaccagggtttgaatcacagctggagctctctaggctgagtgagttttccttgttctccttttgagcaaaatagagtaaataataccatcctaatcagctgtgatgaggattagagaatttagcatggggttgggggagagggtcaggcacaggtaggtgctttctgagttcagcaaagggcctgggtggacacagaagcttcagagaggaggtacaggtggggctaggccctgctagggattttggattggagggtatgccaggcaggggaaacagcttgagtgaagatgggcaacatttattcaaaagcaaagggtggctgggcacagtggttcacacctgtaattccagcaatttgggaggtcaaggcaggcagatcaccagaggccagaagttcaagaccagcctggccaacatggtgaaaccccatctctacaaaaatacaaaaattagccgagcatgatggtgggtgcctgtaatcccagctactcgggaggctgaggtgggagaatcacttgaacccgggaggcagaggttgcagtgagccgagatcgtgccattacactccagcctgggtgaaagagtgagactccatctcaaaaaaataaaaataaaaataaattagctgggcgtggtggcgtgcacctgtaatcccggctacttgggaggctgaggcaggagaatcacttgaacccggcaggtgggggttgcagtgagccaagattgtgccactgcactccagcctgggtgacagagtgaagagagaggctctatctcaagaaaaaaaaaaaaaaaaggccgggtgccgtggctcatgcctgtaatctcagcactttgggaggccgaggcaggcggatcacgaggtcaggagattgagaccatcctggctaacatggtgaaaccctgtctctactaaaaatacaaaaaaaattagcagggcgtggtggcgggcgcctgtagtcccagctactcgggaggctgaggcaggagagtggcgtgaacccgggaggtggagcttccagttagctgagatcacgccactgcactccagcctgggcgacagagccagactctgtctcaaaaacagaaaaaaaaaaaaaaaaaagaacaaaggatgactgggtgtggtgtctcatgcctataatccaagctgtaatcccaggactttaggaggccaagaccagaggatcacttgagcccaggagttcaagaccagcctgggtaacatagggagaccctgtctctatttttttttttttttaaaagcaaagaatttgagctgggggttggggcatgcacttatagtcccagatactcaggcggctgaggcaggaggatcacttgagctcaggagttcaaggctcctaggtgacaaagcgagaccctatctctaaaataaaaaaagagtaaagggagggaaggtggaggctgccaagcctggattccagccggctccaaacgccaggctgaggaggctttggactttgtccagtgtcaccacaggcttctgggcagagctggtccaatgggggttgggggacagtggcatagctgacatcagcccctgggttattgacatcagcccctggaatgcatcagtgatgcattccacgggcccaggggtcatccactgccttcgggtcaagcaaatggccagtagctgcccaggctgatagaggtgtgtgttggaggggggcacaggccactggccctcggcccctggcctggcagcagggaggcctcagatcttagatgcctgagagctaccccagaagggtcctcggcacagctatggtccccatgcctagtggtgctgggcctcctcggtgctgccagatcacctgagctgcctccattgcagcagttatcccacacatttttttttttttttgaagcggagtcttgctctgtcacctggacagctgtcaggctggagtgcagtggctcaatcttggctcacttcaacctctgcctctcaggttcaagtgattctcctgcctcagcctcccgagtagctgggactacaggtgcccaccaccacacccggctaatttttgtatttttgtagagacgcggtttcaccatgttggccaggctggtctcgaactcctgacctcaagtgatctgtctgcctcggcctcccaaagtgctgggattacaggcgtgagccaccacgccagtgagccaaggtcacacagctgcactccggcctgggcgacacagcaggactccatctcaaaaacaaaaaccaaaaaaaaaaaaaaaacaaaaaaaaacaaattgaacataaatggaataatggaagaaatagctagctgtggggatggcaactctgcagctgttcacagtttgggaaacctgagatctgcatccagagaaacttcttgaaggcaaacttatcaacataaatgaggaaagtggttctaaagaaaaagataatgacccagaggaaataataccagcaaaacttcacattaaaggaactccctgggctgagcgcagtggctcacgcctgtaatcccagcactttgggaggccgaggtgggcagatcacttgaggtcaggagttcgagaccagcctggccaacatggtgaaaccccatccctactaaaaatacaaaaataagtcgggcatggtggtgcgtgcctgtaatcccagctactcaggaggctgaggcaggagaatcgtttgaacctgggaggcagagattggagtgagccgagatcacgccactgcactccagcctgagtgacagagcgagactccgtctcaaaaaaaaaaaaaaaaaaaaggcaggattatctcaccacaaaatgtacagaacaggaactcccagagatatttcacaacattgaaaacaaaggatgactaaggatgactcgtattcatcaagacatagaagatgtcaggtgcagtggcttacacctgtaatcccagcactttgggaggctaaggcaggatgattgcttgatgccaggagttcaacatcagcctaagcaacatagtaaaacccccatctttacaaaaaaaaaaaaatagctgagcatggtggttcgtgcttattgtctcagcaactcaggagaatgaggtgggaggatttcctgagcccggtaggttgaggctgcagtgagccgagatcacaccactgcactccagccttggcaacaaacatagaagaaatgctcattctgtatcctaaattaaaccactggaagactgcagcactgttcagttcagaatattctttttttttttttggaatgaagtttcatttttgttgcccaggctggagcgcagtggcgtgatctcggctcactgcaacctctgcctcctgggttcaagcgattctcccgtctcagcctcctgagtagctgggatcacaggcgcccgccaccacgcctggctaatttttgtgtatttaatagagacggggtttcaccatgttgaccaggctggtcttgaacttctgacctcaggtgatccacccgcctcggcttcccaaagtgctggggttacaggtgtgaaccaccacgcccggcctcagaatattctttttttttttttttttgagacggagatttgctctgtcacccgggctggagtgcagtggtgcaatctctgctcactgcaacctctgcctcccaggttgaagcgattctcctgcctcagccttccgtgtagctgggattacaggtgtgcatcaccatgcccggctaattttttgtatttgtatttaattttttttttctttttgagatggagtctcgctctgtggagtgcagtgccgctcactgcaacctctatctctcgggttcaagcgattctcctgcctcagcctcccaagtagctgggatgggattacaggcacctgccactacacccagctaattttttttgtaattttagtagagacgggatttcaccatgttggccagcctggtctcaaactcctgacctcaaatgatctgcctgcctaccggcctcccaaagtgctgggattacaggagtgagccatcgcgcctggcccaagctatttgcaataaaattttttccttgataaacttttataacgaaagaaaacgtcttaattttcagtgttgctaatattaaattacagtgtactaagttcttattagttttttttttttttcattttctatacttttttatttttaaatgacagagtctcactttgttgcccaggctagtctccaattcccgggctccagtcatcctcttgccttggcctcccaaagtcctgggactacaggcatgagccaccacacctgggctacatttttaacagatggtaagagagttttaaaaggtcacagaacaattgtcttattaattattattatccaataataattttctcgattattaagttctctttgcacaatttaagtttacatggtcttttttttttttttttttttaaatggagtctcactctgtcacccaggctggagtgcagtagtgcgatcctggctcactagaatctttgcctcccgggttcaagcaattctcctgcctcagcctccgaagtagctgcgattacaggcacatgccaccatgcccggctaattttttttgtattttcagtagggacggggtttcatcatgttgaccaggctggtttcaaactcctgacctcaagtgatctgcctgcctcggcctcccaaagttctaggattacaggcctgagccaccacgtctggccaacatggtctttttttttcttttgagacggagtctcgctctgtcacccaggctagagtgcaaacggtgcgatcttggctcactgcaacctccgcctcccgagttcaagctggtctcctgtctcagcctcccgagtagccgggattacaggtgagtgccaccattcctagctactttttgtattttattagagacgggctttcaccatgttagccaggctggtctcgaactcctgacctcaggtgatccgcccacctcggcctcccaaagtgctgggattacaggcatgagccactgcgcctggcctcaacatggtctttttctgttttgctttgttttgttttttttgagtcggagtctcgctctgtcacccaggctggagtgcagtggcacaatcttggctcactgcagtctccacctcccaggttcatgccattctcctgcctcagcctcccgagtagctgggactacaggtgcacgccaccacgcctggctaattttttgtatttttagtagagacagggtttcaccgtgttagccaggatggtctcaatctcctgacctcgtgatccacccacctcagcctcccaaagtgctgggattacaggtgtgagccaccatgcccagccaattcaacatggtcttttttttttttttttttttgagacagagtttcgctcttgttgcccaggctgccgtgcagtggcacgatctcagctcactgcaacctccgcctcccagttcaagtgattctcctgccccagcctccggagtagctgggactacaggcgtgtgccactatgcccagctaatttttgtattttttttagtagagacaggctttcaccatgttggccaggatggtcttgatctcttgacctcatgatccacccgcctcagcctcccaaagtgctgggattacaggcatgagccaccacgcccagccaacatggtcatttttataatgccacactactgtggaaagtaaagactacctgaatatgtatgtgtatgtgtatatgtatatatatgtatgcatcctcacatatgtatctccacaattgattttgtttattttttgagacaggatctcactctgtcacccaggctggaatgcagtgctgtgattatggctcactgctgcctcgactgcctgggctcaagcaatactcccagctgagcctcctgagtagctgggaccacaggcatgcaccaccacacccagctaatttttaaaaaattatttgtagagacaaggtcttgttatgttgcccaggctggtctggaaatcctgagctccagtcctcctgcctcggcctctcaaagtgctgatattacaggtgtgagccacctttccaggtgtgagccaccacatccagctttctctacaattaaaaaaaatgcaaatagagttatattgttcttcaacctgccctttttgtttgtttttgtttgttttgttttgttttgttttaagacaaggtctcactctgtctcccaagctggagtacagtggcacaatcttggctcactgcagcctcaaccttctgggctcaagcaatcctcccacttcagcttcccgagtagctgggactacagacacgtaccaccgtggccagctaattttttgcattttttgtagagatgggatttcaccatgttgcccaggctgatctcgaactcctgagctcaagcaatctacccgcctttgcctcctgaagtgctgagattacaggtgtgagtcaccgcggccagcctgtctctacaatttaaaaaatgtaaatgggttatattgttcttcaacccttttaaaaaattaccatacttttttttttttttttgtaattgaggtgaaattcacctaacatacaagtaactattttaaggtatacaattcagtggcatttagtgcattcacaatgttgtacaaacattatgtcactgtagtttcaaaactttatcgttcccttaggaaaacactccgtacccatcaaatagtcactccccattacctcctccctgtcctctggttaccactcatctgctttctgtctctatagacttgttattctgaatatttcacagaaaaggaatcatagctatgtgaccttttttgtccggcttctttcacttagtgtgttttgtttgtttgtttgtgacagggtcttgctctgttgtccagactggagtgcagtgtcatgacctcagctcactgcaatctccacttcccaggctcaagcgatcctcccacctcagccatcttattatctgggactacaggcacacaccaccatgcctggctgatttttgtattttttgtagaaacaaggttttgccgtgtttcccaggctggtgtcaaacaatgatcctcccacgtcagccttccaaagtgcagagattatagtcatcagccatgtcgccctggcctcacttaatatatttttgaggttcatctaagttacagcatgtgtcagcacatatttcattccattttgtggctgaataatattccatggtacagatatgttacaatttatccattcatccattgatggacaatttgggtttttttcacctgttggctatgatgaatactgttgatataaacatttgtgtacatgtttctgtgtggacatatgttttcagttcttttgggtatatacctaggagtgaaattgctaggttgtaaggtacttctatatttggacttcataaaaattaaaaagttttgtgtaccaaagaacattatctgccgggcccgggtaattgcagcactttgggaggctgaggcggggggatcacctgaggtcaggatttcaagaccagcctggccaacatggcgaaaccctgtctccactaaaaatacaaaaattagctgggcgtagtggcgaacacctgtagtcccagctactcgggaggctgaggcaggagaatcgcttgaacccaggaggcagaggttgcagtgagctaagatcacgcctctgcactctagcctgggcaacagagtgagactctgtctcaaaaaaaaaaaaaaagtacattatcaagaatgtgatcaggctgggcacaatggctcacacctgtaatccaagcactttggaaggccgaaacgggaggattgctagaggccaggagttaaagcccagcctgggcaacgtggtgagaccccatctctgcaataaaaattttcgaagttgttggtttattttgagttaatttttgtagatggaacgaggtgaaactcctgcttcattcttttatatgtaaatatccagttgtcccagcaccctttgttgaagagactattctttcctctattaaatgggcttggtgccgggtacggtggctcacgccagtaatcccagcactttgggaggccgaggcgggcagatcatgaggtcaggagatcaagaccaccctggctaacacggtgaaaccccgtctctactaaaaatacaaaaaattagccgggcgtggtggctcgcgcctgtagtcccagctatgcaggaggctgaggcaggagaatggtgtgaacccgggaggcagagcttgcagtgagccgagattgtgccattgcactccagcctaggcaacagagcgagactccatctcaaaaaaaaacaggcttggtgcccttgtcaaaaatcaataaggccaggcgcagtggctcccacctgtaatcccagcactttgggaggccaaggcctttgtattgcgtgagtccagaaatttgagaccagcctgggcaacatagtgagacccccgtctctacaaaaaattaaaaaattggccaggcacagtggctcacacctgtaatcctaacactttgggaggccaaggtgggcagatcatgaggtcaggagatcgagaccatcctggccaacatggtgaaaccccgtctctactaaaaatacaaaacttagctgggcatggtggtgtgcgcctatagtcccagctactcaggaggctgaggcaggagaatcgcttgaatcccagaggcagaggttgtagtgagccaagatcgtgccacagcactctagcctggcaacagagcaagactccatctcaaaaaaaaaaaaaaaaaaaaattagccaggcatggtggcatgtgcctgtagtcccagctactcaggaaattgaggcaggaagattgcttgactctatgagaacaaggctgtagtgagccgtgatcgcaccactgcactccatcctgggtgacagagcgagaccctgtctcaaaaaaaaggaaaaaaagaaaaaaatgtccagctacttgggagactgaggtgagagaatcacctgagctcaggatgtcgaggctacagtgaaccgtgattgcacacaccactgttctccagcctgggctacagaatgagaccctgtctcaccaaagaaaaaaaggaaaaaaaaatcagtgggccaggctgggcatgatggctcacgcctgtaatcacagcactttgggaggccgaggtgggtggatcacctatagttccagctactcaggaggctgaggcacaagaatcggcagaggctgcagtgaatcaagatcgtgccattgcactgcagcctgggcaacagagtgagactctgactcaaaaaaaaaaaaattagtgggccatagatgtttgggtttattactgggctctcaattttattccatgggtctatgtctgtctttatggtaataccacactattctaattataagctttgcagggccaagcgcagtggctcacgcctgtaatcccagtactttgggaggccaaggcgggtggctcacgaggtcaggagatcgagaccatcctggctaacatggtgaaaccccgtctctactaaaaatacaaaaaaattagctgggcgtggtggtgggcacctgtagtcccagctactcaggaggctgaggcaggagaatggcgtgaacccgggaggcagagcttgcagtgagccaagatcgcgccactgcactccagcctgggcgacagagcgagactccgtctcaaacaaacaaacaaaaaaacctttgcaataagttttgaaatcaacctgcatttttcacataacctgaatatctttccacgtcagactgctaaaagcaatcttattccttttagtggttgcacaatggttcattctatggttaaaccacgcagtgatacagtgatattgtgatacagcgatactgaactagccccaggttgatggatatcagattgcctccagtttttttctctcatgctgagtgctgcgttaatcatccaagtgtatatttttgtatatacgtgtgaatattcctgtaagatcagcttttagggctgggtgcactggctcacacctgtaatcccagcactttgagaggtcaaggtaggagaactgcttgagcccagcagtacaagaccagcctgggcaatgtagtcagaccttgtctctactaaaaataaaaagttagcccagcatggtggcgtgcacatgtggtcccagctacttgggaagctgaggtgggaggatggcttgagccccagaggtgtaagctgcaatgagccataattgtgccactgcactccagactgagtgacagagcaagaccctgtctcaaaacaaacaaacaaaaaacttttaggagaggaagtgttgagtcaaagagtggtatgtgttattattaaattgccctccaaaacttacaccagtgaacactcttaacctagtgcttgcttttcaaatcacaaattctcaccttttagtacattgtaggatcagtttggtgggtctcaagtttgtcttggcccatctgagaggcaaaaaatagtacttcgctttcatttacgtatcactaattatgactaattttcagcatcctttcaaggttattgacttttttttttttttgagacagagtctcgctctgtcacccagactggagtgcagtggcacgatctcagttcaccacaacctccgcctcctgggctcaagcgattctcctgcctcagcctcccaagcagctgggattacaggcgcacatcacggctaatattttttatatttttagtagagacagggtttcaccatgttggccaggctggttttgaacacctggcctcaagtgatctgcccgccttagcctcctaaagtgctgggattacaggcatgagccactgcgcccggcgactattttcttttcttttcttttctttttgagacagagtctcgctctgttgcccaggctggagtgcaatggcacgatctcagctcactgcaacctccacttcccaggttcaagtgattatctcacctcagcttcccgagtagctgggattacaggtgcctgccaccacacccggctaatttttgtattttagtagagacagggtttcaccatgttggccaggctggtctcaaactcctgacctcaggtgatccgcctgcctcagcctcccaaagtgctgggattacaggcgtgagccaccacacccagcgactatttgcttttgtgaatttcccatttatatctttttcacactttttcttattgagatgctggtcttttgttgtcgatttatacaaatatttgcatattaaggctcatattatattaaaatggcccagttacttgtttgtctccttgattagattgtgcgctccttggaggaaaggaaggtatcctatcacccttgtatacatggtggctagcttagggaatgaatagcacataataggaattcactgaggagatgtacacttaccatatggcaggctctgtgcaagatgttgagaataaaaagatgaacagaagagaatctttgttctaacaaagcttacagtctggtgcaagcgatagacattcattctcattctgcaggtttattgagcagctgctctgtgccaggtgcataacgcccattggaagagccagcctattaggatgagaaaaatgtcaggactgggacttcgctaacctggtcctgggaaatctgggtgggtcagttccccatccctggttatcagtatccccatcaataaaatgtgagccactggaccaaattctctcatttcccattgagcatccatgcatctgtgctgctttggcttttggaaagtaggagtcagagtcctgagttcaaatattggctctgtgctgggtgtggtggctcacgcctgtaatcacagcactttgggaagccgaggtgggtggatcacctgacgtcaggagtttgagaccagcctggacaacgtagtgaaaccccacctctactaaaaatacaaaattagcctggtgtggtggtgcatgcctgtaatcccagctacttgggaggctgaggcacgagaatcgcttgaacccgggaggcagaggttgcagtgagccaagatcgcaccattgcactccagcctgggcaacaagagcgaaactctgtctcaaaaaaaaaaaaaaaaaaaatatatatatatatatatatatatatatatatatatatatatatatatatatgtaggctctgctacttgttagctgtggccttgggtgtgtgacttagcctttttttttttttttggtgtgggagggatgtggggagggacatggtcttgctttgtcactcaggctgcagtgcagtagtgcaattatggctcacttcagccccaacctccaggctcaagtgatcctcccacctcagcctcccgagtagctgggactacagacgtgcaccaccactcccagataatttattattttttgtagagattgagtctcactacgttgcccaggctggtctcgaactcctgggctcaagggatcctcctgccttggcctctcttgcaggcataagccactgtacctgaccacttagcctcttgaaggaatctttcttataggattaaaagtgatgggaagccaggagcagtgactcacacctctaatcccagcactttgggaggcctaggcaggcggatcacttgaggtcaggagttctagaccagcctggtcaacatggtgaaaccctgtctctactaaaaatacaaagattagctggacatggtggtgcacaactgtagtcccagctactcgggaggctgaggcacaagaatcacttgaacatgggaggcggaggttgcagagagctgagatcgcgctgctgcacttcagcctgggcgacagagcacgactttgtcccccaaaaaataagtaaataaataataaaagtgatgggacctgatttcaagtagtcaaaatcgcagagacagcaaatgggctgggctatgggccagagggtaaagggatgtaattgtttaatgggtacagagttgtcagttttacaagatgaaaacagttcccaaaactgtatacctgtacatagttaagatggtaaagtttatgatatgtgtattttaccaaaattttttaaatgaaaaactttttttttttttttttttttgagacagagtctcgctctgtcgcccaggctggagtgcaatggcgcaatctcggctcactacaatcttcgcctcccgggttcacaacattctcctgcctcagccttccaagcagctgggactataggcacccgccaccatgcctggctaatttttttttcgtatttttagtagagacggggtttcactgtgttagccaggacagtctcgatctcctgacattgtgatccacctgcctcggcctcccaaagtgctgggattacaggtgtgagccaccgcgcccggcctgaaaaacatttttaagtggtgggacgtgtagggctccacggggcacctagcacaggaaagcgtgtggtaaataaaaggtgactgccagggctgttgaggagctgactagggaaggcctgcttcctagaaaaggggtgaggcgcagggcattggagggaggtgtgcctgggaggtcaggagtcctgccttatgcgggaacctggagcagcaccctccctgctttgggcctcctctgtgaagtgaggcgtagtcccctcctggggccagcaggttgctctgtgacctgggccagcaacctcaaagccacgaggggcctggctccttgcgccccctgctggccgactcgggaataacacacccacaagcccccaagttgctcccaaccaacctggccaagttgctgggttaaggcagcctacgtgccccctgtacccttctgctcttggctgagaaccccttatggcttctccctccctccctccctcctaagttcctggaacctaccttcaccacacccataagctcacagacacagacacagagatgtgtgcacatgctcaggtgcaagctcttgtatttggatccttttgttgttttggtttttttttttgtagagaaagggtgttgttatgttgcccaggctagtcttgaacttctgagctcaagcgatctgcccacctcagcctcccaaaatgctgggattacaggtgtgagccaccatgcccagcctccatgaattattattatttatttcatgcatagaaaattgatgttcagagaggtaaaatggcttgcctcatgtcacactgccaaggtcatcaaagcctgtgttctaatccttcccccgtctctcagcactgccctcctccttgtgtgtctacttggggcctgatcctgggtgtggtaatagaacagacctaccctgtggagggtgcaacataacattcacttctggccgggcatggtggctcatgcctgtaatctcagcactttgggaggccgaggcgggcggatcatgaggtcaggagttcaagaccatcctggccaacatggtgaaaccccatctctactaaagacacacaaaaaaattagccgggcatggtagcgcgcgtctgtaatcccagccactcgggaggctgaggcatgagaatcacttgaacctgggaggcggaggttgcagggagccgagatcatgccattgcactccatcctgggtgataaaaagatagggcgagactctgtgtcaaaaaacaaacaaaccaacattgactcctatgcccagtcttacccggccacacataggcccgatgcactgccagtcccctgcaatggaagccgatcctggtttccagccccacccccaaggctgcaagattgtttaagcatatccgtgtgcagcacaggtgccacccagcttcttgacccccatggagccagtgatctggacacacagaaggcaccgcctttcctgagaactggcagtgcccagagaaggcaaggggccaaggctggggcagggcagagaagagggccacagctgggatctgtttctcctgagtttctgccctgtgctggcaccaggtgtacaatctgctataaggcctgcaggagctcaatgtaagtgttgttattttagtatgttaggaatttcctcacctgttaatgagggtgaggatagcacttgctttacagagttgttgaaaggatccagtgacaaaagtattgggacagagtgagtcctagtaaattaaagctggttgtattattaatattattcttggccaagtacagtggctcacatttgtaatcccagcactgggacgctgcggcaggaggatgccttgagcccaggagtttgagacaagcctgggcaacacagtgagaccacatctctacaaaaaatacaaaaattagctcaattcacttgagatgatgaagacatgacttagaatgttgtcacttcaggaaaaaaagactgatttgatggacacagagtccgatgtgggggagagtgtcagagagagaattgacctaccaggcaactgtgggtttttaactcagtggtcagaaagcagtagagtgggtcccggtagggtgaaatccagctcctcctgtagtcctagaagaagtagcaagatgttgggtctaggacaggaaatggctaacctaaagagaccctttggcccaggatggttcccatcccaagacacccctcagtcctgggccagcagatagttggtcttcatagaacaggcagagggcacagagtgcctcccatgaccagccctgggcttgggcctgcccttgggccgctcatccgtttagctgagttacctgagctaaagcaccagactccctcccttgaggtgacaccaaggaatgtccctcctgggatggcagtaacactaccctttgttgctcaaggcacaggtacttagtttcaggggtcagagtacatacttcaggcctctcctgggaaccgctctcaaatctaaggaacgagagggtgagctctggcatcgccttgtgtgttagcccattctcccactgctataaagaactgcgcaagactgggtcatttataaaggaaagagatttaattgactcacagttcctcatggctggggaggcctcaggaaacttaaaatcatggcagaaggggaagcaaacacgttcttcacatggcggcaggagagagaactgctgagcaaagggggaaaagctctttataaaaccatcagctctcatgagaactcactcattatcgccagcacagcagcatgggggtaactgcccccatgattcaattacctcccactgggtccctcccaggacacgtgggaattatgagaactgcaattcaagatgagatttgggtggggacacagctcaaccccatcaccttggatttgattcctaaggctgttgtaacaaactagccacacttcattgtattgcgtttggcagatatcacggtctttgcaaattgaagctttgtgagaaccttgcaccaagcaagtctattgttcccattgttccaacagaatgtgttcccttagggtctgtgtgtaattcccacaatagttcaaactttatcattattattatgtctgacacggtgatctgtgatcagtgatctttgatattactattgtgcttgttttggggaaccacaaaccatgcccatataagatggtaaacttaataaatgcgtgtgggccggaggcagtggctcacaactgtaatcccagcactttgggaggccgaggtgggcagatcacctaaggtcaggagttcgagaccagtctgaccaacatagtgaaaccccatctctactaaaaatacaaaaattagccaggcatggtggaatgcgactgtaatcccagttacttaggctgaggcaggagaatcgcttgaacccaggaggcggagcttgcagtgagccgagattgcgcaactgcactccaccctgggcgacaaagcaagactccgtttcaaaaaaaaaaaaaaaaggctgaacaaactgaaaaaccagcggctctttttcagttcatcagaaaattaggtcacagggtaacctgctgcccccaaactggagaggcagaaaggtagatacagagaatcatgatttgccagagcagaaaccttccctggaatcagcacctgggtgggaaaacctgaactgcaactgacgaatgtctggcagcgtggatgtgtgctgctggttaatgttaggtggcagctggactggagtaaggaatacctagagaatggtgaaacatgacttctgggtgtgtctgtgagggtgtttccagaggagattggcgtgggagtcagtggactgagtggggaagatccgctctcaatgtgggtggcagtatgcaattggttcacggcttgaataaaaacaaaagaggagaaaattttcctctttctgtctctgtctctcctggagctggaagattctccttctcctgccctttggatatcaaaactctaggctcttcagccttggactgagaattatcccagtggcgtccctggttctgaggcttgcagacttggactgagccacgctactggcacctcttgcaaatagtctctcaggggacttctcagcctccattaattgcgtgagtcaatttccctataaatcccctctcatgcactttgggaggccgaggcgggtgggtcacgaggtcaggagatcgagatcatcctggctaacacggtgaaaccctgtctctactaaaaatacaaaaaattagctgggtgtgatggcgggcacctgtagtcccagctacttaggaggctgaggcaggagaatggtgtgaacctgggaggcagagcttgcagtgagccgagatcgcgccactgcgctccagcctgggcaacagagcgagattctgtctcaaaaaaaaaaaaaaatggctgggcaaggtggctcaccagcacgatctcggctcactgcaacctccacctcctgggttcaagcaattctcctgtctcagcctcctgagtagctgggagattacaggcatgcgccaccacacccagctaatttttgtatttttagtagagatggggtttcaccatgttgaccaggctggtctcaaactcctgacctcaggtgatccacccacctcagcctcccaaagtgctgggattacaggcaggagccactgcacccagctgagagtaacttttttttttgttgttgagacggagtctccctctgttgcccaggctggagtgcagtggcgcgatctcagctcactgcaggttcagcctcctgggttcacgacattctcctgcctcagcctcccgagtagctgggactacaggtgcccaccaccacacctggctaatttctgtatttttagtagagacagggtttcgccgtgttagccaggatggtctcgatctcctgacctcgtgatccgcctgccttggcctcccaaaatgctgggattacaggcgtgagtcaccgtgcctggccaagggtaactatttttaagtatgccagagcattcctccaaaatactctttttctttcttttcttttctttgctttttttttttttttgagatggagtcttgttctgtcacccaggctggagtgcaacgcacaatctcagctcactttagcctccaagcaattcccttgcctcagcctcccgagtagctgggattacaggtatgagccaccatgtccagctaatttttgtgttgttagtacagacaggatttcaccgtgttggccagtctggtctcaaactcctgacctcaagtgatctgcccacctcagcctcccgaagtgctggaattataagcgtgagccaccgggcctggcctaaaacattctttttctttttttgttttttgagatggaatttcacttttgttgcccaggctggagtgcaatggtgcagtggctcactgcaacctccgactctcggattcaagtgattctccagtctcagccttccaagtagctgggattacaggtgcatgccatcacgcctggctaatttttgtagttttagtagagatggggtttcatcatattggtcaggctggtctcagactcctgaccttaggtgatctgcccgccttggcctcccaaagtgctgtgattacaggtatgagccaccatgcccgggcttttttttttttttttttttatacatggtctcactctgttgcccaggctggagtgcagtggagcaattttggctcattgcaacctctgcctcctgagctcaagcgattctcgtacctcagcctcctaagtagctgggactacaggtgcatgtgacttcgcccagctaatttttgtatttttggtagagatggggttttgtcgtgttggccaggctggtctcaaactcctgacctcaggtgacccacccacctcagcctcccaaagtgctgggattacagacgtgagccaccgtgcccagccttggctgtttgtgtatcttttttggaaacattcagatttatgatttgcagatatttccttccattccatgggctgtcttttcattttcttaatgggtatccttgaagcacaaaagttcttaattttgatgaggtccagtttattttttcttttgttgtgtatgctttggatgttatgtctagaaccccaaggtcacagagatttattcctatgttttcttctagttttcttgttttagttcatacatttagttttgttttttgtttgtttgtttgttttgagacggagtctcgctgtgtcgcccaggctggagtgcagtggcgtgatctctgctcactgcaagctccgcctcccgggttcacgccattctcctgcctcagcctccagagcagctgggactgcaggtgcccaccaccacgcccagctaattttttgtatttttagtagagacggggtttcactgtgttagccaggatggtcttgatctcctgaccttatgatccgcctgccctggcctcccaaagtgctgggattacaggcgtgagacaccgtccccagcccatacatttagttatgtgattcactttgaattaatttttgtgtatggggcagggcacatggctcacgcatgtaatttcagcactttgggaagctgagtgaagcggtggcctgtccctccacacctgtgggtatctcatcaggtgggacgagagactgagaaaagaagtaagacacagagatgaagtatagagacaacagtgggcccaggagactggcaagcagcatatcaaggacctgcaccagcatcggtttctgagtttcctcactttttattgattattatttttattatctcagcaagaggaatgcagtaggagagcagggtgataataaggagaaggtcagcaaaaaaacatgtgagcaaaagaatctatgtcataattaagttcaaggggaggtactatgcctgcatgtgcacgtaggccggatttatgtttctccccgcccaaacatctcagtggagtaaagaataacaaggcagcattgctgccaacatgtctcgcctcccgccatagggcggtttttctcctatctcagaattgaacaaatgtataatcaggttttataccgagacattcagttcccaggggcaggcaggagacagtggccttcctctatttcaacttcaagaggctttcctcttttactaatctacctcagcacagaccctttacgggtgttgggctgggggacagtcaggtctttctcatcccacaaggccatatttcagattatcacatggggagaaaccttggacaatacgtggctttccaaggcagaggtccgtgcggctttccgcagtgcgttgtgcccctggtttattgagattagagaatggcgatgacttttaccaagcatactgcttgtaaacattttgttaacaaggcatatcctgcacagccctagatcccttaaaccttgattccagacaacacatgtttttgtgagctcaaagttggggcaaagtggctggggcaaagttacaaattaacaacatctcagcaaagcaattgttcaaggtacaggtcaaaatggaatttcttatgtcttccctttctacatagacacagtaacagtctgatctctctttctttgccgtacatatcccccttttctttttgacaaaaccgccatagtcattatggcctgttttcgctggttgctgtctctctggagctgctggatacacctgtagaccagcaacagagaacagacatacaaggattaatacaaaatttgcaatagtggaacttccagtggttttaacccaagtgatggggttaagatttgtgaggccatcagcagctttcaccattgcctcagtttctggcaccagattgaactgggcttttgatgcctcaaaaatttgttattttaattttaaaatatctaaagtaaggttatcttctcttccttgtagatggcgtctaaccatgtcccagtgatgttcagattcattataggctcgaggtgtaatacaaaaatctgacatattccagtcacactgtaactgaaaaagatattctaagctcatgagcctatctctcattcaaatgacagtttgtctacgatcattaatttggtttgccaatttttggtctatttgagtctgagaattccacaattttgaggagttcttttgccaattatttatatattttgtagtttgaacagaggagtgtaaagcaattccagcagccgcagcagtagctgtgactgcaataagacccataatcactgcaattaaagtaaaaaatgaatcttttggatctagttagaactccttttaatacttctgttaaaatatggatggatggggaagcctcccacggtcggtccatggacacagggatccacacaccctctcttgccctcactggcagaatatggtgctgccaatcaaaagttgaatcaatgcaagtaaacaatctacaattttcacaggttatagtttgggaatctggtttaataactatgtttcctacaactagcatataagagggttttacacaactttgcaaaggaattgtcggattggaatttaggttaatagtataatgtggcttatgatttcttgttccgataacttgatttccagaccaaattctaatgtggtgcgaggccacagtaagctttcataatgctggatgttcaggagcagtaacaggactaactaactttggttgaggtgatgaaatccccttttcaccccatttccatggatagggtgattctagccttctataaacctggtctagcctttcagttaaatcactatcataggccggattagtgggccagacagatggggtctgtgaacatgagtgagtctggcccatacaaccataatataattggttttgaggggcccagtctataatagttccaaatttattgttttgtaataccaccacagtatcagccacatatttttcccaaactaagacttctgggtcttttgattctttgggaatttccttgaggcaaggtccccttaggcctaaattttaatgatctttgataagaagagtcctgtaaattattcatttgtgacccaagtgacattccacttaccatatgataagtaaatttattggtggcactgacagtagatacttctaccaaccaattttgggttgtaggcattaagcatcctggtgctttccccaggcaaataggaggataatgatacccagtggaaatgtttatcatcattccttcttcttcaggttgggcagggccgcggtcatctgtgggtcctggtacccatgcactaatattaacacatacttcaatagaatattatccatccaagtgactgcctgaattaagggcgggaaaggcacataggcccagtaagtataattagctgcagctgctcctgcagacatagtgagacttaccaccattgatacaatcattaaagctgcaagcagcatattctctggagtttgtgttacccttgtgtactttaggcttttttcagctaactgtgtcagcttctttagctgggcccaggtcggcggcttcgcttttttggtggatggcaactttttctgtaagttgtaggtacccaaactggaagctgattttctcctggtgaaacacgagcaaaacctctcccccacgttatcaccttctctattttttatgttttatttttgttgtctttttaccaaatcagtttttcctcatgtgggctgttctttttaccagtaaaatgttgttctgcagaagtagcggtctgatttctataaatgttaaaaaaatttaaagtatagagtgctagattaagttgcatctggggagtgttatattccttactgtccttttcctttttttgtttaaccaattgagctttgagtgttctattacttctttcaattatggcctgtccttgggaattataagggatttctgttgtgtgtgtaattttccactgatttaagaatttttgaaatgctttactacagtatcctggcccattatctgttttaattttttatggaactcccatgacagcaaaacaagataataaatgtcttttaacatgggaagtattttctcctgtctggcaggttgcccatatgaaatgtgaataagtatcaactgtcacatggacaaatgacaattttccaaatgaaggtacatgtgtgacatccatttgccataatgcattgggacataaacctctgggattaactcctgcctcctgagtgggcacatgtaggacttgacactgagtacaatgttgtacaacattttttgcctgttttcatatgatatcaaatttattttttagtcctgatgcatttacatgagtcaaggcacgaagtttttatgcttttatgaatgcagatgatactagcaagtcagcttgttcatttgccttagttaaaggccctggtaaattagtatgtgttcgaatatgagtaatataaaatgggaaatttctttttcttacagtttgttgtaacgaattaaacagctgatttaactgatcatccatactatatttgattagggctgtctcaacatcctttgtagcctgtactacatatgcagaatctgaaacaatgttaataggctgattaaaaccttgtaacactgaaatgacagcaaccaactctgctctttgagctgagtgatattgagtttcaatgacttgttcttttggcccagtttaagccacttttccattgctggaacaatcagtaaacgccatcagagcattttctaaaggtttatatctggtaattttaggtaaaatccaagtaatcaattttaagaactggaagatttttgtttttgggtaatgattgtcaataattcccacaaaatcagcaagaccaatctggcatgcagcagaattgataaaagcttgtctaacctgttccttgtttaaaggaacaatgattttatctgggtcacttccacacaattttactatatgtagtcttgcctgaccaattaatgtagccatttgatctaagtacaatgtaaaagtcttagttgtactgtgaggaaggaatgaccactctgcaagatcagtattttgaacaataatgcctgttggagaatgtgcagtagcaaaaatcaaaagttggagtggggctaaatgatctattctatttacttgtgctgaccgaattttttcttcaactaattcaatttctttagttgcttctggagttaatggttttttactgtttaagtctggatcccctctcaagatagaaaacaaatttgacatggcataagtagggatgcctagagttggccgaatccaattaatatgtcttagcaatttttgaaagtcatttaatgttttttaatgtgtcttttcttatttttattttttgtggtttaattttcctttcctctacctgcattcccaaataatggaaaggagtagaggtctgaatcttatcagatgctattgtcagtcctgcgtttgcaacatctgtctgcagaaatgtgtaacagtcaattaatttgtctcttgtttctgcagcacacaaaatatcatcaacataatgaatgacataacaatctgaaaacttgtctctaactggttgaagaacttgagctacaaaagtctgacaaatagttggactgaggcaacactttccactaaaacctggctggttctttattatttacggctggtatagtaaaagcaaatttttcaaaatcctgttttgccagaggaatggtaaaaaagcagtccttcagatcaattataattaaaggccagtctttggggatcatggccagagagggcatcccgggttggagagcacccatgggttgtattatggcattaacagctcttaagtcagtcagcatgcgccatctgcctgattttttctgaattacaaacacaggagaattctaaagagagaaagtgggtgaaacatgtccttttttaaatagttttttaactattttatgtagcgcccccaacttttccttagagagtggccactgtttgacccatacaggacactgcagggcgagtctgaattgctccttcactgtagtgaactgtaggttgggcaataatgagtgccacgagccaagtcgcagtgtgcctagtttcaggctgcctcccccagcactcactcggctgaggaggaggtggccattgtggttgtagccccaatggccccaatgattctggactttttccttttaattttaatgtttcaggatatattacctcctgtaattgattgtagtcaacactttgcgttgactgagccattaccggctctgctacatatttacaatgtgaactttccgttcctttcttgaactctgtctctgcctcttcttcacaatctatcacacagctttcaggggcatcagaaactgaaatgctatcttcttctatttgaaatggttctaaagttgctttaataatggcccaatcattccatactgtaagtgggatgattttaccttccctacttgcttgttttaattccttgccaattttttcccaatcttttaaatctaaagttccttgttctggaaaccatgggcagaattgttctattgtttgaaatagcgtaattagattttctgtagaagctttaactccccctcttcttaagagaattttaatgaagctgagataagaggcatatttactttcagtttgccccattgttaccctggattcctccgagcgcacaagcatactgcaaggctgaccgtggacgtactcgggaatctctcatcagctgtcctcaatactcacgttctcagcataacttcaccctggagaaaggccccatattgggcgtcagatgaaggggtggcctgcccctccatacctgtgggatatctcgtcaggtgggatgagagactgagaaaagaaataagacacagagacaaagtgtagagaaacaacagtgggcccaggagaccggcatgcagcatatcaaggacctgcaccagtaccggtctctgagtttcctcactttttattgattattatttttattatctcagcaagaggaatgcagtaggagagcagggtgataataaggagaagttcagcaaaaaacatgagcaaaagaatctgtcataattaagttcaaggggaggtactatgcctgcatgtgcatgtaggccggatttatgtttctctccacccaaacatctcagtggagtaaagaatagcaggcagcattgctgccaatgtgtctcgcctcccgccatagggtggtttttctcctatctcagaattgaacaaatgtataatcaggttttatactgagacattcagttcccaggggcaggcaggagacagtggccttcctctatctcaacttcatgaggctttcctcttttactaatccacctcagcacagaccctttacaggtgttgggctgggggacggtcaggtctttctcatcccacgaggccatatttcagactatcacatggggagaaacctcggacaatacgcggctttccaaggcagaggtccctgtggctttctgcagtgcattgtgcccctggtttattgagactagagaatggcgatgacttttaccaagcatactgcttgtaaacattttgttaacaaggcatatcctgcacagccctagatcccttaaaccctggttccctacaacacatgtttttgtgagctcaaagttagggcaaagtggctggggcaaagttacaaattaacaacatctcagcaaagcaattgttcaaggtacaggtcaaaatggaatttcttatgtcttccatttctacatagacacagtaacagtctgatctctctttcttttccctacactgaagaaggaggatcgcttgaagtcaggggttcaagaacagcctgggctggccaggcatggtggctcatgcctgcaatcctaacactgtgggaggccgtcatgagcagaacaacttcaggccaggagttcaagaccagcctggccagtatagcaaaaccccatctctaattaaaatacaaaaattagccaggcatggtggcacacacgtataatcccagctactcaggaggctgaggcaggagaatcacttgaacccaggaagtcgaggctgcagtgagctgagaaggcaccactgcactccagcctgggtaacaacgtgagaccctatctcaaaaaaaaaaaaaaaaaaagaagaaaataaaaaatttatatgtgtgtattctgtgagatagaggtccaaattcattcttttcttttcttttctttttttttttttttgagacagagtctcactttgtctcccaggctggagtgcagtggcgtgatctcggctcactgcaacctccatctcccaagttgaagcaattctctgcctcagcctcctgagtagctgggattacaggtgccaaccaccatgcctggctaattttttgtatttttagtacaccatcttggtttcaccatcttggccaggctggtcttgagctcctaacctcatgatcagcctgcctcggcctcccaaagtgctgggattacaggcataagctgccacgcctggccccaaattcattcatttacatgtggatatttagttgtctcagcaccatttgttcatttgttgaaaagattattatttcccaccccccacccccgctttttttttgagccggtgacttgctctgtcacccagcctggagtgcagtggtgtgatctcggctcactgcaacctccgcctcctgggttccagcgattctcctgcctcagcctcctgggtagctgggactacaggcatgtgccaccatgccctgctaattttgtatttttcgtagaaatggggtttcaccatgttgaccaggctggtatcgaactcctgacctcaggtgatccgtccacctcagcctcccaaattgctggaattacaggcatgagccaccatgcctggcctccccacctttttttttgagacagtctcattttgtcgcttaggctggagtacagtggcacgatcttggctcactgcaacctttgcctcccaggttcaagcagttctcctgcctcagcctcacaagtagctgggactacagtcatgtgccaccacacccagctaattttttgtatttttattagagatggggtttcgctggtctcaaactcctgacctcaaatgatcctcccgccttggcctcccaaagtgttcgtgttacaggcatgagccacacccagcctcccaattttttttttttttttttttttgagacagagtctcactctgtcacccaggctggagtgcagtgagtggcgtgatctcggctcactgcatcctccacctcctaagttcaagtgattcttctgcctcagcctcccagtaactgggattacaggtgcacaccaccatgcctggctaatttttgtatttttagtagagacgaggttttagcatgttggccaggctggtcacaaacttctgacctgaagtgatccactcgcctcagcctcccacagtgctgggattacaggcgtgagccaccatgcctggcccccatttgagtttcttagcatcttatcaaatagcaattgtgaccatttatttctggactgtcagttctattcaattgacttatatatctatctttaagcagtatcacactttcttggttcctgtatgtttgcattaagcttccaaattgtgcagtgtgatttcttcaatttttttcttctttttcaggcatttacttttttttttttttttttttttgagacatatctccctctgtcgcccaggctggagtgcagtggtgggatcatggctcactgtagccttgacctctccaggatcaagtgattctcccactttagcttccccagtagctgggactacaggtgtgcaccatcacacctggtcaatttttgtatttttgtagagacggtgtttcagtatgttgcccaggctggtctcaaactcctgggctcaagagatcctcctgctttggcctcccaaagtgctgagtttacaggtgtgagacacattgccctgcttgaatttgttgattgcatctccatggtgttatttaacatgttcttctgtccctgtattttagtcattcaacagtgtgatctaatttagggccacttttacagcaggaataatttgcaggtggtgtatgtgtttccagagtcagaacatgtttggtttatgctcttggtgatattcagggctatcagtgatcctctcctggatcattttttaattagaggtgatttgtgttttgaaagggtcacttgggttgctggggggtgtattgtatatgagtaacagggttcttataaggacggagtcggataatcatgcaacagagcacttggtgctattcctggcacgcaatgaccatattgttgttgttgttgttgttgttgttgttgttattgttagagctgtgtgtgggggacccaagtcctgagctcggaggcattttctggccagggctgtttcctcccttctcccctgcctctggaaaagtctgcagtgccccaaggctctgggaggcatgttcaggactgcagcagccatctctgtgcacctggtggggccccttcagggaaggaaggctggagccccactcacttggttcttgcaccagactgtaagtgccctaaccccaatactctgccacctgcatggcctggggcttctggggtctggctcgttcctggcttcaaagctgtgcatgagccttctctttcagggagccctctttaactgcagcctgtatgtgggcttctcccttgcccctgcttctctagtctagaacttgtagctctgcatctgaatagtcagcttgggcgctgtagggtgctgcttcccatgatcccctgtgcccatcccagaacccagtacctggtagggactcaataaatgtcaactgagccaggcgcggtggggttcctgggccatggaagacctggcacttactcaaatggtcccaaggcccctccaggacaggggggcctggtgttgagattactgtggctgccaccctgaccaggtccttgccagcttctcttctgaccctgggcaggtacctgagcctcttcaagcctcagtgtcctcatctgttagatggagactattgtggcacctctagtgagagtgcagtgggaactgagcgaggtggaactgagcaaaatcctgagccagggttcactattgaccacagcaggtggctgagaagaatgttggatccccagctccacggcccaccagccatctgggactggcaaacccacaggaacggaaggttcctcagggaccacaaagcccatgtgaggtccctgctgctgaagggattctgaggacaggaggagccaaattacctatccagggtcacccagccaaggtgggttaggacctgagtttggtggctctcaggtctggccaatttctttctttctttttttttttttttttttttttttggtagagtcttgctcgttgggtcgggcaggagtgcagtggctggcacgatcttggcccactgcaatctccatctcccaggttcaagtgattctcaggcctcagcctcctgagtagctgggattacaggcatgtgtcatgacgcccagataagtttctttgtttgtttttcccagactgagtttcactctaatgctcaggctggagtgcagtggtgtgctcttgcctcactgcaatgtctgcctcccaggttcaagtgattcttgtgcctcagcctcccaagtagctgggataacaggtgcgtgctaccacgcccagctaatttttgtatttttagtagagatgggggtttcaccatgttggccaggctggtctcgaactcctgacctcaggtgatctgcccgcctcagcctcccaaagtgctgggattacaggcgtgagccactgtgcccagcccctggccagtttctgcacaccagtggctgaggagggagctggcctgggaggaacaccgggaggggaggggcgagccaggagccaggaccccgggaccctccgaggagcggattagtgcctccctcagagttaggacatggccttgggtccaacaggcctaagtctgagtgtgtgtgttgtgtggccttaaacacatcactccccctcctgcaccctccagcctctgttttccaccttctgttttctcattgataagataggcctgaccaggtcattcagggaatgaaatggaagtgcttagcaagacctctgtaagtggaggctgctgctgtcactgttgccattatcctccctctccgctccacccacctcctgctcctcttctttaaccctcagcccttcctgagtcagactttaacctggccaagtcagggctctgtctcaggacgcatggagccagggctggaagtctccactgggcaggcgccaggcagcccctgcaggttggggaggtggaggctgctggagtcaagaggaaccaggtgagggtgttggagcataacaggcttgggaggcaggcagaaacctgcccttctgcaaactctatctcttccccctcctgggagcagacaggatggcgctgtggcctgaaagcagctgtccctcctgtgtgcaagctcggactgctgcacccagacagattccatctctgaccttccacttgttcgtctccagctcgccatggccaaacagctgcaggcccgaaggctagacgggatcgactacaacccctggtgagccagctgggctggggaggtgtgtgggtgtcccctcgggcatgggttggccatccctgggtttacagcaactcagtagtactccagatggtggcggtacacagactgccagattccagccatagctcaggagagacagggcccgagggagtaggcttggttcaaatctcagctttcttctgcatgactgtgccactaggacaggtgacatacctgctctgagcctcatctccccagctgcaaaatgaagagttatacccacctggagagcgttggggaggaaaaagtaaaatgctgtccaaagccattctacccaggcaccaagctaaggcctttccagggatgactctttctcacttggtatagagtcagataaactaagataagtaaaataagcaagtaagatacagtcagctcttcaccagacatttgcagaggttgatattgttttcttttttgacttgttttattttcattttatttttgagacggagttttgcccttgtcgcccaggctggagtgcaatggtgcggtctcggctcactgcaacctctgcctcctgggttcaaatgattctcctgcttcagcctccaagtagctgggattacaggcgtgcaacacaacgcccagctaattttttttctttttcttttcccccgcaagacagaatcttactctgtcacccaggctggagtgcagtggcatgatctcggctcactgcaacctccccctcacaggttcaagcaattctcctgcctcagcctcccaagtagctgggattacaggcgtgcgccaccacgcccagctaattttttttttttttttgtatttttagtagagatgagatttcaccatgtttgccaggctggtctcgaactcctgacctcgtgatccacccgcctcagcctcccaaagtactgggattacaggcatgagccactgtgcctggccctaatttttatatctttagagaaaatggggtttcagcatgttgtccaggctggtctcaaactcctgacctcaagggatctgccctcctcggccttccaaagtgctggggaatacaggcataagccaccgggcccagccaaaaatgacacattttagacatatttattggtatgcaaattcaactcagccaggtcttcactctgctccaaactagccccaaaccacataccagcctcttcatccagcttcccagcctttctcccacctggagaggtggcccccaggcagggccagaacagaggattatgggtccagagatgatgtgtgcctgggctggtggggccctgttctgcccagagtagggtcaagagcatcaaactttgcttgagatggaagtagaaaggctggctggctgtgccttgtactagctgggaggctttaggcaagtcactccactccttatccccacagtggtccaggaacaagatgtgcctcacaggccattgtgaaggctatatgagcagagcgtttaactgtggtgttgacgaatccaaggaggagtcatgcaatctgtacagggggtctcaactagtatttggaaagaatagagtaggataggacaggacagaaaatactgcagtagattgcaccaagaaggatgaagcttccattccatgtttgtgctccacagggttgatgatgcaaaggtgatttcttggccggtagtggtggctcacgcctgtactgctagcactttgagaggccaaggggggcggtggatcacctgaggtcaggagttcgagaccagcctggccaacatagcaaaaccccatctgtactaaaaatacaaaaattagctgggcgtggtggcgggtgcctgtaatcccagctactcaggaggctgaggcatgagaatcgcttgacctcgggaggcggaggttgcagtgagttgagattgcaccactgcactccagcctaggggatagagcgaaactctgtcaaaaaaaaaaaaaaaagatgatttcttcctatgggtcatggtggaagaacttggaaagcccctgggctgattcctgcgattaacaatgtgcctgactgacctaatctcaatgtaggggaccagctgtgacacttaggcagatcttcaggccaggacagttgctgattgtctagtttttgtttttcttgtgtgtgtatgtgtgtgttttttgttttttgtttttgtttttttaagacagaatctcactcttgttatccaggctgcagtgcaatggtgcgatctcggctcacttcaacctccggttcccgggttcaagtgattcttctgcctcagccttccaagtagctgggattacaggcccctgccaccatgcctgactaacttttgtatttttagtgaagacagagtttcaccatgttggccaggctggtctcaaactcctgacctcaggtgatccgcccacctcggcctcccaaagtgctgggattacaggcgtgagccaccacacctggccggttgtccagtttttctaaacaggccgaagtccaggtcaccatggagggctgggctggtgctgattctccatttgttacccagggtggagtttgtgaaactggccagtgagcatgacgtcgtgaacttgggccagggcttcccggatttcccaccaccagactttgccgtggaagcctttcagcacgctgtcagtggagacttcatgcttaaccagtacaccaagacatttgtgagtctccccatctctcgtggaggcactgggggaggaaggggacagggctttctggacttcaagcccacacagctgtcaggcttcaggggacagagccaggggattctgtatgaccatagttcagtgtttactgagcgtatcctctgtcccagagccttcgcctcgtggtctagtggggatggcagacaagaagccagtaacgacaggcagttgatacatgatgtgatggaggaggatgggatatcgtgcgagtaagaaagagggaatgaaacctggggagggggctggagagatgcacgaagacttcctggaggaggtgacacttaaaccaagtcctgaaagatgagctactggttggattacacaataaatccaaacgttttccggaaaggaccacatagtaaatatgtgacactgcttggattagaacagtggttctttttttctttttcttttttgagacaaggtctcactctgttatccaggctggagtgcaatggtgcgatcatggtccactgcagccttgaccctgccagtctcaagtggtcctcccacctcagcctctggagtaactgggactacaggtgtgcatcaccatgcccagctaattttatttatatatttatttatttatttttgagtcagggtctcactcctgtcacctaggctagagtgtagtgacatgatcacggctcactgcagcctgtacctcatggggctcacatgatatgccatttcctggggctcatgtgatcctcccacctcagcctctagagttgctgggacaacaggggcatgccacctcacccagctaatttagagacagggtttcaccatgttgctcagactggtctgaaactcctgggctcaagtgatcctgccacctcggcctccaaaagtgctgggattacaggcgtgagccactgaaccctcattctttttttttttttttttttgagatggagtctccctctgtcgccaggctggagtgcaggggcgcaatctcggctcactgcaacctccccctcccaggttcaagagattctcctgcctcagcctcccgagtagctgggactataggggtgcgcccccacgcccagctaatttttgttttgttttttttttaagacagtctcgcactgtcgccccggctggagtctggagtgcagcggcacgatctcggctcactgcaacctccgcctccgcctccgcctccgcctcctgggttcaagccattctcctgcctcagcctcttgagtagttgggattacaggcgcccgccaccatgcccagctaatttttgtatttttagtagagacggggtttcaccatgttggccaggctggtctcaaactcccgacctcgtgattcgcctgcctcggcctcccaaagtgctgggattacaggcgtgagccaccgcacctggccattttttgtatttttagtggatactgggtttcaccatgttagtccggttggtctcgatctcttgacctcgtgatccacccacctcagcctcccagagtgctgggattacaggcgtgagccaccgcacccgaccgcactcgttctttttaatggctgcatactgttctgttgcctggatgtgccataatttatttaagcagttctgcactgatggactgcttctgctatctcaatatcataagcaatgccacagcaaatatccctgtgtggacatctttgtatacatatgtatttctctaagataaattcctggaggtaaaactagcaaaagaaagactataaatatttataaatacaataggtggatattgttaagaaacagtgtgtgcctataatcccagctacttgggagtctgaggcaggaagattgtttgagcccaggagtttgaggccagtgcaacatagtgagatcctgtctgaaaaataaacaaacaactaagtaaataattgccctccagtaaggtttactcatttacatccctgccaataggctggtctcagagctggttggaaagttccttctttgatccaaaaaaaaaaaaaatcatttgggtatgtatctttttcttttctttctttctttcttttttttttcttttaactagagacaaaagctgggtatggtggctcacgcctataatcccagcattctgggaggctaaggctggcagatcacctgaggtcaggagttcaagaccagcctgcccaacatggtgagatcccatctctaataaaaattagctgggcgtggtggtgggtgcctgtaatcccaactacttgggaggctgaggcacaagaatcgcttgaacccgggaggcggaggttgcagtgggccgaggtggtgccattgcactccagcctgggtgacaacaacaacaacaacaacaaaatagagacagggtctccttatgttacccaggctggtctcaaactcctgggctcaagcaatcctcccaccttagcctcccaaagtgctgggttacaggcatgagccactgtgcccagcctcattaaatattttacctctttcttgtatgttgcaatatttttctcttcctgttttgaccttgctcatggtgccttttatttttatttaattaattaatttattgtctaagacagagtctcagttttattacccagactggtgtgatcataactcacttcagccttgatctcctgggctcaagcaatcctcctgcctcagcctcccgagtacctgggactacaggcacgtgatactacacctggataatttttttgattttccatcagtagagacagagtccctctgtgttgcccaggctgttctcaaactcctggcctcaagcaaccctcccgcctcatactcccaaatgctaggattacaggcgtgagccacggtgcctggcctgtgcctcttgttgtacagaaaatttttatatttgtgtggccaaatctggtttagtgagttactgagttgagttctagataaagtttcaatcacttggcttagccttgagtatttttgttttgttttgtttgtttttgttttttttgagacggagtctcgctctgtcgcccaggctggagtgcagtggcgcgatctcggctcactgcaagctccgcctcccgggttcacgccattcttctgcctcagcctcccgagtagagctgggactacaggtgcccgccaccatgccagctaattttttgtatttttagtagagacggggtttcaccttgagtattttataagtgtcctcagcaaacaagtttctggatctaatcttcctctcaaaaaggggtgcttacaaagctgcaacatgaggttcctgactgtcaactgtgtgtgactttagacaagtaatttcttctctctgggtctctatttttctacctgtcaaatagtgggcatcaggccaggcacggtggctcacatctgtaatcccagcactttgggaggccaaagcaggcagattacccaaggtcagaagttcgaaaccagtctggccaacatggtgaaaccccgtctccactaaaaatacaaaaattaaccaggcatggtggtgcgtgcctgtagtcccagctacttgggaggctgaggcaggagaatcacttgaacccaggaggcggaggttgcagggagccgcgattgtgccactgcactccagcctgggtgacatgagtgagaccctgtctcaaaataaataaataaataaataaataaataaataaataaataaaagcctctcccgcaaagctgctgggaggatcaagtgggcacaaacatgcttcttaaacttacagatgtggaaagtggggagtttctactgccttgtgggctcttggactgaggttcatggaggcaagcacttcctctggttctctgctaaatccccgccctgggcttcgggcctggcacagaacaggccctgtggcaaatgctggtggaggagatggaagagcttagcactggatatctgagtcagtgcaggcctggtggttggcaccctggagtctgggaccatatagattgtgtgacctttacctcccagagtacacaggatcacaatagcacctgcctctgggttgttgagaggatgagatcaaagaaatcccacaaatagcttggtgtgtagaggaatccagagtgttgaaagctgatctattccacgtcccctggggcccaggctaccagtacctgactttgcccccaggcctgctgctggaaggtgctagaattgcctggatacagctgggccggaggatgggcccaggctgagctggacagttaacccctgctgtcctggcagggttacccaccactgacgaagatcctggcaagtttctttggggagctgctgggtcaggagatagacccgctcaggaatgtgctggtgactgttggtggctatggggccctgttcacagccttccaggccctggtggacgaaggagacgaggtgagtgggcaagacttgggctgagtgggactgagaggtcagggccatgctgactccagctgatttgacccttatatcaggtcatcatcatcgaacccttttttgactgctacgagcccatgacaatgatggcagggggtcgtcctgtgtttgtgtccctgaagccggtaaggatgctaggtagaggatggatgggcagagggatccaaggcgtgggctgagttggaccctgggagttggaaaaggaggaaagaagtgaaggaagccagttcctctaagctgggagggcagaggggaggtgtgtgtgttgggatcccaggggagagaaggtggggatagatgctggggaagacctgcatgtcaggtggttaagtggtaccaccccatgccacctgctcttgcagggtcccatccagaatggagaactgggttccagcagcaactggcagctggaccccatggagctggccggcaaattcacatcacgcaccaaagccctggtcctcaacacccccaacaaccccctgggcaaggtactggagggacctccttccctggccccctgcggacctggtcatgtctcctgcactgttactgagttgctgctgtggggcctccgtttcttcgtttgtgtgtgggagggccacacacaatgagcactgaggaccaagactccagaggtcccaggacaggggcaagaatccccagggaaggcctgagggctgggacagtgaactgggctgggagccaccatcacttcccagtgaccctggaatagtgactatgcctctcgaagtatctcatctgtaatgtgggaacctgagggaactgacctcatggtcagtgttgcagggatccaatgtgatggtgcagaacagcccttagcactgggcttggctgtattcgccatttatttatttttttgagacggagtctcgctctgtctcccaggctggagtgcagtggtgtgatcttggctcattgcaacctctgcctcctgggttcaagcaattctcctgcctcagcctcccgagtagctgggattacaggcacccgccaccatgcccagctaatttttgtgtttttagtagagacggggtttctccatgttggccaggctggtcttaaactcctgacctccagtgttccgcccgcctcggcctcccaaagtgctaggattacaggcgtgagccaccgcacctggccgcagctgtgttctttaacctctctgagtaggcctctgtgtttggggacggtcccagctgcaggtctgtgctctccttgggcatctgcaggtgttctccagggaagagctggagctggtggccagcctttgccagcagcatgacgtggtgtgtatcactgatgaagtctaccagtggatggtctacgacgggcaccagcacatcagcattggtgagccaagccagcctggggcccctcccctgcacattggtgggagggccttgaccccacctgagagtcagcgcaggcctggtagttagaacccagggttatggagccctgcagatcctgtgacctttgcctcccagagtacacagtgtcacagtagcacctgcctccctggttgtcgaaaggatgaggtcaaagaaatcctatgccgagcatggtgggtcacacctgtaatcccagcactttgggaggctgaggctggcagatcacttgaggtcaggagtttgagaccagcctggccaacatggtgaaaccctgtctgtactaaaagtacaaaaattagctgggcatggtggcacgtgcctgtagtcccagctactcaggaagctgaggtaggaggatcactggaacctgggaggcggaggttgcagtgaggcaagatggcgccattgcattcctgcctgggcaacagagcgagactccatctcaaaaaaaaaaaaaacaaagaaagaaatggggggtggagggagggagggagagagagagagagagaaagaaggaaggaaggaaaggaaaggaagaaagaaagaaaaaaaattgtgcaaataacttagtatgtagaggaatccagggtgtcaaaagcctatgcgtgtcccctggggcccagaccaccatcctcccccgtccccctcaccccagtctcagcagctgttctgttcggccttgggcagccagcctccctggcatgtgggaacggaccctgaccatcggcagcgccggcaagaccttcagcgccactggctggaaggtgagttgctgagggtgggaggtcaccaccccctgcaagatccttggcaagtgaggtgggcctgagaatgaagaaggctttagccaggtctggaaggacctctccccctacctgcgcccctgctgcaggtgggctgggtcctgggtccagatcacatcatgaagcacctgcggaccgtgcaccagaactccgtcttccactgccccacgcagagccaggtgaagaggggcaggacgtcacgggggagtggggggacaacaaaagagcccaggctggcccccgcgtcagggaacagctgatctatctgtgtgtccatctgccctgcccaggctgcagtagccgagagctttgaacgggagcagctgctcttccgccaacccagcagctactttgtgcagttcccgcaggccatgcagcgctgccgtgaccacatgatacgtagcctacagtcagtgggcctgaagcccatcatccctcagggcagctacttcctcatcacagacatctcagacttcagtgagtgagacttgccggtctgggcagggcgcaggggctggaggctgcagggggctcagtgtggcctctgtctcccagagaggaagatgcctgacttgcctggagctgtggatgagccctatgacagacgcttcgtcaagtggatgatcaagaacaaggtgggctgggcctctgccaggcagccatgtatggtttcacaggttgtgtgctgctcaagggtgcccaggcaagaggctcctgggctagatcttagtccagcctctgccgtcaaccttggggcagggttgtatccacttcagagaatgaggaggctgtttctttttttctttcttttttttttttggttgagatggagtctcactcttgcccaggctggagtgcagtggcgcgatcttggctcactgcaagctctgccccccaggttcacgccattctcctgcctcagcctcccgagtagctgggaccacaggctacttttttttgcccggctaattttttttgtatttttggtagagacggggtttcaccatgttagccaggttggtcttgatctcctgaccttgtaatccacctgcctcggcctcccaaagtgctgggattacaggcgtgagccactgctcctggcctttttttttttttttttttttttgagacagagtctcactctgtcgcctaggtgggagtgcagtggcgcaatctcagcacactgcaacctccacctccagggttcaagcgattctcctcccttagcctcctgagtagttgggtaactgggattacaggcatgtacaaccacgcctggctaatttttgtatttttagtagagacggggtttcaccatgttggtcaggctagtctccaactcctgacctcagatgatccactccccttggcctcccaaagtgctgggattacaggcgtgagccaccgtgcctggcctgaggaacctgtttctaacttgcacagagatgctgtgtgggctggcaggatttcctgcctctttggatctccatcttcccatctgtacagtgaggagttggcccattaactcttgagttcatccaggtttgatctgtgactctaaggctttgttcttctctggctctgccctgacctgctccatgatcctccctctgtcagcctccctctgccctctatacccagggagggacttggaatgatgttctgggattcttttcttctgactttgtgtttgtttttgttttggatggattttctctctttcgcccaggctgcggtgaagtggcgcaatctggctcactgcaacctccacccccgggttcaagcaattctcctgcctcagcctcccaagtagctgggattacaggcatgcgccaccacacccggccaatttttgtatttttggtagagacggggtttagccatgttggccaggctggtcttgaactcctgacctcaggtgatccacccgtctcagcctcccaaagtgctgggattataggcgtgagccaccgcacctggccttgttcctctgactttgatgcagctctaggtgctggattggagctaactctccttccccgcctggtcgtgggaacctctctgtcccctccggagccaaggcctgctgggccacgaggccgtgttgagacatgtccttcctcctccccagggcttggtggccatccctgtctccatcttctatagtgtgccacatcagaagcactttgaccactatatccgcttctgttttgtgaaggtaaagggcagggctgggggaggaaagacctcacagagcttcccaaggccggctgggcacatggggagagtgtaggactaatctgtgctggcgcaggatgaagccacgctccaggccatggacgagaagctgcggaagtggaaggtggaactctagccctgaagtcacgccttggccctgacatccccacatgcccgcagagatcctctttgagtgtctgtctttgtccaggtttcagacatttctaggttggggaagatgctattgggaaacctcttctccgtgacacagaatgttctgggtgggagccgcccttcttcatcttagagaaccaagtgcctcctgtctgaaaggtgagggtggcctgacctgggcctctccctgcccctccataggtgggtttgtagggtcttgtgttgcttctggtctctccaggcttggctgagacggacggtagacttccaccatgtaccgatcacatcccagctctgcatggcccctgctaaggctcaggtataacctcaccttccctggctcatcttggccttggggagttgcctttaggcttgagtcctcaagcctctccttttcgtccataataaaatgtttaagttattaagatccttattgacggcttctctctgcttcacactcatgctgatggctgatctaacttgtgaagaatgcccagaagaacctcagacacccccacaactttgtacaaatggttactgtagtcacatagtggcacaaccaggcctagcacccaaggccctcaaatgaattcctcactattaa

SEQ ID NO: 1209 - DNA, 85300 bp, Homo sapiens
gagcggggccggcagagcgcgcggcgtcggtgcccttgaccatggcggcggctgcgcttctgctggggctggcgctgctggcaccgcgggcggccggcgcgggcatgggcgcgtgctatgacggcgcagggcgcccgcagcgctgcctgccggtgttcgagaacgcggcgtttgggcggctcgcccaggcctcgcacacgtgcggcagcccgcccgaggacttctgtccccacgtgggcgccgcgggcgcgggggctcattgccagcgctgcgacgccgccgacccccagcgccaccacaacgcctcctacctcaccgacttccacagccaggacgagagcacctggtggcagagcccgtccatggccttcggcgtgcagtaccccacctcggtcaacatcaccctccgcctaggtaagcgcgggctgggggcaccgccaccgcaccccgtgtccccactccactgggggtctgaggctgaggcctgagctgctgtgcgcccaggttgggctgcaggacccagatatggtgttggatggaggggctcagaaataggaattaggctgggtgcggtggctcactcctgaaatcccagcactttgggaggccgagatgggagggtcgcttgagcccaggagttcaagatcagcctgggcaacgtagtgagatcccatctttacaaaaaataaagaaaaataggccgggcgcggtggctgacgtctgtaatcccagcactttgggaggccgaggcgggcggatcacctgaggtcaggagttcgagaccagcctggccaacatggtgaaaacccgtctctactaaaaatagaaaatttggccgggcgtggtggtaggtgcctgtagttccagctactcaggaggctggggcaggagaatcgcttgaacccgggaggtggaggttgccgtgagccgaggtcgcaccaccgttctccagcctgggcaacagagctaactccgtctcaaaaaaaaaaaaaaaaaaaaaaaaaagctgggcgtggtggtgcacacctatggtcccagctactcaagaggctgaggcaggaggatcacttaagactgagaggttgaggctgcatgaaatatgatagtgccactgtgctacagcctgggctacagagtgagaccttatctcttaataaaaagaaagaatgaaaaaaagaagaaaaaaaaacaggacctgtacccctagatagccagaaggatagactgaggggtgccccgtggggcgggagaggcagggagtcacttgctgagctttggttctaggttgcaattataatcccctgtaatggttttccatcctagaccagaactgttggggaggtgacacaccaaggactgaattggtcaccctctagggcaggggctcctgatcttgggtcttctggtcaacttcaggtattcagtggacccctgaagctgcctgcagtcctcgggtgggttctggaagatagaagctgtgatgttcatcactgcacaggcaaagtttaaccctctggggaggaggactaagtttcttcgtgctgctgggcagctgcgcccggtggcatggcctctctgccctgctcatgacttgccgaggtgcagaagcccttagatctccaggaatcagaatctggagtctggacccagccccggttctcagcccctgcccccactgcagggagctggaatgctctctcctccctccgtgttcagcccgattcccatgtcctctgtggccgggtaagcgccaagtgtctttcctgttgcagcctccactgccctttcaggaggggctggtatcactggttagactcccttatcttcgaggtcagcctcccaaagctttgaaaactcaaattatttttataactcatttttgctgctaaacctgacctgaggctatttataagctatgtttatgctagtgagaatgaatattcattcgctttgctactgaaatctcatttgagtacagccggcagccccagaccccactgggggtattagcacaatatatggtataaggcctgcatcgtctttctaaaagctgaaaaatgttcaattcccaaacacatttggagcctaggagtttggattagggatgatgggactgtatcccatgtttcagctgagaaaattgaggctcagagaggttgttttgcccaaaggcacagagctgctaagtgagcatctgagcgtggacatccatggacatcagaggtcagagcataaactctttgatgtgagttccgccacccatcaactgagtcagctccacctcagcctggtgacagtgtcctggggagggctgggaagtgacattggagtggggtgcggggaggaccgtgagcccgctctgcagagcacacaggtactggctgccacctcagaaactcccttcttctggggccacgtcaccttctctcagcctatctggatcactaggtggggcttctgaatgggacgagggggaggggacaggaagccagtggggaggggggaggctgggggagctgtctggatggagctggcaggaccccaaggccacaggggaaggaatctgggacagggtggggagttgttggggagacacagtgctccatgacaaagggtatcacatgtgtcctgggaacccaggggccaaggaaagagctcagcccaggcacaaacaaggtgggaggaagttgggagaaatggccaagtttttggatttgaggtagttcctgtttactgtgcatctactgtgtgccaggccctgtgctgagctgtgcaccctcgtggaactctgcctagaaccttagaagcagagtggttctgatccttctaaaagcaaggaacctgagagcctccacactgtgaatgtagagagcgaacacacacacacatacacacacacacacacacacacacacacactccctgctgtgtcttatcccggtgagcattcttcctgttttgtcgccgaaaaccaggcatataggagagagtccacaagtgtgagtgacagggtcacctcctctgtcctgtgctctggggccagctcagcattctcttttgcctgctctgggaggcagaataggatagaaatcacgaaaggaggctttggacttaggcccagcagagccactcactgggcaagcggagtcccctctctcagcctcagtttccttacctgtaccgtacggataagagtcgccacttcctgagcagctgttcgggttcatgagcccgggtcggagccatggcagtccctgtgtgtgaccagcgtggctgctgagacagctcagggctgaggctcccttgcggggattgagaaatgctcgtcccggccgccctgcctcctcaaagacatcctgacgctggtctctgtttacgcacaaggggcgccgggggcccagcgcagccccagatttggcctctttttggtttcctatgacttaggtttgctccaggctaagccatggcttgcataatagcgggggaaggagaggcctgggattgtcggtgtcccctgtggaggccgtctgatgacctctcctcctggtccttaggccacctctgctggctctgtccccccactgctccctctccttgaaggctcatgggaagggagagtgggcggccagctctggcccggggtctcctagagggaatggggtgaggggcagggaaggagatggaggtcgccgcattcccagccccccgtggctcctggacatctgttccggatcctcccgtcatctctgagctgagccttcctgtctgggatgaaaggcagcagtgggctctggcagccccagcccaccaccaaggcccagggaggccacggggctggggcctgggagtcagtggggtgttgggggagtggacagtgacgggggtacagaccattccggggctctcaccgtgtaccaaggactcgcccaggcggcatcccaaaccggcatgctttgttcttttacagacagcaaaactgaggcactgagggtgagatcagttgcttggggtcgcacaactcaataaatggtggcccccgggaccctccccctaactgctgtacttgggaatgaagagggtccaggctaggctggtccacatgcttgaagcctcggtcctgggaggaacagtatgggctgtggctttcggtgggctgggggagtctcctcccggcttgcacttggatcgctgagaatctcctggaaccacaaaaagacctgagtcccccaagcagatgagttctgccctccctcccccgcaggtcccggatgtccctgcatggagttgacttcttcttgctttcatttagccgtttgcttggtggtcacccagccttggctcactggccacaggatgcagctgtgaacagggccatgtgcggcccctgtcctgaggggctcagggcccaccagaaggcagcctttactgagcagtgctgagaacgaggatgtatgctcagaacatgcactggtgcgcacgagcctcatctctagggtcaggaagggtctcgctgagacctgaaggatggtaggagctgaccaaagagggaaggatgttcttcgacctgccgggcctggatggcctgagtgcagacaccgagaagacgctggggtctggccagccacagcgaggagccgggtcccagggtgctggacattagggggaccctgtggcccctgaggggtcctggagccagctgggtctcctgagccttggctccgttctgtcttcctgtcgagtgggcggctgcgattgccttggcctgggccagtgctgggggccaagtcctccctcctgctccctgggggttctggctggaacgctgggccctgagcagggcaggaggtcaaggcagcggctggttagcctccatccacccacagaactgccctccaggcccctgggcccagctggccttggccacctctttctctctgggcctcccaggactaatccaggagatgcagggctaggaagtggcaaagcccaggatgggtgtagccagcctcccatggcctctgcatcatccctgtccacttcccacactgcccttcagcaaggccttggctgggccgaggcactctctctcctccagcgccttacatgtgctgtggcttcggcccagcgcacttctcctcccaccttcagcctaactcatgtcttgttcatccacaaaaccattgcatgtctgccgatccctgtgctgagccctggggatgtctgtctgccccactcagcttagaggtgcctcctctggaaaacccctcacccctctaaggttgggcagaaggcctgcccacgcatccttgcagcccctaatcctccttccaccagagtctggattacactgcgtgagggcttggtctgtttacgtccatccctatctctgggctgccagagggaatgcctgttttcacacctgtgccccagtagtgcccagcctgcatttgcccactgcacagggtgctgggtaaaggttggtcaggcgaatgaatggaagagcagctcaaatttcattgaggctgggtgaggctcacacctgtaaccccagcactttgggaggcagagacgggaagatcacttgaaccagaagttcagggtcagcctggacaacaaagtgagaccctgtctttacaaaaataaaaatagaaatgaaaaaattagccgggcgcgggggcaagtgcctgtagtcccagctacttggaaggctgaggtgggaggatcgctggagcctgggagttcgaggctgtagtgatcacaccactgcactccagcctgggcaacagagcgagaccctgtctcagaaaaaagaaaaatgtagttgaacaaatgcttcgtgcctgggactgttccaagtgcttccaaggcatttgctcatttagccctgttattgttatgcctattttgcaaatggggaaaccaaggcactacattgcacagtcacttgcccagtgaacccgagggagttcagctattttgcccaaggccacagagccaggaattggtggggctgggctgtgaaccccagggttgcaagattgcactgtgtttcctcgctcagagcaagggagtgaggaattcatggatgaagggcccccagccttgcaggtgcctcccgtactcctaagccacggtgttcacagcagtgccgccgtcctcccagcccaaccctgccctgccctgctctcccttgcccaggcttcagctgcttggtctacctcccttccctgtggccccttgtccccgggcaagccctcccagcagccatgcccttccccagctcatgccctggctttgcttatttgaatcatagtcgacatccaggactccacctgcacccctcgccctgactcggtctccacctgagccctcgactgggtaatttgagcagccgccttgacaccaaccactctgaatgtcatgcaagggcccccgtgtgcaaaggctatgcaagggcccctgtgtgcatagcagcattttcttttcttttttatttttttgagacggagactcgctccaccgcccaggctggagtgcaatggtgcgatctcagctcactgcaacctccacctcccaggttcaagcgattctcctgcttcagcctcccaagtagctgagattacaggttcctgccaccacacccagctaattttttgtatttttttgtagttacggggtttcaccatgttggccagactggtctcgaactcctgacctcaggtgatctgccctcctctgtctcccaaagtgctgggaatacaggcgtgagccacggcacctgacccataacagcatttccacaatagccaaaggcaaggcagcctaagtgtccaccgaggggtgaatgatgagcaagagcaaatgtggtccatccatccagtagaatattactcagccctgaaaaaggagattctcacacagccacagtatagacgaaccctgaggacattatgctaagggaaagaagccagccaaaaaagaacaaatactgtagggttccgctgatatgagaggcaccctgggatagtcaagtccacagagacagaaggtagaatgctggttgccaggggctgggggaggggcaatggagagtgactgtttcatggggacagagtttcagtttgggaagatgaaagagttctggagatggatggtggtgaaggttgcacaacaatgtgagctgtgcaaatgggtaagatggtaaatgtcatgttatacatatttcaccacaataaaagaaggtttggggaaaagtacatgtcagccccgtgggaaggcagcttggcaacatggttgaagacccacaagaatattcctggcctttggcaaaggaatcctacttctgggaattcaaataagggaagggtcctaatgcatgaaaacattcatcgaggcgttctttatagtagggaaaaatgggaaccataagggactagttaagtaaattgtaggacataaattctcatggtgattggagccattcagtgcaacagctgacaaagggtttgtaatacacagggagcgcttaagtcaaaatgttgaatgaagaaaaagacacaagttggtatatgtggaatcatcagatttatattttaaaatccctaaagagtaggcaaaaaaagaaagacatcaaactggtaagcgtgtttgtcctcaggacttgcagtgacttttcttccattttccgtgtttctacattttcccagtattctctcatgaagcttgttctaatttaaaaactggagaaaacacatttctacgattttttttttaaaaagcacccgccttgctatgttctgttttaagatgtttttcaaagttctggtgcagcacagcttggcaccgtaactcccaaccccttaaaagaaagcgtgcggagcaaacagggtccggatctgggggcggcctggtgtctgcgcctgtttggagcagaggcttcgggccttggaacgaggtggggggctggcccagatgtgtattcgctaaaggatgctgtgcgcgggctgctgcgggtcaccggcgcagactccttggtaaacatctagcagccagacacctctcgggaggggagcttggagccacttgaaaggtagctggcagctagaagcgtgatcggaaaaaggcagtcactgggagttcatgcaaacgagcggcctcacgcgataggaaacatcccggcttttctgtccttgccaaaccaggaggtgagagaagatgcagcaatatcacagagacatggcagggactttttgttacaagagttaattagaggccgggtgcggtccttacgcctgtaatcccagcactttgggaggccgaggccggcggatcacttgaggtcatgagttcgagaccagcctagccaacatggtgaaaccctttctctattaaaaaaaaaaaaaattaaccaagcgttgtgttgggcgcctgtaatcccagctacttgggaggctgaggcaggagaatcgcttgaaccggaggcagaggttgcagtgagccgagatcgggccattgcactgcagcctggatgacagcaagactgtctcaaaaaaaaaaaaaaaaaaaaaaaaggccaggtgcagtagttcacacctgtaatcccagcactttgggaggctgaggcgggcggatcaccttcggtcaagagttcgagaccagcctggccaacatggcaaaaccccgtctctactaaaaatacaaaaattagccaggtgtggtggcgtgtgcctgtaatcccagctacccaggagtctgaggcaggagaaccactggaacccgggaggcagaggctgcagtgaaccgagatcgcaccactgcactccagcctgggcgacagagcaagactccatctcaaaaaataaataaatacataaataaaagaaagcagcttaatccctcctttgtgatgaaaaagtttcttccaaaggcaacaaaaaggttgggaaaggagtggccccaagatctttttttttttttttcttgagttggagtctcactctagcccaagctggagtgaagtggcatgatctcggctcactgcaacctctgcctcctacgttcgagcgattctcatgcctcagcctcccgtgtagctgggattacaggtgcatgccaccatgcccggctaattttttgtattttagtagaaacgaggtttcaccatgttgcccagggtggtctcgaactcctgagctcaggtgatccccctgcctcggcctcccaaagtgctgggattacaggtgtgagccactgcgcccggcccccaagatcttttaaacagcgacgagaattaaaatctgcagccctagcccagaccctcacaagctccaggggccaatgaggcttctgggtgattgagacagctgtgttcctatcaggaaagccgagccaagatgtcatccttgactgttagctggtggtgacactgcttgggagtacttggcttccctcacctccaggccgcccaatatgctgttctctctgtctagaattctgttccctctgctctcctcgcctgtctagctcccatgcacccctgctcatcccacccgcttactggaccacatgccccaaacttacttctcaccacctcctccctctccatgctcctgccagcctgaactacaggcttcaccacaaggtggccacagctttgccaacatcctgcctggtgtggaatgcaccttctcctcaccttccctggctaatggctgctcatccttggaaccataggtttgagcgccttgttgatgctcccacagcctccctgggctactttgtcctgttctataaagacctgcctgtctcatctgggcacggtggctcacgcctctaatcccagcactttgggaggccgaggcaggcaaatcacttgaggtcaggagtttgagactagcctggcctacatggtgaaatcccatctctacagaaatacaaaaattagccaggcttggtggtgcacgcttgtaatccctgctactcaggaggctgaggcaggagaatggcttgaatccaggggacggaggttgaagtgagccaagatcacgccactgcactccagcctaggcaacagagtgagactttgtctcaaaacaaacaaacaaacaaacaaaaacaagacctgcctctctctccctacctgtaacctccccttggggcaggtgccatgaatccttatagctgagcatggcacctagcacacaagaggtgcccaataaatgcttgcccgatgaatgagtagactcgaggcaggatttgtaccttcaaggagtttataatccagtgagagagtggagacagcaggcagtcctgacagtgtggatcacattgtcccaagtgtgcctggaagtcatgatccctggatgagtctctgtttcacactagccagcatttagtgagcacctgctatgtgccacgtgctttgccaagtactttactcacactgtatggctgagatccccaaacacttcatttactagtgaggagtcaggctcagggagcagaaggacttcctcagtgtcatgcccaaagtcactgctcaaaacctgggtgccctcctactcaggagtccatggagccccagagagaaggggctgcctaggaagggggtgaagggggtgctggtgcccatggagacatggaggtcccacccgcccccctcccagtcttcacctgctggctgagccagcagctgggcacagcagagcctcccccggccgggccccgcaccgcccacgccaaacagcaggagcgccaagctgtgtcctctccagccagctggaacataaagcccatcaagaatgacaccgggacagtcataaaatcaagctggcccacatccggcactgaccaagcagaatgagctcagtacgaagaggcttattttgggaaaatggaaacaaaacaaagccctataattggagccatctgggcagcagtggcctagggagtggggcgggaggggctagggtggaaagctgggctgggaatgcatgggtgaggctgccctgcccacctcgagcatcagaaccaggtgggtgagctgctcccagcctacaggggagtcacacccagcagggtcccttagccccatctggccacccactgttcttgttcttcctctcccagccaagctcttggcacttctgggtgtggtgactccctataaggagctggggactccccatggccataatgccagataccacaagaccctggctgaaccagggataggctccatcacagccctcccatcttggcactaagtctaagccccaaatatgaatcaagattgccaagtctaaaaaaacaaaaagattgccaagttctcctctaacctggggagaccaaacagttttccttggattgagtgttgcctagggctttgtgttaagaaggattctgaggtacagtctgagccaaaacatgactgagacatgactgcatgtttgcaaagagaggtggcagggcattccagaccattgcataagtcagggaacagacgaggggctgagagaatgacagagaggagggctaacacaaggaattccagagaatgagctagtgatctggtgaatactgaggtcacttgcgagaaggaggtgattcaccagcttcttgttttggtgcatagagagactaggggaggaaggagggtgcctttatttttcccccccaaatacatgtaacacaaacgtggagtctggctttcggttcttttgggtatatccccagaagtggaagtgctggatcatatggcaattctattcttaggttttttgatgtttttttttctccccagagtctctggcttcttttaattagttttaacctttaagcttttgtaagcgtaatcaaccagctgaggatggtaggggatatttcccaacacttctcgtgtaaactcaaattgtaggttcttgcttggagtaacacaggctcttcactgcttacaaggttattcttgagttgcaaaaattctctctccgtagtttttcctggattcctctattcaatctcggctgccacagaaagcagaaagcagtcagagagaaagcacagggacgctgtttttgcatctgtagtggaaaccttagcagacagtaactgctctggggctgtcaaatagatgcattgtttttagttttttcgggaaccaccagtttcccatagcgtatgcaccatttcacattcccacccacagtgcatgagggttccagtttctccatatccttgccaacacttgttatcttctgtttttttgataatagccatcctaatggatgtgaggtccaataatacatatatataactgtgtagggaaaaactcctcaaactgtgtttttcctctgctctcagacgacagccatcatcaacacagaagacttctgtgaccaaatgcgtgggtttttcccccacccaacaagcagcggtaccagctgggtgtcctctaattcagttccaacacgatctagtcagagatagcatccggtcccacaggttgagggctcagtccccaaggctgtcttccgccacacacaccagtcacaagtctaggcctcacgaacttctgacagattagcttcaagttcccatgaccccttctttgggttcaatcaattcactggagcagctcacagaactcagggtaacacattgactggtttattataaagaatattgcaaaggacacagatgaagagatgagcagggtgaggaacggtgaagggacgggagcttccatgccctccctgggtgccaccctccaggaacctccccgtgttcagccatccagaagctccctgaaccctgtcctcaggttttcatggacgcttcatgcatcagcattgcttcccttgggcgtagggtgggaccctctcttggagggtcttaagacccacggtcagaaaggtgggggaactttagagtgaaaggagggcaggagaaggcagaggcctgcccctgaggcccaacacacccaaaattctaatgaaagaccgtaaggagggctatgggagtcataagccaggagctgtggatgaaaacacacacacacacacacacacacacacatatatatgtatttttttaatagagagacatggtctcactatgttgcccaggctggtctcaaacccctaggctcaagtgatcctcccaccttggcctcccaaagtgctaggattacaggtgtgagccaccacggccagcccgaaaactgacagctatcataacaccacaataacatacatagtatatataacagctttaggagatacaattcacataccgtataatttacccatttaaactatacaatccagtggtttttagtatatacacacagttgtgcagccatcaccacaatcaattttagaatatatttatttatttatttatttattttgagacagggtctcactctgttgcacaggctggagtgcagtggcacgatcacagctcactgtggcctctacctcctgagctcaagccatcctcccacctcagcctctcaggtagctgggatatgcaagccaccacgcccagctaattttttaatttgttcttatttatttatttattttttgtagagagaggatcttgctatgttacccaggctggtctcaaactcctgggctcaagcgatcctccagcctcagcctcccaaagtgctgggatgacaggtgtgagccactaagcccggcttggaacacctttattaccctgtacctattagcagtcactttctgttttcccccagtccccatcctgaacccctatcctgtgacaaccacctgtctccttcctgtctctgtggatttgcctattctggacatttacgtggaatcccataagatgtggtctttggtgattttagcttctgccacttaacgttctcgtggttcattcttgtggttgcgtgtgtcagcacttcatttcttcttgtagcccaatcatattccatcatatgatatatgccacgttttattgattcattcatcagttgctgggcattggagttgttcccactctttggctgttgcaaagaaagctgctgtgaacatccatatgtacgttttgcgtggatgtatatgttttcatttctcttgggtatatgctgaggagtggaattgctaggtcctgtgataaccctgtgtctaacattttgaggaactgctaggcgctgttttccaaagtggccgccccattttacattcccatcagcagtctatgagggttccaatcccccaacttcctcaccaacatttgttattacctctgttcatgctacccagccttgagggtgtgaaggaaatctcattctggttttatcttgcatttccctgctggccaatgatgtggagcattttttcttgtgtttcttggccattcatatatccactttgcagaaatgtctattcaaaacctttgccatttttgttttttcttttttgagatagagtctcactcggttgcccaggttggagtgcagtggcgtgatcatggctcactgtagcctctaattcctaggctcaagggatcctcccacctcagcctcccaagcagcttggaggcacgggccaccatgctcagctcattttttatattttttgtagagatgaggtttcgtcatgttgccctggctagttgtgaactcctgcgctcaagcaatctactcctcctttgtcagtttttaattgggttgtctttttgagttgtaagaattctttatatattctggataagtctcttatcagatatatgatttgcaactattttctcccactctgtgggttgccttttcattttctcagtggtgttccttgaaggacagaagttttggttttgattaagtccagtttatgtattttttcttttgttacctgtgcttttcgtgtcatttctaagaaggctcttctagtgcaaagtcccaaatattatttactcctctgttttcttctaagaaagaagttttagcttttttttttttttttagacagtcttgctctgtcacccaggctggagtgcaatggcaccatctcagctcactgcaaactccacctcttgggttcaagcaattctcctgcctcagcctcccgagtagctgggattacaggcgcccaccaccacacctggctaatttttttatttttagtagagacagggattcaccatgttggtcaggctggtctcgaactcctgacctcaggtgatccacccgcttcggcctcccaaagtgctaggattacaggcatgagccaccgcacccagccttttagctcttacctagagccaagatgtttcagcagacgactagggtggcttgtcctcggcacctaaggaagatggtggtggcagtgggcagtctcttgggggtctctgggaccagggaaggaaggatcagagaatagaaagccggccatggggaggggactgggcatcttctgtgctgctctgggaagtgagaggctactgccaacggtagagatgcaggagggactccctgcgtgggccgttcttcccttcattcattcgttcctgcaccaacactcagtgaatgcctgccaggtgtcaggcaccttgctaggcactgggatggcagagattaccaaagagacgcccggtgccgacggtgaggagctctgtccagtgtggggagccaccgctgagcaggtaactctgcaggaggctagctaaggagtcacattgcaggaggccccctctcctgtcctggggggatgtcaggggtgtgcattagggcttaaggttgagttgggcttctgtgaggagggggtacctggatggagtcctaaacataggaggatggggagagatggtggcatttcaggcagtggggaaattgcctttttaaattcaggctgtacttccttcttattattgaaatcatacccgctctcagtgtagaagccagatacttcccagctcgaactgtggaaggcggcagttctcccgcgcccgcaccccaggctccctctccgcccggcgctctctgagccatttctgttccctgatgcatccttatctcctagccctgtgcctgcactgccatgtcagggtttttctcttcttaggcattgcctgttgacatcccatgagggaagaggaggaattgggaacccccttccctctaccacagccatcctccctaccccagcctcccagggtagctgagtcattgtgacggagccaggtctgctgttgaggatgcttccagggtggagcgcagggcaggcaggtgcctaaagcctgcagatcctccagctgggtgtcgggggcatgtgggggagtggggctaaagcccagggaagggagaggccactggaagctgggggttcagggagcaagcagaggggctcaggagggggccaaggcaggcaaaggagaggagagcaggtggaggccccgggagaggggactttcgaggaggtgagcatgatcagaggcccctggctgtggccaccaggggctgtgggtgaggtaactttgcaagtacagtgtcttctgtggagtggcccagagaagctgaattgcaggaggttgaaggttgagttgggagatgaggctgtggggcagtggatttaaacctgtcttgggaaatttggaagatagaaacttggagcaataaggggtccagggaggatttcgttaggattaggagatatgtggtcattgcaagggaatgaggccgaaggcacagtgcaaggatcagcttcgttggggtgtagtaaaagaaataactttctaacggtagagcaggctttcttagaatgtggcaacatcccattgctggagatatttgagcaaacagagatggctgcctctcaggggtgttgcaacggagattcctgtgcagggtggcgagttgacccagaagagggacagcaaatacttgggaagcatgtgggcattgtcctttccagtgccccagcaggcatcatgaatggagggtggcttcccctgtccagagctccagacagcttccagcgatccatccacgctagtgcctgcaatgcagccgtctgtccttcctagaccaggattccatacctccttccccttccataaaatgggccccgttttcctggctgcagggaaggcttatgagatcacgtatgtgaggctgaagttccacaccagtcgccctgagagctttgccatctacaagcgcagccgcgccgacggcccatgggagccctaccagttctacagcgcctcctgccagaagacctacggccggcccgagggccagtacctgcgccccggcgaggacgagcgcgtggccttctgcacctctgagttcagcgacatctccccgctgagtggcggcaacgtggccttctccaccctggagggccggcccagcgcctacaacttcgaggagagccctgggctgcaggtcagggaggagcggggcttcggaggttgggacggggttgggactgggtcacggcagtaggagggtctgatgtgccaggacacacagggtgggggacctgcaaaaccccatggttttctttttcttcttttatttttggagactgagtcttgctctgtcgcccaggctggagtgcagtgacgcgatttcggttcactgaaacctccgcctccttggttcaagctattctgcctcagcctgccaagtaactgagattacaggtgcccgccacgactcctggctgattcttttttgtatttttagtagagacgggggtttcgccatgttggccaggctggtcttgaactcctgacattaagcgatccacctgcctcggcctcccaaagtgctgggattacaggcatgagccactgcccttggccccaaaccccatggttttcaagctttctgccacagaaggcttgttgcacccaagtcttctgtggatgccgctaatgaaccagaaggaagacgggctactcagtggaccagagctgtcccttccctggcctcctggggcagagccctgtggctcccaggagcctgtgagggctgtcaacccacctggccccttccttatatgggtgtggaagctgaggcctggagggagacagcattttccaggggcacaaatgaggcgtggaagggcccaggccagcacctgagtgtccagactcctggctggtgttctttccagaactctccgctgaggggcctcgcttcctcctcctgtgaattagtaacagggcctgcccatgtgtctccaagggctcctatgaaaatggcaaaatgtgacaggaacatgggctttggagtcatagagccctgggtcccacgctgtaagtccgtgccaaccagcagcactttctgtgatgacggaaagcgcctctagctgcattgtcccatgtggtgccaccagccaccatgagatgtggccagcgcagttgaggaactggatttcatattttattattaatattttattattaaatattaataaatttaataaaataataattattttattaacttagccacatgtggccagtggctgccacgttggagagactgctgtggggtagcgggaacacacacactgtgaccagtgcggtgcttggcacgtagagcgtgcccacccacactcgggagatacgcgcgcatgacagctccccgtccttgtcctcacggtagagaggacggctggcctgtcgccatgtcagtccattcagggccctccagttcagcccacgtaggtccacccaggtgtgcggacctgccgggatcggcacctatctgtgtccacgttgctgtgtgtccatagctgttcatctccacacaagtgtgttgggtggctctccagtccacaggtccccaacccccggctgcagaccggtactggtccatggcctgttaggaaccaagtcacacagcaggagatgagcgcgggcaggtgagctttcctgcctgagctccgcctcctgtcagatcagcctcctgtcagatcagcctcctgtcagatcagctgcggcatcagattctcccaggagcaactgggttgcgtgtcctcctgagaatctagtgcctgatggtctgaggtggaacagtttcatcccaaaccaccgcctaccccgttcgtggaaaaatcgtcttccacgaaacctcttcctggtgccgaaaaggttggagtaccgctgctctagtccatttccccgggttcagacccaagacgtgtccaaacccagggaacctgccctctcctcccctccagactttcagagcgtctcctttgcccatctgggataatgagggaaccagggttagaatcctgtttccagaggggacactgacacccaaaaagaagttgcgttctgtcagcgatgtgcagcatgagaacacacggagccggccgtgtcggggtccccaggaccacccttgggtttagtggttcgctataaggactcacggaactcagaaaagctgtgaggctcagagctgcaattttttgcaatgaaaggctaccggctcacatcagccagtggagaggcgcccggccaggtcacagaagggaccaaccaggctctgagcttccagctgttctcccaatgcagtggagtcacacgcacagcacatatttccccagagccacatgtgacagtgtgcgtagagtactgccaactttgaaggccagagttttttaataatttttttttcttaaatagagacctcgtctcactatgctgcccaagctggtctcttactcctgggctcaagcgatcctcccacctcagcctcccaaagtgctgggcttaaatgtgtgagccaccacacctggcctgaagtccagggtttttactggaggctggcagtgtagacacggctgaccacctgtgtggctgacctgtctccagcccctccagaggtgaagccgattctgtgtggcccgaggcccccaccgcaaatcacatcatccgcatagactacctagtgtggcccaagggaagaccctcttatcaggagggacatccaaggatatggaggtcactcccctggatccagggcaaagggccaggcccctctttgggcaagccgaatcctttatcacacagtaccacatctctagacgtccaggccctgcttgtcccactaaaattgtacatgtcaccatgattttatttaaaaattacaatttcttctccacggggctccaaagctctgtagattagaaaacgtcacccgaggtcagatgaagacaggcagggagggccggcccccgctcccacctgcgtctgtgcagccaccaccgtggggacacccttggctgttggaggttttctgtcttgttgcctcttgtgttctggacactgtccctgatggagagatgaccttttgagaaatatctcccctgctgcttctggacagaaaccaagagcagagcaggacaaagagaggcaagtctaccttgctcttttctcctcatgctccctctggacacatttagggggcaggtgctttctcagaggacacagagcttggaaggaaggatgtggctgctgggtcttgggtccctctgacccccaaggaagggcctaggactttggaggagaaggtcgacctggctgttgcagagtaagaccgccagagttgaggggccgcctgagcaccccttggacatagagcccaagctgtccacctcctgcttctccttaatgccatggcctgagtcctgggatccatctaaaatcaactccagcacccactcatagcttaagctggagttccagtgcctgggttcagtggggattgccctaaaatgactttttttttttttttttgagacagtttcgctctgtcgcccaggctggagtgcagtggcacgatcttggctcaccgcaacctctgcctcccaggttcaagcaattctcttgcctcagcctcccaagtagctgggattgcaggtgtgtgccaccacactggctaatttttgtatttttagtagagatggggttttgccatgttgtccaggctggtcttgaactcctggtctcaagggatctgcccgccttggcctcccaaagtgctggcattacaagtgtgagccatcacaccaggccctaaaatgacttttaaggcatcaagacagtccccctgcaattgaggctaaggctgctctctcccagcatccatcctatgtctcagagattttgaccccattcctttgtggtcattgtccttgcagactgatggatcaggtcacaggccaggaagcagaggtgggagaccttgggcaggtcattgctgtctctgggccccactggcatgataagggctttgggatagacacaggaaggcagaccagcctcgtggttaaagctgggaccctgggatcagatagaccagaatcccagctctgccatgcactggctgtgcaacttggaacagaagggttaccctctctgagcttcagtctcctcatctttaaatggggttaataacaatacctacttcagggttaccgtgaggcccgagccctaaccatacaatatgtgtcagtagccgccgcacctcctggctctggtatccagttggtttgagttctccaggtggcacttttttctggagaaggaatcgccacagcgcgttcagctctggactgcgggacttccccaccccaggcctcagctccttgtccagtagccggcccagcagcatcagtacctgggcacttgtgagaaacgcaagctccccagctccaccgctgacccctgaatcagaagctgcactttaaccagatccctgaatgcacgctgagctttgggaagtgcatcctggggtgatccaggcctgcaaactcaagcacaagcttagcttggtgcagaggctcccactttagtgtttgggtgctggacccctctccctggccaaggcatcctctggcagaggccctgggtccccggcagtagctccggttgccgagctctcggggagcaggagggccgtcggcctgagtcacgctggggcaaaaagatggcctgccaggagctcattttctgcactgatgggcctgattgctaaagcaggggctcctgggcggaatcaaaacgctgattaatattcagctggagctgctgctgctgctcacagcaggcaggtgaaaatgtcagtcttcacgtgggttttccccgacttcccctccacgctcttccatggggaagctgctcattcagggatcagcaggtatttatcgagtgcctgctagggccaggcagagcccagggccagggaaacagtgagaacaaggggccacaagtccctgctctcgtggaagagatgtcacctgaggcaggtgacctgtccacaggagcctgaccctcagcatgtgaggagccaagaaacccggggccagctgcatgccaggccccactgagcaggggagaaggttgcgggggcacaccgtcccccagctgtatccctggaatgaggtgcaggagctgctgggaaaagccaggtgacctgcacaaccgggtcttcagtgggctgctttgacccctgcccgcccaaacctcagctgcttcctgaccacgggcccgacctcacagccagcactgatacttgctaccctcccccagacatgtttgtaggggaggtgctatttttgttccaattcacagatgggaaaatggaggctctaagacactgaatgcagttgcactaatcagtagcctagcacccaggttggggtgacccccaaagcacagcctccttatttctgcagtgttctcagaattggcctgagctcggcctgttcctgtgtcccaggagctcccggggcagccagctggatctgccagcagagcgatgggggtaaatactaaatactcaggaacctgctgatggcaccctctcccctctgccccaggagtgggtcaccagcaccgaactcctcatctctctagaccggctcaacacgtttggggacgacatcttcaaggaccccaaggtgctccagtcctactattatgccgtgtccgacttctctgtgggcggcaggtaggagggaggagggaggcagggtggcagggctccaggacccaaacccgagagcggaaggtggctgctgtggggtggggggtgggggggcacagaagccaggtgtgccccaggggagagggagggagcacctgccattcgaggccctgggggtccacacccagcccacctcctgccgggtcccctgcatcagctgatttgccatgtgccagacactgggtcttggttcccattgtcccctcagcctggaggttccttccttcctccctccctccctcccttcctcccttcgctctcgctctctttctctcgctctcgctctctctcactcgctctctctctcttgctctctctcgctgtctctctctcttgctctctctcgctctctctcttgctctctctcgcttgctctctttctcactcgctttctctctctctctctctctctcactctctcttgctctctcgctctcactcactctctctcactctctctcgctctctctctctctgaaggagtttcgctcttgttgcccaggctggagtgcagtggtgcaatctcagctcactgcaacctctgcctcccaggttcaaggtattcacctgtctcagcctcccaagtagctgggattacaggcatgcgccaccacgcccggctaattttgtatttttagtagagatggggtttctccatgttggtcaggctggtcttgaactcccagcctcaggtgatctgcccgccttggcctcccaaagtgctgggattacaggcatgagccacggcccccttcccctttctagtataggggtgttactggcctagagaaaggcgcttctctctggcccgtggtcctggtcctggtcctggtcctggtcctatgcgccattagcacccatcagtgctgtgggcagtttgtttctcctccaacatctgtcccctccaggaagcaggggctgcctaggaggtagaggcccatctctcacctcaagtcccaaggcctgtctcgcacatggccacctggcagtgggtgcccagggagggctgtgggacgagggaggcatgaacagcttccacgtcagtgtttctcaggtttctttgaaaggagagaggaaaacaggtgcgttcctgccccagtcacctggggatggcagacattgatcagattgctccccagtgaacacatcagcccgctccaggatgacaaggaaggagaggaaagggagagcgtgtgcctggggtcggggaggacaggagctggtgctgcagatgggacccaagagtgggaaggctggggttgaggactaggggacggccaacgtggctgggtggagggcaggcgggtgggcgtggagaggttggcagagtgtcagggcctgggcgggtttagcctcacccagaagtcaagaggaagctgtggaaggatttggtcagggtagtaacagagtcagatttttaaaacacccccaaacccctgacagccaagtggggcagataggaggagagaggaagtcgaatgtcaggaatcgaggcgggaggcggcagcttggaccagagggctggggtgtggggcgcgtgggtctgaacgcgactgaggatggaaacgcagctctgtgtgtgaaccatgggccatgggagtggggagcggggatgacactggactctgggcctccacagttcagaggcgcttgggtggcattagagagatggagaagggggcggcatgaggctcaaatgcctgctttgggtgtgtgagctccagagaaggccaaggctcgtcactgagagcccctgtggccatgaggatccccctgctccaacctgcccccttatgtgagtcggtgggaggagctccccggggaaggcggccatgagctccagtgcctcctgtcagggggcttcgggccagaggacatctgggttccagctgccagagccagaccaccctcagaccacagctggctggggcaggctgctcatggcaggggacaggtggccccaacagcctgtgttcacagtggagcccgtggagtctcactctcctttcctgggtcagtgggcttcacagggctggtgtttacagcaccccctccaaggcaggggcagtcccttgtgacttccctggtgaccactgtccccaggattgcctggcgcctgcctcaccccaagaaaccctggggtgctgcctgcctaaactgggccttgcgtggaagccgtgctacgtgccctaccacacagtgtgtccgctatcagctaaagcacctggagccgcaacagcggttggtgattcgtcaacatccacagagggcagagcgtggaacgtggcttaagggagccactgagtggccacagaggagtgtccaggagctcagggtccacgtggagtcgatgaggacgggcttcagctccagctcagccacttagcatctgtgagttccaaggcctgagcctgatgcctcatgtgtggaatggggacgctaatgtccctcccacctctggtgaggctctagggagaagctattgccttggccaggggcagaagccatggcctctgagcagctcaggacagggacagtggtcgggacagggacaatcactcacagggtcaggctctgccgagcatgccgcgggctcccagggcacccctgttcctgcctgattccacctgtctcttgatcctgtgtgtggaatggggccacaggccggggctgctctcaaagaccccgtatttgtccattcttgtactgctgtaaacacctgagatgattatttatttatttatttatttatttttgagacagagttttgctctcgttgcccaggctggagtgcaatggcacgatctcggctcactgcaacctctgcctcttgggtccaagcaattctcctgcttcagcctcctgagtagctgggattataggcatgcgctgccacacctggctatttttgtatttttagtagagactgggtttctccatgttggtcaggctggtctccaactcctgacctcaggtgatccgcccaccttggcctcccaaagtgctgggattacaggtgtgagccaccatgcccagctgatggtaatttattaaaagaggtttaattggctcacagttccacaggctgtacaggaatcatggtgctggcatctgcttggcttctggggaggcctcaggaaacttacaatcatggcggaaagtgaagagggatcaggcacatcacatggccagagcaggagcaagagagcaggggatggggtggggctgacgggtgggtgccacacgcttctaaacaaccagatctcatgagaactcactctacagtaccacgggggagggtgctaaaccattcaggagaattcaacctgatgatccaatcagctcccaccaggccccacctccaacattggggattgcagtttgacacatttggtggggacacagatccaaaccatatccgaagtggactcatgggggatttggagtgactcaggagctgtccctgtttggggtaccttctttcctgccctttcggacacagttgagggatagctgctggaggcggttccctttgccttccacacctattgctggtgtgactgctggcccactctccacttgggagactaaggtgacttcttcctgggtccctctcagcccccaggtggggctcctcccaggcagaagctttctgtgccaggcacttgctagctggtggctttgggcagcttctctgtgcctctcagttcacccatccattctatgggggtggtaacaggctggtgaagatggaatgggtttgttccagagctcaccagtacagtcagttctctgttactgctgcccccagggcacatagtaggtgttcagtgagggccaagattgagggtggagtctggctcacacctgcaaacaggggctacctggtgactaactccttgtctgccctgccggcacctgcgggtccccttcctcctctgtgtcttttcccaggtgcaagtgcaacgggcatgccagcgagtgcggccccgacgtggcaggccagttggcctgccggtgccagcacaacaccaccggcacagactgtgagcgctgcctgcccttcttccaggaccgcccgtgggcccggggcaccgccgaggctgcccacgagtgtctgcgtgagtgtctgagtgtcacagggcatcagggacccgaggctggtgttgcaggcggggaaaggaactccccaaaacgtcgtggtgggggctgctcctgggtacgccccgggggcagctcggggtctctgtgctgctgcagagataaggacgagcagaaggggagcctggggagggggtgcatttaagcctcagtctctcctccactaagtagcttccctggaccaactctacccatgcagaggcgcctgtggtgggagggccggaaggtccccgacttgcttctttgtgttaaccgctcccaccccagctgctaatcggaaccaggctacccaacaagcaagggggtgctgatggcccacccagcctctcccacgggcccccaggcagccctttggtgtcccagcccccatgtgatgtggctttgaccacctaacctcagagaagcgctggagagaggatgatgccatcatgtcttctccagggacacaggccaagagcagggacccactgacttcccttctggctggggcactggctgcaagccccaccctgtccccagacagcctggtttcctccaggctctccatgcacagccgccgttgctgggggccagatcccagctggtgctggtgctgctggcaggagacacatcttcactcacaggctcgctgggcgggcagcttggcctctggaccccgctgtcctcttgggcctgggccactggcgaccagaactggggctgggccgggggcggcttgttctgagggtggggcactgtctgcaggagctgccctcgctggcctgcctccaccagagagtcctggggccaaggaagctgtgctggctggcttccactgtcccagcctgctgctgtctccatggtggggacacagaggccagactgcttctaccatgtcctcagctccatggtcacgtctgtctctcagtcagcagcctgggagccagggtttcaggcttgacccttcatccccaccctcacccgcagctgagacagccccgagccctgaattccgcctcatccacatcgctccagtctgtctaacttctgtccattgcagccgatgccttgggcctggccctgcctcctctccctgcacacccgaagcttcctcttccctgctctccctgttcccagccctcccctaactgcagctaaggctcttttcttgaaacacggcctcactctgtcacccaggctggagtgcagtggcccaatcatagctcactgcagcctcgaattcctgggtgcgtgttcctcctacctcagccactagagtagctgagactacaggcacatacatcaccatgccaagcaatgttttatagagctcggctctcactgttgcccaggctggtctttacactcctaggctcaagcagtcctcctaccttaccttccaaagtgctgggatcacaggcgtgagccatggcactgggccaagactttctaaaggacaaatttagtaacatctattccctgcttaaaccttcccacggctccccctttgctcccagctaacgtccactgaccacggcagcccagcctccctggagcaagctctgctagcctctgacttcacaactgcccctgcactgcaggccccccactgcacaaagtccttccttccctgccatcacacgacatgccgtctgcagccagcctcatggcacacccgcaccaggccacgcgtctgtctctgcatgtggggtatcccctgggctttcgcctcctgtctgcgacgcccttcccgccccctcttcctctgcctggcctattcctcactgctcagccttcagattcagcgcggccatgacttcctctcggaagccttgtcccaccaccccagcacagctgcaggggccccttctttcggctcccaaagcccccagcctctcctgtctcagccctgcacctgcagggggtttgcttgcttgccgtctgggctgtgggcagcacgagggcggcaggtgtaaatgggtccgcacctttcatggatccacccctgagctcactctgggagccaagacagagccagtcctgcacacagacttttaaaaatgatttaatgggggaaatgaaaggtgacttgtgctttctgtacccctgagtgacctcacacaatagtgagagtcacactattatggcttggaggacctccaggagattttggagagagccaagctgccactccagaaggcagccagcctctgatcggtgcccatctatctgggtgtatatccttgttgcctgggatggtcttctttctgcctgttgttttggtgtatttactaacagtgtcccctttgctcttaagagtgtcctgttttggaaaatcaattgatcaatgtctagccttgatcaagctgggcctgaactccattctggaccatgctcttgcccttctctttgcactgcctgctcatttagcacagggaggctgactgacacagatgcagcctcctaccacatcacaggggactcacacacctttccccactcctgcccatagcctgcaactgcagtggccgctccgaggaatgcacgtttgatcgggagctcttccgcagcacaggccacggcgggcgctgtcaccactgccgtgaccacacagctgggccacactgtgagcgctgtcaggagaatttctatcactgggacccgcggatgccatgccagccctgtgactgccagtcggcaggtgagtggactccacatccccagcctccgaccctctccctttcctggcctcaattgccctgtgcccttcctctcccaggctccctacacctccagtgcgatgacacaggcacctgcgcctgcaagcccacggtgactggctggaagtgtgaccgctgtctgcccgggttccactcgctcagtgagggaggctgcaggtgagggcgaggggcggcccagtatggacacattgcactgaatgacaagaagcaggaggaacaggctgtcagcagtccctcccctccccatcccttcctgtctgcagctacctcgccctaatcctggtgaagactagagacactcagctcctggagaggccaagagacaaaaacagaccttaatgagaccaggctgagccctgtggaagctcagcggatcttgcaggtggagggcaggcttcctgtaggaggtgctgcataagtgcagggagaggggaaggacaggtgtttgaggtggggtggggggcacgggaggcctctggaggagccgtggatcagtgagaagcaggagtgggtgagggggaggctgcgtggaggctacagcaggaacgcctgggcagcctgcatgggggtttgactgtggagagggagagcagggcagattccagagcccagtgcaaggaggagctaataggacatggtgaccagggggtggaagaggaagaagaggtggaggctgaccttcggggttctctgggcctctggatagcagggcacgcagtgtggggagcggggtgggagaggctgagtgtcatctgggtgcaccgagtttggtacctagtgggacagctgaggggagagagggacaggggctcctggggtctggaccttaccccaacacatttgccatcacttgattgagaaagtatacaatggccaaaaaacaaaaacaaaacaaaacaaaaacctatgataaatttagaagctttttttttttttttttgagacagattcttgttttgtcaaccaggctggaatgcagtggtgccatcttggctcactgcaacctccacctccccggttccagcaattctctgcctcagccttctgagtagctgggattacaagcatgcaccaccatgcccactatctctatttttttttttaagatggagtcctcctctgtcacccaggctgaagtgcagtggcgcgatctctactcactacaacctccgcctcccagactcaagtgatcctctcatctcagcctcctgagtagctgagattacaaatgtgcaccaccacacccggctaatttttgtattttttggtagagatggggttttgccatgttgcccaagctggtctcaagctcctgggctcaagtaatccaccctcctcggcttcccaaagtgctgattacagacgtgagtcaccgcgcctggcccagaagcacttttaagtgaacttgctttggttgataacgggcatctttgtatatttgagaggcagcagaaacacattggggatatctaggagagctctgattccttgtaaaatatttggtggttctgggcataaaactgaccatgagatggggcctggctgcttccctggggtccctctgtcctctggacctttgcaggtgccacacctcccacccctgccccctctccccagcctgtggctcacagcctcctgctcattcttcaggtctcagctgagcagccccgctctcgggacaccttccctcccacctgcccctcgcctgcacacccaggctgagtcagaggccccacagtgcaggcacagcctctcgtacatctcccacaacacgtatcgcggtacagggtctgcgtgatctgtctgtctacaccagactgggattcaccagggaggaaccatgtcttattagatgagtggatggatggagggagggatggaaagatgcatggatgggtgaatgaatgggtggataggtggctgctggacagaaagaaggaaggatgaataagtggatggaggagtgaggggatagacagaaagattcatggaggccgagcacggtggctcatgtatgtaatcctggcactttgggaggccaaggcaggtggatcacctgaggtcacgagttaaagaccagtctagccaacatggtgaaaccctgtctctactaaaaatacaaaaattagctggacatggtgatgcatgcctgtagtcctaactactcaggaggctgagacaggagaatcacttgaacccaggaggcagaggttgcagtgagccaagatcatgacactgcgctccagcctgggtggcaaagtgtgactctgtcccaaaaaaaaagattcatggatgatgagtgagtgcgtggatgacagatggaaggatcctggatggatgtgtggtgggtgggaagatggaccactgtaccagtgatggatgggtcacttccttggcaagatgggaacagtaaagccaggtcagttacctgcgtcagcctcactcctgatgttggcagcagggaaagctcccttcctaggatgggctgttgccattctgaatttgctcattgcacattttcctcttgtcctgtctcattggcagaccctgcacttgcaatcccgctggcagcctggacacctgtgacccccgcagtgggcgctgcccctgcaaagagaatgtggaaggcaacctatgtgacaggtttgtgagctaatccagcagtaagcttgctggaagtgacctgggggctcactgatgaggcaccaaagctgtggagtgcggggaggagcaaggggcacggtcttcatggacttgggtgaccttgtcaccctgtgcccttcctggggcaccatgtatctgtcatacaggaagttactcaaaagctttatggcactgtttgtgctttgattcaacaccactgatcattcataagctgagaaaatacatgtcttagcttagaatcctgaaaagaaagaactggaatgataggagagaccatctaatccagggatagtaaatagatggtgctcgtactaccacctgctgtggcagacatcgctaatggagcactatcacaggcctcccgtttcacactcactgcagacatagctaatggagcactatcacaggcctcccgtttcacacccacagcagacatcactcatggagtattatcaacgctcccctttcacacccatgacagacaccactaacggagcactatcacaaccctttcacacccacggcagacctatcacagccctcccttttcacactcaatagacattactcatgcagcactgtcaatacacccctttcacacccacagcagacatcactaatggtatacccatggtacacatcactaagggagcactatcacagtcttcccctttcttacccacagcagatatcactaatggagcactatcacaaccctcccttttcacactcacggccaacatcactcatggagcattgtcaatgcacccctttcacacccacagcagacatcactaatggtataaccatggcaaacatcactaatggagaactatcacagcctccccctttcatacccacagcaggcatcactaatggagcactatcaacccttgcctttcacagccatggcagacatcactaatggtgccatatcaaactttccctttcatagccatggcaggcatcactaatgaagcactactacaacccttctttttcacacccatagcagacatcattcatggagcactgtcaacacacccctttcacacccacaacagacatcactaatggcatacccatggcagacatcactaagggagcactatcacaaccctcccctttcatacccacagcagacatcactaatggagcaccatcaactctcccctttcacaccatggcagacatcactgatggcatacccatggcagacatcactaaggcaacactatcacaaccctcccctttcacacccacaacagacatcactaatggggcacagcagtcttggccatgagccctactataacctcaggatccttcttaacaccctgcttcaggaagcccctacccactgagctggattttgagcctgtttgccatctttgcagtctgatcatggtacaaatggggcatctgaagctctgcaagtcaaaggggctctcccaaggccaggaagtacataaacttcctctttcaagtgttcaagaggcctccaagctccagcagtgcggccagcagacaaacatgggtttagctccttgggtacacactatctcttcttcctggctttgtgtctgacattcaccagagctgcttggagaagtggcagattctggggctggggctggaaaaagacaagataagcccaaggcgtcttacagtgccaggaagcaaggaaatgctgaaaaacagagacagacacaaacaaaacagcccaaaccagaacgtgggcccatgtcaaaaggacacaggagccgacgtgaaagagctctcagggctgaaacaatttgagcaacaaaataaacgatagtattggattataacccagagaataaagtcaaatccacgaatccatactgatgtaaatagatgattgaatacataaatagatgggcatgaagagacaaaccttccttgcagaagaattccaagtaatgaatgtagaaatgaaggaactggaaaaccactgttcagacctcacagtggtaattgctacaggcaagagctgccgatgaatgctgacattggtgggcagaactttaaggaaagagaggatatttgcataacctcaaaatatctattaattactggggtggctttaacatctgtccgtgggttctttgatactcttcctctaggaggtcgagcttaatccccctctttttgagactgggctgcatttagtgacttgctgcttttttttttttttttgagacggagtttcgctcttttgctcaggctggagtgaagtggtatgatctcggctcactgcaacctctgtctcccgggttcaagcgattctcctgcctcagcctcctaagtagctaggattataggcacccaccaccacgcctggctaatttttgtatttttagtagagatggggtttcaccatgttggtcaggctgatctcgaactgacctcaggtgatccacccacctcggcctcccaaagtgcgtgagccggccaggcgcggtggctcatgcctgtaatcccagcactttgggaggccgaggtggatggatcacgaggtcaggagttcaagaccagcctggccaacatagtgaaaccctgtctctactaaaaatacaaaaattagccgggcatggtggcgcacacctgtagtcccagctacttgggaggctgaggcaggacaattgtttgaacccgggagacagaggttacagtgagctgaaatcgtgccactgcactccagcttgggcaacagagcgagacttcgtctcaaaaaaaaatttaaagtgcttgagccaccgcgtccggcctattcagtgacttgcttctaatgactggaccgtggtgattgcacagtggagagactggtagacagcacaggtgatgaaagtcagcatcgcttggatgtcatgtgggtttcctgtgcccccatgtgatatgacgagaagggtacttcacctctgtgtatttctttcccaagcctataactctggtctaatcatgagaaacatcagacattctaaaaatacctgatcagtgcttttcaaaaagtgtcaagatagtggcagacaaggaaagactgagaagcggtgataggttggaggagaacaaggataccactaaatgcaacaccgtgtcctggatgggatcctgcagcagaaaccagacattagaggaaaaagtggagaaatcctattaaagtcgctgggcgcggtggctcaagcctgaaatcccagtactttgggaggctgaggcgggcggatcccctgaggtcaggagttcgaggtcaacctgccaacatggtgaaatcccgtttctactaaaaatacaaaaattagccgggtgtggtggcaggcgcctgcaatcccagctacccgggaggctgaggcaggagaatcacttgaacccgggaggcggaggctgcagtgagccaagattgcaccattgcactccagcctgggccacagaacaagactctgtctcaaaaaaaaaaaaaaacaacaacaacaaaaaaacaaaacctaataaagtctggagtttagttaacttagttttgacaaatgtactgtggtaatgtcagatgtcagcatcaggggaggctgtctgaagcaggtatgggaacaatctgtaatgttcttactactcttctagaattctgaaaaaaaattgtttttaagtttctgcagtgattctagactctcattggtccagctgggataccctggccccgccccttcctggctgattcacgtggccctcgtgggcatgtcctgcctccatttcagatgtcgcccggggacctttaacctgcagccccacaatccagctggctgcagcagctgtttctgctatggccactccaaggtgtgcgcgtccactgcccagttccaggtgcatcacatcctcagcgatttccaccagggtaagagatgctccctgcaaacgcctcccaagggtctgctcccagcctaggcaggtgatcctgccctggggagatcttgcattagtggatctcccattgtggagaggagccacaggcctgcacagcctaggtggggtcgggggtgagatgatggctccccagtgcccacctgcgacccccagctccctccccagtccctgactcttctctttatacccgtggtggggttgggggccgggtacgtgacgctttttggatcctgtaggggaatttcccactcaccccgttgagactggcctcccttggtgtgtctaaacactggggattcaggctcagtctcctggcctccacttattgagcacctgctgtttgccaggcactgtgctgagcacctaacatgcaaggattctcattcccctttcaatgatgaagtaactgagacctacaaaaggtaggccacttgcctgaggccacataacagttgtgagcactgcatttgtcagctcctgagttttgctcctttttttttttttttttttttttttttttggacacagggtcttgctgagtcaccaaggctgaagtgcagtggtgcaagattgcacagcacagctcactgcagccaccacctccctgggctcacgtgatcctcccacctcagcctcctgagtagctaggaccacaggtgtgcaccaccgtgcccggctaatttttatatttttttctaaagacagggttttgccatgtctttagacccaggctggtctcaatctcctgggctcaagtagtctgcccacctccgcctcccaaaatgctgggactacaggcgtgcaccaccatgccgagctaatttttgtattttttttttttttttttttttttttgtacagacggggtcttaccatgttgcccaggctggtctagaactcctgagctcaggcaatcccgcccacctcggcttcccaaagtgctgggattatgagtgtccgcgcccagctgttttgcccttaaccgctgtggtggcctataccgtggtccctgactccaggtggcacagccgcatatttaaagaggaaagcagcagagctcggagctctgcattaaaccagaggctgcgtgggccccagcgatgtcccacggagcgccccgcaccttccgcctgtccccaggaaggagcgaggcatcagctgaaacagaagaacctcagggccgacgctggggcggccccagacatgagggccgcgcgccctctgctggaagccgcgcagaaagcaggaccgagagatgcgcggaccggcgccgcgtgtctgggtcctgggtccgggggtctagggtgtcagcgttgggcaggactcattttctagaccctaagaacagtgtcatgatctgttctcacattgggccaggcactgggtgtggccggcccttcaggggtgtcatctcattttgtctcacagttgcccttgcgcaggagttctcaaaactttttggtctctgaattcctctttttttttttttttttaagacggagtctcactgtgttgcccaggctggagtgcaatggcgtgatctcagctctctgcaacctccgcctcccaggttcaagtgattttcctgcctcagcctcctgtgtagctgggactgcaggcacccaccaccacgcccagcttatttttgtatttttagtacaggtcgggggtttcaccatgttggtcaggctggtcttgaactcctgacctcaactgatccaccctcctcagcctcccagagtgctgggattacaggtgtgagccaccgcacccggcctctggatccctttatgctcttgaaaattattgagaaccccaaagtgcttttgtttatgtgggtggtttgtatggatatttgctgtcttagaaatggaaactgtggctgggcgcagtggctcacgcctgtaatcccagcactctgggaggccggggtgggggtggggggagcggatcacctgaggtcaagagttcgagaccagcctggccaacatgacgaaaccccgtctctgctaaaaatacaaaaattagccaggcgtggtggccagctcctgtaatcccagctactcgggaggctgaggcaggagaatcgcttgaacctgggaggcagaggttgcagtgagccgagatcgcgccactgcactccagcctgagtgacagggtgagactctgtctcaaaaaaaaagaaaacaagtagtttttaaatttttattatttttatttatttttattttatttttttagcagagacggggtttgccatgttgaccaggatggtcttgatctcttgacctcatgatccatctgcctcggcctcccagagcgctaggattataggtgtgagccaccacacccagctgatttttttttttttttttttttttttttgagtcagagtcttgctctgtcacccaggctggagtgcagtggcacaatctcagctcgctgcaacctccgcctctcgggttcaggcgattctcctgcctcagcctcctgagtagctcagattataggcagctgctaccatgcctggctaatttctgtatttttagcagagatggggtttcgccatgttggccaggctggtctcgaacttctgacctcagatgatccacccacctcggcctctcagagtgctgggattacaggcatgagccactgtgcctggccttctagttccttctaaatgcctgtctgcaaacttctcttcatgttgacatcttcctttctctgacctctttccccactccgttccttccttcttaccccttggctgccccaggtatttggcctctgcctcattgcccgctaccccctggagaggcacctccttaaggtcactcgctgtgtgctgggctgtgctccgtgttaactgctgtggccagagggaggaggcactgaactggcactggggaccagaaggcctgggctcccgtcgtggctgggccccttcctaaccaggtggcctccttgcctgaggtgctgttaatgacatgggccactggaaggacagggttcatgaggtcacaggtgagaaagttctctgagaacctgaagatgaggtcaagtctggtactattagagatggccctgatgtcccagggcccccatgtgggggtcttcaggctgtcttcatgctgagctcaaaaccccactgaaagggcagggcaggcttccaggtctgaccatgcccccaagcagatccgggtccctgagctttctagcttctcctggggctccctcctaccccagggcccccacctggggctggcacctggagaccaccctccggggcctcacactgatcggggggtgtctgtgtttgctgtctaggagccgaaggctggtgggccagaagtgtggggggctctgagcaccccccacaatggagcccaaatggggtcctcctgagcccagaagacgaggaggagctcacagcaccaggtacctccagcaccaggtgggggctggccgccctgtgtcggttcctcctgctgctaaacaacttgccgcatattagaggctgaaaacaatgccagtttattctcttagagttctggagaagtcagaaataggtctctcggagctaacatcaaggtgtcagcagggctgagttccttctggaggcccatgggaaagtcccttccttgcctttcccagcctctagaagccgcctgcattcctgggctcatggcctcttcctccatcttcaaagcagctgagtttttctcacgccccatcactggcaccaactcccctgcctccctcttgtgtatttgccattaatctctaatgattgatggggcccagctggataacccaagaggctcttcctacctcaggtcagctgattaacaaccttaatgtcccctgccacagaacacaccatatttatggattccagggattagaatgtggatgccttgggaaggctgttattctgccatcagaccaccgtatctgatgaaacccccgtttttctggtcatagctttgtcatggagggcttcttcagtgccacagggccatagccactgtcatggcccagagaatctgtgtttcccatcagcccctcacccgccaggccactgcaccctaagcccagggccatggcattcttgcaaaaggaaggaggttcttgatcattctgacctctccaccccacagtgaggggaactgtggtctcctggcgactgtctcagccccagaacccagagcctagagcccatctttagccccactgtggctgattcaggacctgccagcacccccgaccagctctgccctttccctccctccctctgccagagaggccggggagatgatgtcacaggtggctgaggagccgtgtgccctgcagccaggaagtcaaaggcgtcgggcccctcgtggggcaggcgctccaagctcagaggcccatgagcaaaaaactcactctgttccatggccactctgctggcatatgtaagaaaaggggcttattcctgaaagaagcgcttgctgggtgttgggcacactgcaggggtgagatggatggacggcctgtcctcatggtgctctcaggccggcccgctcccggggcaccctgagcagctggaggtgagggcatggcaggggagccaggcttctgcctgttgcttacggtggggacacagaaacaaacgtctgggctggctggtgacagcatcagagggaatgaacacatcgaccctctggccagcatgtccaccttctgtattctgcctacgagcactcagtggggcaaagagcaggagctgagggaagataagtatttaggccgagcgcaatggctcacacctgtaatcccagcactttgggaggctgaggttgggggggatcttctgaggtcaggagttcaagaccagcctgaccaatatggtgaaacctcgtctctactaaaagtacaaaaaagttagccagacgtggtggtgcatgtctgtcatcccagctactcaggaggctgagacaggagaattgcttgaacctgggagatggaggttgcagtgagccaggattgcaccactacactccagcctgggcgacagagtgagactccatctccaaaaaaaggaaaaaaaaaaaaagagtatttaatggtgcaagcttggggcagtcccaggaggggctgggtagcctgttggtggactgtgatgcggccggttgtggaacagtgtgtgaaaccatctcacgtgtagaacgtgagtagcaaaggatgggaggggagcattgcgctcgtgctggtgattgattctggaggccgaatcggagtgcagccggggcatgtggccaccagctcccggggctccccgcttcaggccgcttctgcacaggtaagaaattcccccagccaggaaacgctctggggcagagggacacagggactttcagtgtttcgggagctgtccaccaaagctgtggcggggcgcgctacagaatttgagggatgcactgcagaattaaaatcccacccccccagttcccaaatagggggaagtactattaaaggtactaaaatataaacactttttttcccctgcagttttgccctttatttgtcatggtgttttttggtttgctatttgatgccattctaggtaaaggaaaattttaagttattagcatgaaacatataaagttattagcatgaattttaccattctttttttttttttttttgagacggagtcttgctctgttgccaaggctggagtgcattggcgtggtcttggctcactgcaacctctgccttctgggttcaagcaattccctgcctcagcctcctgagtagctgggattacaggcacccaccaccatgcccggctaattttttgtatttttactagagatggggtttcaccatcttggccaggctggtcttgaactcctgaccttgtgatccactcgcctcagcctccaaaagtgctgggattacaggcgtgagccacaatgccaggctgcgtattttgttcttacgaggacagtggaaatactgcacacaacaagcccagccacttttatttcactccttgacacacgcatgttccaccaacatggcacacctctgtggctttctcacgggtaagggaaagaccactgggaaaggaggagggagggtactgggaaaggaggagggagggtggcctgtgtcctttcctcctgggtcacgaacttctgaagaaatgatgggctgatgcagtgaaatgacatgagtcagaaggtaccgcacagcgcttggtggttcgtgtctcagaaaactagtgccttctttccgagttcagggcaagttctgattggaagggaaagcatggcccggggcccagagcacctctgctcactcagccagctcacttaccttgctgtcacctggaggtcccgctaaactcctgctgctgggtgttccctaggaatttcgtgctcatgggcatcgtgaatgctacacatgagcagacggcagcctctctggtcacacgtgtgtgtatcccctccgttcaccctcggactccgtgttccatcggacgtcacttctaaaacccaagttcaaagataaaattattaagaatgtgaagatggtcacagcagagcatgaagccaagtgtgggggcgtgtgtgactgcagaggtgtgggtgggccccctgcagggtctgctgtgcaggaagcttttgattttctacccactgcacttttatcttttttgaatgtttagttgccgataaaatcaacatagacatttaaaatcaagctaaccatatgaagactgtcaaagccttcttctcttgtcttcagagaagttcctgggagaccagcggttcagctatgggcagcccctcatactgaccttccgggtgccccccggggactccccactccctgtacagctgaggctggaagggacaggcttggccctgtccctgaggcactctagcctgtctggcccccaggatgccgggcatcccagggaggtagagctcaggttccagtaagtatccccttctgtcctgagagatggggaggtgagaggggtggtctctgaggtccgggcacatttcagatgcccctgtagtctggggggctaccccccatccccaggcatggtacccccccaccctatgtcgggatctcactttgaccgcttctctcgccagcctgcaggagacctccgaggacgtggcccctccactgccccccttccacttccagcggctcctcgccaacctgaccagcctccgcctccgcgtcagtcccggccccagccctgccggtcagtaaagacaaccacatgcccaagacccgagtgcttgccaggtctcagaactgggctgggctccggcggtcacagtcttgtcagggccttgcggccgggtggttattgtcctgttttgccaagaaggaaccttagtcaaaagtcaggacagttgccagaggccatataacctgtgaaggcaatggggatggtggctgaggtcagatgcagggaatggacaggagagaggcctgaaggatgggcctcagaggcaggtgtgcggccagcaagccacccagacccgctgggtgtgctcactccaccttcactggatccaccaagccccctgtccccgctggacacagcccacagccggcagtccaggagtcccctggcagagtgactcccctgctggtcactggcggtattgtacctaagccaccctaggagggtctggtcttcccaaagagggggccaagccatcacacatcattgatgggggtctgtcaccacctcccaccctggtcacagtgattgacagccttagcctctgatctgttcctcattagaacctctacccacacgctattttaaaaatcaatataggtcgggcgcagaagctcacgcctgtaatcccagcactttgggaggccaaggcgagtggatcatgaagtcgggagtttgagaccagcctggccaagatggtgaaaccccacctctactaaaaatacaaaaattagctgggcgtggtggcacacacctgtaatcccagctacttgggaggctgaggcaggagaatcgcttgaacccaggaggcggaggttgtagtgagccaagattgcgccactgcactccagactgggcgacagagccagactccatctcaaaacaacaacagcaacaataacaaaaaacagtctggtggggtggtctgcacctgtaattccagctactcaggagactaagactggaggatcgcttgagcccaggaggttgagactgtagtgactgtgccactgcactccagcctgggtgacaaagcgagaccttgtctctaaaaaaaaaaaaacaaaacaaaaaacaaaacccctagtgtatgtgtgtaaaatgaagctgagctctaggctcagatgtttacaaaggggtttttctacccttccagcaccacgcaggacatttgaaagtcatgtggggagtttctgggaatgtcaatttctgggaactttaggcctcttcatccacatgacaaccaacatgtcctcagatttgcttccaggggagggagattttgctctttttgaggacctctggctcagagggtcagtcttcccctgggcctcttttgagtccaagggtgctgggatgccctggagaagcagaggacatagcgaccctccccagcacccgcaatccccaaacttcctctttccatgggtaatgttttgggaggcctctctctaaacctttctgtgtgtacgtacttaacatctgtatttttttaaaaacatagaaatgtgattacacagccgggcgtggtggctcacgcctgtaatcccagctctttgggaggctgaggcgggcggatcacttgagctcaggagtttgagaccagcctgggcaatatggtgaaaccccatctctactaaaaatacaaaaattagccgggtatggtggcatgtgcctgtaatcccagctactcgggagggagaattgcttgaacctgggaggcggaggttgcagttagccaagatcatgccactgcactccagcctgggtagcagagccagaccttgtctcaaagaaagaaagaaaaagaaagagagaggggaagggagggggagaaagagagagagagagtgagagagagagaaagaaagaagaagggagggagggagcaagggagggaaaagaaaagaaagaaaggtaatcacacagtacgatattctgggacttgctttttgtcagctaacagtgcgtcgtggaggttgttccttgtcattacgcgtagaaagcctggttttctgtgtctggtgtgtaagattctgtggtatgggtgctctgtgaggttttagccatccccctattgacaggcgcttaagtggcctccagttttccccattacaaccgtgtcacagggaatagggaccagcctcatagaaaggtcttggtattccagtataagtgtcgctttaggacagagtgctggaaatggagatgttaggtcaaagagggagcattttccattttgatccacactgccaaattttccttcagaaaggctgctctgatgaggagtgtcggccgcctccagtctccctgttctgtgtctacagatggtcattttcatattttgcccagagtttatagttgttttctgtgggaaggttgatctgccaggatcccctgctcctctgttactggaagcaaaaccttctgattagtattcgtacatccacactcttttttcttttctttctttttttttttttttttttgagacggagtcttgctctgtcacccaggctggagtgcagtggcatgatctctgctcactgcaagctccgcctcccgggttcatgtcatcctcctgcctcagcctcccgagtagctaggactacaggcgcccgccaccacgcccggctaattttttgtattttttagtagagacggggtttcaccgtgttagccaggatggtctcgatttcctgaccttatgattcgcccgcctcagcctcccaaagtcctgggattacaggctcgagccaccgcgcccggcccatttttttttccaaatatcagatttctttatttttaaaatgtacacattatagttgatctaaatacaagatgttcactttccttgcaggtaagaaatgtcactgacatttctgtgtcaattagcttcttttacatcaaaatcctgttacattcattagtctcaaaatctcctataacacttagaactttaggctgggcgtggtggctcaagcctgtaattccagcactttgggaggctgagacaggagtccttgaggccaggagttcaaaaccagcctggacaacaaggcgaaaccgtttttctacaaaaaatttaaaaaattagctgggtgtggtgccacacacctttggtctcagctacttgagcggctgaggcaggaggatcatttgaggccaggagttcaaggctgcagtgagctatggttgtaccactgcactccagcctgagtgacagagcaagattctgtctctcttaaaaacaaccaaaacaacaagaaaaatcttaaaaccttagaaatagaccttaaactttgcctaaatgtagcattcagttatgagtagcccaggtgagtttcctacacgccatcctccactaaaattcatctataaaatgttaccagtctgagagatgtgaatggtatcatcgttgtttaaatctatatatcgttaataacctgtggatggatatctttccataaaattctcagccatatctatttcttcttgaaaattgcctaatcatctcccttacccttgaattgacaatttgaaaaataaaaataaaaatcaaccagcgcagtggctcacacatgcaatcccagcactttgggaggccaaggcaggaggattacttgaggccaggagttcaagaccagcctgggcaacatggagaaaccccatctctacaaaaattttaaaaattagctgggcttggtgtcttgcctgtagtcgcagctacttgggagggtgacatggtgggatcactggagactaggagtcgaggctacagagctatgattgcaccactgcactctagcctgagtgacagaatgagaatctgtctcaaaaaaagaaaaatcattgattgctagtctgcctttatatacgtgggcctggtccatatgtgaacaggaaggttttggggggaagcatgtgcagggagcttgtgcctcctctcttcctctctcccttctcgctctgcaggtccagtgttcctgactgaggtccggctcacatccgcccggccagggctttccccgccagcctcctgggtggagatttgttcatgtcccactggctacacgggccagttctgtgaatcctgtgctccgggatacaagagggagatgccacaggggggtccctatgccagctgtgtcccctgcacctgtaaccagcatggcacctgtgaccccaacacaggtgagtctcctggcaccccatccgaaggcacctgggttatacccaaaacagcgggatgagtactgacctgaacagggccagcctggcacaggcattgaggtgttggccaagctgtggggcagtgcgggcactgagctttcccgtgctgctcagtgcctgggcacctcatagtttaataaaagttactactggaatttgttgaagcctcaggctctgtgccaaggactttgtatgtatcaggtgataaccataagccagctgctctgtgggccatctgtccgcgccaccttctccctgggctggcccttttcccaggaaggaccagggaaagacctcaggggtctttacatgcagagggtgctgtgaggaagggcagaggcaccagcatggcaggtgacagcaggagggttctcaagaaggtcacacaggtgacagcagctcataggcaccaacccagaaccacagacctgccaccctcaccccttagtggccatgggaaagtcacttccctccctgagcctgcttcctcttctgtaaggtggagataatgacagtatatacactgcttctgtttctacacaaagccatatggtggtcaggagacgctcaggctctgaaaacacaggcctgggttgcataggagctcagccatagctaactgggaatgccttagggaagcgcagataatgaaagtctctacttttcaggacacttgggaaataataaaatagtgtcaccaggttcctgcatgtgctagtcaccttctctacactatatcattgactcctgcagacatccctgcggggccgggacccttcctgtcccatctcacaggtgaaggccccacgctgcagtgcagatgcatggccagcaggtggcagagccgtgcctccctccagcctggactcctgaggcctggttgctgctggctactcattctcacttctttttattttattttatgttttattttttattttttgtggggggtgacagagtctcgctctgttgcctatgctggagtgcagtggtgcagtcttggctcactgcagcctcctgctgggttcaagagatcctcccacctcagcctcctgtgtagctgggattacagacgcctgtcaccatcctcggctaatttttatattttcagtagagatggcgttttaccatgttgaggctggtctcaaacctctaacttcaagtgatcctcctgcttcagcctcccgaagtgctgggattacaggcgtgagccaccacgcctggccaactgatccccacttttataggagcagacctggccttgctcaaggtcacatggccaggaggcacctgagaaggctggactcagacctcttccactcccacactgacggcttcatgcctagacacctgctgcctccccagagcaggtgggggctgtctgagaagaaggctgctgggcatttttcttcctgaaaagacggtagccaggcgtggtggctcacacctgtaatcccagcactttgggaggctgaggtgggcggatcacctgaggtcaggagtttgagaccagcctggccaacatggtgaaaccccatctctactaaaactacaaaaattagctgggtgtggtggcaggcacctgtaatcccagctgcttgggaggctgaggcaggagaatcgcttgaacccaggaggcagaggttgcagagagccgaaatcatgccattgcactccagcctgggtgacaagagcaagactccagaggaaaaaagaaaaaaaaaaagaagaggccagacttgggctcatgcctgtaatcccagcactttgggaggccaaggcaggtggatcacctgaggttgggggttcaagaccagcgtggccaacatggtgaaaccctgtctctactaaaaatacaaaaattagccaggtgtggttaggtgcctgtaatcccagctacctgggaggctgaggcatgagaattgcttcaacctgggagatggaggttgtagtgagccgggatcgcgccgctgcactctggcctgggcgacagagtaagactccatctcaaaaaaataaaaaaaggccgggcacggtggctcacgcctgtaatcccagcactttgggaggccgaggtgggcagatcatgcagtcaggagatcgagaccatcctggctaacacggtgaaaccccatctctactaaaaatacaaaaaattagccaggcgtggtggcgggtgcctgtaatcccatctactagggaggctgaggcaggtgaattgtttgaacccagggggcggaggttgcagtgagccgagatcgcgccactgcactccagcctgggcgacagagcggactccgtctcaaaaaaaaaaaaaaaaaaaaaaaaaaaaagacgtcagctgacctagccggggagggcaagcacaaccacacgccacacgccacatacagggcactctgtcttcttgtgtccatggcaagcattgataatcgagcccagacaaggccacataatccctccctgctgcagtgcttcctgcagcccctgtggaggaagcagggtcctcccatgactgggatcagtttgtcatccccacagagcctctggccctgccacaacttcctgctcagcttgggcaagtcctcatctgtgaaacgggcagtatagccccgctgcctaggctgagaggaggaatgagcctatgggtgctgggcctaggctgggacagttccccctggatgccagccctgctatgcatgagcgacctggttctcactcttcctcccaggtcacctgtgccttggctgctggggtgctgcctggggacctcctggaagtggtggtcttggttaaccccttctcagccaggcttctcactcagtccctggcagcgggtctcccttcccaagcaccccaggctctgagcagatgccaggtgcagtcggcctggggaagaagagtttgcagaatccaccgtcatcaggagccagagggcaggaacaggggttccctcccctgagactaggtatcccttgtgtatcccaaaccccataaaggggagcctctttgcaaagtcatgtgaaggccagaattctgggtctgtgtctcccttaggaaacgttgctcttccttttggtcccttggcatcaagaaaacaacagtgtagcgaatggtagccatgtcaccttttggttcagagagaggtttcggaatacaaaataataacagtgctggccgggcacggtggctcacacctgtaatcccagaactttggaaggctgaggcgggcaaatcgcttgaggtcaggagtttgagaccagcctggccaacatggtgaaaccccatttctactaaaaatacaaaaattagacaggtgtggtgacgcacgcctgtaaccccagctacttgggaggctgaggcagtaatatcacttgaacctgggaagtggaggttgcagtgagccaaattgcaccactgcactccagcctgggtgacagagtgagactctgtctcaactaataataataataataataataataacagcagcgatgagtatgtgtgccagagagtgtgcaaggtactttgaatgcatggtcttgttggaccctgacgagaaccctttgaagtcagtgctgtggttgttcccattttgcagatggggagactgaggtgtgggggcatcagacaacttgcccagctttgcacaggcagtaagtggtggacatgaaccaggtggtccagctccaggcctggaccctcaatccccaggccttgctgcctctgcctgggaaaggtccccaccccacttctgcccgggatgtgctccctaacctctcccaccgggatgcccaccatctctgggcattctgggttcagacagtggtgcttgtcttgcccctcagggatctgtgtctgcagccaccataccgagggcccatcctgtgaacgctgtttgccaggtttctatggcaaccctttcgcgggccaagccgacgactgccagccctgtccctgccctggccagtcggcctgtacgaccatcccagagagccgggaggtggtgtgtacccactgccccccgggccagagaggtaagtgactcctgccccggagccctgccccgcagagggccaagccccggcactgtgactatgccctgggctccagggttagggccctgggtttagggtgtggcaggtgagggagagcccagcttacgggcagcaggcatgacctctgaggacacggaatccctcagccccatagccagagccccaggctgccgcacattgccagcagaatttgggccattgagaatttgggctatttgaaaatacccgtatctggtccctggccccttagagcctgggttagtgatagctgaacaagttccctgggtgattctgttacacagctaaggtggaaaacctcgattaaacttctagcctttaaaaaatgtcatcaggtaggtaatgtgcaaagcagaaccacctacgcccacccttgttcccaggctccttgtattctttcctgctctggactcagacatcctcgactctgattttttttaaaaagcagctttattgagatactattcatatacctgacagttcacccatttaacgcatacaattcggctgggtgtggtggctcatgcctgtaatctcagcactttgggaagccaaggtgggcacatcacttccgtccaggagttcaagaccagcctgggcaacatagtgagactcccatctctaaaaaaaacacaaaaattagctgggtgtggtggcatgcacctgtggtcccagatactctggaggctgaggtgggaggatggtttgagcccgggaggcggaggctgcagtgtgccgagatttcaccactgcactccagcctgggtgacagagccagaccctatatccaaaaaaaatttttttttaaataaagtacaggccgggcatggtgactcatgcctgtaatcccagcactttgggaggctgaagcgggtggatcacaaggtcaggagtttgagaccatcctggctaacacggtgaaacccgtctctactaaaaatacgaaaaattagccaggcgtggtggcgggcgcctgtagtcccagttactcgggaggctgaggcaggagaatcgcatgaacccaggaggcggaggttgcagtgagccaagatcgcgccactgcactccagccggggcaacaagagtgaaactctgtctcaaaaaataaaataaagtataattcaatgacttttgacatgttacaatagtaatttttattatggtaaaatatatataacgtaaaatttgccattttaaccatttctaagtgcataactcagtgtcaggaagtacaatttgcaatgctgtgcagctgtcactcatccatctctagaactttatcatcatcccagacagaaaccgtacccatcaaatgtgttgttgaggccaggcgcagtggctcatgcctgtaatctcagcactttgcgaggctgaggcgggcggatcacctgcggtccggagtctgagactagcctggccaacgtggcaaaacctcgtctctactaaaaatacaaaaattagccaggagcggtggcaggcacctgtaatcccagctactcgggaggctgagataggagaattgcttgaacccaggaggcggagtttgcagtgagccaagagcgtgccactgcactccagcctgggtgacagagcaagactccatctcaaaaaaattaaaaaaaaaaaaaaaggattgttgaatagcccttcctccctccagcccctgataacagctgttctcctctctgtctctatgaatttgactgctcccagtattccatttaaacggaaccatacagtatttgttcttttggatctggcttgtttcatgcagtgtaatgtttttaagattcctagacatctgattttgcttttggtacgtgtggctgcattaaatcaatttgtcaaatgccatgtgctttcactgggactgttctgaaagcagctctctggcagccaacagccaacagggcagggcagatggctccagagccgggagctcaagaaccgagggatggagattgcactgcgggaccctgcaccccactggccgccatgctgtccctccattctcgttatctcccttacattttctagctcccgactgtggctcccctggcctgcagacatgcacgaggcccacccagtgagagtggacagttagagaagctcaggtggacccaggctgagacatacttgagggaggatttcaggggagcaggcagtgctgtgtgcagagggaaccacccttgggagggagggacacctggagtggactttagacctgggaccttctgccagtgcccttcttatccacaccagtgtcctctgggccccgggagggcctagcacactgagagctcacctggacatctgagtcagggttgaccggggtcaagtcctgatgctcacttgtcctgggaagactcctgcctgccatcctggccccttgcagcccctcccaggacttccagagctgcctcctgccctatgagctgtcctcacctggttccaggtgaatggccacttaaccatggggctcactcatcatcatcagtttcaatctccccctttcctgtctaattttatttctattttagaatccacaaggcaggtgctagcctcgaccttgaattctgttccagtttgtcttttcctttccgttccgttccgccttttccttttcagggttgcccttagcactattaacttttttttctctggaaacagagtctcactctgtcccccaggctggagtgcggtggcatgatctcagctcactgcaacctccacctcccaggttcaagcgattctcctgcctcagcctcccgagtagctaggattacaggcatgcaccaccatgcccggctaatgtttgtatttttagtagagatgggattttgccatgttgaccaggctggtttcaaactcctggcctcaagtgatccactcacctcagcctcccaaagtgctgtgattataggcatgaaccaccacgcccagccagtaccattaacttcatttcaacagaccgatgacttttgaggacacaaggagctcacaactattcttcacaatggcagcagctattttttaattataaaattagtacatactcttgactgacttagtaacttcataaaaaataaaaataaatgaaaatagaaataaatgtacatggccgggcacagtggctcacgcctgtaatcccagcactttgggaggctgaggcgggcagatcacaaggtcaggagatcgagaccatcctggctaacacggtgaaaccccatctctagtaaaaatacaaaaaattagccgggcgaggtggcgggcgcctgtagtcccagctacgcgggaggctgaggcaggagaatggcgtgaaccccggggggcggagcctgcagtgagccgagatcgcgccactgcactccagcctgggtgaaagagcgagactccgtctccaaaaaaaaaaaaaaaagaaatgtacatactcattgtaatgttggagcagtgtaaaaatgtcaagaggaacatgaaaaaaacatgtgagcagccgggcgtggtggcttacacctgtaatcccagcactttgggaggctgagccaaggcaggcggatcacctgaggtcaggagttccagaccagcatggccaacatgacaagaacccgtctctagtgaaaatacaaaaattagctgggtgtggtggtgcacgcctgtaatcccagatactcgcgaggctgaaacaggagaatcacttgaacccagtaggtggggcttgcggtgagccgagatggtgccattgcactccagcctgggcaacagaacaagactccatctaaaaaaaaaaaaaaaaaaaagaaaaggaaagaaaaaatcatgtaagcaaggcagcattcttgtcacctccaggggaccatggctattatttgggcctgacactggtttcatgtagatataggcagagagatgggcatgtttacaaagagtggctgacaccatgtgaagcacttggaacaagtatgttcttttatgctccgtctatgtccagagtagacctctagaaccaccctccaaaagccccctcgcacagcatgtcttctgcagctcacaggtaacctggaggctggaagatgagccagaaagcccaggtcaaacccagaaagcaggacaggagtctgcaatgcacagtctagaggaagttcagaaaacatgagaaacagaaaaggtaaaggggccagggattgcaaaggaaaatgcacccagctaagagggggatgaggaaaaggacgaggagaagcagatgaatgacattggatggtgacaatgaagagggtgaggaagaagagagtgatcaagacaatagtgatgaagaaaatgaagataatgatcaaaatgatgacaatgaggtgatgataaagataaggtgacgatgacagttgtgccagtgcagcgggaatgtggacctcaatgctgtaggcaactgtgacccgtgtctggccactgcctgcactggctacacaccaccacacgtgatcacgggtgatgatgaggataatggtcaagaaggtgatgttgatgaagataatggtcaagatgacaatggtgatgaaggtgatgatgatgagaataatggtcaagatgatgatgatggaggaaggtgatgatgagaaggatgaggttagtggtcaagatgatgatgaagatgatggtcaggatgatgatgaaggtcaggcacagtggcacatgcctgtaatcccagaactttgcgaggcctgaggtcaggagttcgagaccagcagggccaatgtggcgaaaccccatctctactaataatacaaataaattagccaggcatggtggcacacacctgtagtcccagctacttgggaggctgaggcaggagaatctcttgaaccccagaggcagaggttgcagtgagccgaaattgcgcccctgcactccagcctgggtgacaggacgagactgcatctcaaaaaaataaaaatagccggttgtggtggctcacgcctgtaattccagcactttgggaggccaaggcgggcagatcacttaagtccagaagtttgagactagctgggccaacatggtgaaaccccgtctctactaaaaatacaaaaattagccaagcatggtggcgggtgcctgtaatcccatctactagggaggctgaggcaggagaattgcttgaacccaggaggcagaggttgcagtgagccgagatcgtaccacactacactccagcctgggtgatagagtgagactccatctcaataataataataataataataatataaggatgatgatgaagaaggtcatggtgattgaggtgctgctggggatagtggtgatggtgaagataatggtgacgatgatgatgagggtgtgaggacagatatgtgatgatagccaccactcctgagtgcttactacatgtcaggctggatgttaagcgcttttcacaaattatgtcactgaatcctccccacagtcctgtggggagctgccattgttgtccccgctttagagatgaggaacctgagctcctagaggcgcagtggcttgctcaggaccacacagctgtgggcagccactgggggccggtcccaggtcctcctgcccaagcccgtgctgctccggggaaggtggagggacgcttgctctgcttcacacccaccctcatccctggtgggtccagccagctgtgttccccacacgtgctccctctacacacagggcggcgctgtgaggtctgtgatgatggcttttttggggacccgctggggctctttgggcacccccagccctgccaccagtgccagtgtagcgggaacgtggaccccaatgccgtgggcaactgtgaccccctgtctggccactgcctgcgctgcctgcacaacaccacgggtgaccactgtgagcactgtcaggaaggcttctacgggagcgccctggcccctcgacccgcagacaaatgcatgcgtgagtacctacctccagaccccagggtggcacatggtgggccccttctcttctgccctggctcagggcccagaaggggtggctgaggaacccaccagaaccagctggctcctctgcaaggctgtccagcctcaggcaggtcacttcccttcctgtctccatgtccagaaagcacaagggtttgcccctctcccaggtctctttcagccgggagatcttataaactctgatccgaagcctggattgtctagtgcttacctcccactctgcagtcagcacgtatggctgacccggtgatcgccctgcgccgggtctccatggccatgcctcccctcatcacctcagttaacactcagcccctgggaggctcccagagccctgcaggagggaagctcagcctttgctccacactgatgtgcttggagccctttcccacgcagcagctgccggctcctgctcactctcgctttgtggaacccctgcaggaaacaccgctctggcccagagtgagatgctcccctggcagtggccaggagaacagggtcacgggacccagagccatgggtgcagggctgtgcctgtgaccctcgcccaagtctctggccctctgcagcctgccagggctcagggcaggctcagaaggattgtctgttaccatgaccgtcctgggctgtccctctaaggatatagtcaatgggctgaggcttgagcttggccctggagcctttttccagcagtggcgtctgaatctgggctgaatgtgccgtatcatctctggaggctcccccatctcctctgcctctgttggacccccaaagttggaacagacaatctgcattgttcccaacaccccttcctgctcctgcccccagcttgcagctgtcacccacagggctcggtcagtgagcagatgccctgcgacccagtgacaggccaatgctcctgcctgcctcatgtgactgcacgggactgcagccgctgctaccctggcttcttcgacctccagcctgggaggggctgccggaggtaggtagggtgagactgccggtgccctggggacctctccaggagggaagaaggcatcgggcagcccccagggaggggcctggtttggaaggtgttgtcctaggcccactgccaggcacattgtgccctttgccgaaggggagcaaagggatggactcttggcatccgactcatgctcctgccagcccaggatgcaggccaagagcagccctaaagggtgtccaggcaggcaggtggccggtttggtctctgattcccttctcagtgacactctccctgggtggccttttggccacagtagcaccttagacaagtgttcttagggaacaggaggactccagggaaacaccaagtggagcaaacaggtttcttccttgcaggacttctcagagctcttactatgctgattgcatcatgactttccaacagaggggtatagtctccccgagacacgtttgtccccatagccttattttatcttcttttctccctgagcatcctgggaaacttgtgctttccagagcacagctggggaagctgtgccatgcaccgagaggagatggggtcttgtcagcagagggctgtgatctgaggccccagccagctgcagccggcagaggctgggccaggagtggccctgagcttgcctcagacccagttccttccctgatcacagctgcaagtgtcacccactgggctcccaggaggaccagtgccatcccaagactggacagtgcacctgccgcccaggtgtcacaggccaggcctgtgacaggtgccagctgggtttcttcggcttctccatcaagggctgccggggtaaggaggctgggtccttcccgggctgccctgagggtggggcccgagggtctctgggcagagatgactgatggggaaaatgggcgcagcaggaaaggatcgtcagacatgggacagggtcccgagagcagccggaagcatggagcgagttgctcccgtggcagtggccgggacagcagagtcacatgacccagagcagtgggtgcagggctgtgcttgtgaccctcgcccaagtctctggccctctgcagcctgccagtgtcctcatgccggccaggaatgtagtcccagacgcgctgttaagtgcctgtgtgcctggggccatcatgtcactctctgggcctcagtttcctcacctgtagagttgggctgcattggcagttcctaaacctggctggtcctcagatcccgagggaacattggaataagccaggctctgtgccaccttcaaccttctgaatcagaatctccagggaagggcccaggaatgtttttgatgctgcctagggcattctgggaacacccagaacccagcacgcactgcccctggcccctctaaacccagcacgcactgcccctggcccctctaaacccagcacgcactgcccctggcccctctagcctgcaggtgctccccactgggcgctgcctcggcccagtgccacgagaacggcacatgcgtgtgcaggcctggcttcgagggctacaaatgtgaccgctgccacgacaacttcttcctcacggcagacggcacacactgccagcaatgtccgtcctgctacgccctggtgaaggaggaggtgagtcggcccagacccactcacctttccattcattctgtattcccagcaagtgccagctctatgccgggcaccaggaactgcctgcttacccccagtgctcaggctttgcaagcccaccacctaccttctccctgtgcccacccagcttcaggcctgttccagcctggctcgaccctcacctcggcccttcccctgctctaggtggatgggggaaatgtgactcttgtcacctgcctttccccaccacgccaggctggggtctcactctctcaggttcggtggggatgagaccacagatgaccccttggtaaagagggttaacaggaggtgattctgagtgggaaggtggctggtgcagaagtccggagttcaagctctagggttaacccattggggttcccctcccccaactccattcattgtcatgtgtctgggcaggcaacagccttggtaagcctctgtctctttcgtactccagactggagatagttcaggcctgcaatccttttctagaaaccagtggggccagctttcagaatgtgtggcattgtagaaagataagatggcatacactgaaggccgggtgctgtggctcacgcctgtaatcccagcactttgggaggctgaggcgggcagatcgtgaggtcaggagtttgagaccagcctggacaacatggtgaaaccctgtctctactaaaaatacaaaaattcgccgggtggggtggcgcgcacctgtaatcccagctactcgggaggctgaggcaggagaattgcttgaacccaggaggcggaggtcgcagggagccaagatcatgactgcactgcactccagcctgggtgacagagcaagactctgtctaaaaaaaaaaagatgcatgctgtgctgaatatcacataatcccccactgtgaatgggcagcccccatagtcaagcccagtgatatttatgcaggaaaacagacgactatttccacgaagtgggtaaatgaagaccacaagtagcctttttcagaacaggtttatttcaggtaaggttttgctctcgagtgaggaatggaatgccttgtggcttttcagaacattttggacttgggaatggaggacagggcccaggacctgtgcctgccacttcacttagagcggtgacaggaggaatcaagctgggacatggcaggcatttgtgctgagactggctcctaggaagtgttctgtaaatgcagttattgtttgtctgatgaaaagatggagctagggtatgttcatagcacattcagccagtgtccatagtgtgctttctccatgtggcgtcctgggaacacagcgaacaggacaggcagaaatcctcgtggggcatccctccccatcccttcctccccaccttccgaggtaggacagcagtgtggtcagcggtgtcggcaggtgccgtgaggatgggaggggaagggacagctaccatggggtgggcaggattggctctcagaggtgtggcatacccttagcgctgaggcccaggggaggatttggagaagggaacccccagggagagtggcagggtagaagccagcgggagtgtctgggcaggacctccatgccaccagcctcatacaccttttcttcctgtcctctccaggcagccaagctgaaggccagactgactttgacggaggggtggctccaagggtccgactgtggcagtccctggggaccactagacattctgctgggagaggccccaaggggggacgtctaccagggccatcacctgcttccaggtacagcaggagcgcagagcgggagggtgggaggcaaggggaggcccccagcgcctgcagtctggtgtcgttggatgctttgggggccctcccaaaacagccctgttgccatgggcctttacttccctagcccacctgtaactttattaatatcagtccttgtcaccatgcctctgccctactcagactctaagctcagtgaggatggggctgggctcattcatttattcactccctccacaggggtgtcatgaggcgctgcttcagaggctggactgggagggtcttgctgtcttgattcttggccgttttgctctgccataggccagcacggtgctcagcacatagaaaatcttaataaatgagtaaataagacaaaagaaggagggccaggtgtggtggctcgttcctgtaatcccagcactttgggagccaagacaggaggattgcctgagcccaggagtttgagatcagtccgggcaacacagcaagaccttgtttctatgaatggaagcagggagggagggaggacctggaaatggcgctgaaatggattggattactttgtgaagttttatatgtgtaagtgctacactcctttagcagccagacagaggcgagctgagaacctgttagcaggactcactgtggaaataggggctatcagataccgtgtcttaaaatgcccacatgtgagccacattgtgaatcagagctgatttgaagggtccagaattgcttgtgtggctccagaaggcctgggtctctcccggtccctgtgtatgactgacttgctgtgggtaggacctcgggtcatgtttgccttctctgggcctcggcctgcacctggaaaatgggggtactctgcctttgggactacctgttggtgctcagggctgctgatgcctggggaatggaggccacagaaggggacccctgggggtgggggcttttgtgtgacatctccaccactttgtgacccctgggctgtgggcttcccataggggctcgggaagccttcctggagcagatgatgagcctcgagggtgctgtcaaggccgcccgggagcagctgcagaggctgaacaagggtgcccgctgtgcccaggccggatcccagaagacctgcacccagctggcagacctggaggcagtgctggagtcctcggaagaggagattctgcatgcagctgccattctcgcgtctctggtatcccaggggacccccctacccgaacacaccaaacctgggcattggtccctgccccagccctcccattgacctggtgaccttgggtatgactccccactttgggaggcttaatttcatctgcaaagtggggatcacacagtgcctcctcctggattcagcgagaggatgtttgcaaagggcgaggcatgttccgaggagactgaatgcgcagtaagtggtgggctgcatccttattggtgtttctgcatcctaggactccgctcactgaatgccgatgttgtggccagctttgtgcatttataaaacgacgggtgccatccagttctgcctcacaattggaccagatgtggcccttaccctttggcgatgggccatcagtttcctcctcttcctcttctttctacaggagattcctcaggaaggtcccagtcagccgaccaaatggagccacctggccacagaggcccgtgccctcgccaggaggtgagtcccaagacatggtgagcttacacctggcccttctcctgggggttccagggtcagagtcagccccacaggtgcccccacccagaagttgggatcagatattacaagagctgtctgatggaggcagtgtcaccagcatggggaggggcaggcaaggtgggtataagtccagagatgttaggggcaaagcttggtggactgaaggcgtcagagagcatctgccggctttctctttgtgagagttgtgtaatatacaagttattatattgggggtatagttcacactatacagaggcctttgcccactgcactccagcctgggcaatagagtgagactctgtctcactgtataattcagtggtttccctatattctcagggttgcaaagccatcaccacaaccagttttaggattttcatcatcccaaaaacaaacccctggacccatctgccatcagcccccgtttctccttacctccccagcccctggaaccactattctactttctgtctctatagatatgcctattctgggtgtttcatagaagtggaatcagacaatgtgttgccttttacaactggctgctttgcacagtgttttcttttttttcttttcttttcttttttttttttttttttttgagacggagtctcgctctgtcccccaggctggagtgcagtggcgctatctcggctcactgcaagctccgcctcccgggttcgtgccattctcctgcctcagcctcccaagtagctaggactacaggcgcctgccaacatgcccagctaatttttttgtatttttagtagagatgggggtttcactgtgttagccaggatgatctcgatctcctgaccccgtgatccacctgtctcggcctcccaaagtgctgggattacaggcgtgagccaccgcgcccggccagcacagtgttttcaaggctcatccacattgtggcatgggtgagtgcttcactcctcttacagttgaataatatcccattgtatggaaatgccacatgttgtttatccgtcttctgttaacagacacttgggttgtttcatccactgcctttaaggagcagcttaaggctgggtgcggtggctcacgcctgtaatcccagcactttgggaggctgagacaggtggatcactagaggtcaggagttcaataccagcctggccaacatggtaaaaccccgtctccactgaaagtacataaattagccaggcatggtggcacacacctataattccagctatttgggaggctgaggcaggagaatcgcttgaacctgggaggtggaggttgcagtgagctgagattacaccactgcactccagcctgggcaatagaatgagactccatctcaaagaaaaaaaaaaaaaaaaagacgcagcttaagatcctaaaaacacaggatctgtgacaattttctcctttagctacgctccagggaccttagacttattttacagatgagaaaacattcagagaagttaaggaatttcctaaggacacacagcttggaagcaataaagccaggattcaaacccaggctgtcgtgaccactctcttctatgctgtctatattggggtgactgtacaatttattgtccaaactgagatgctttcacgtgtgataaaaggtcctattggccaggcacagtggctcacacctgtattcccagcactttgggaggctgaggcatgaggatcgtttgaggcaaggagttacagaccagcttgggcaagatggtgaaacccccatcgctacaaaaataattttaaaaattagccgggcatggtggcacacacctgtagtcctagctacttggaaggctgaggcgagaggatcccttgagcctaggagtttgaggttgcagtgagctgtgatggcaccactgcactccaacctggacaacggtgtaagactccatctcttaaaaagaaaaaaataaggccctggctgggtgcagtggctcacgcctgtaatcccagcactttgggaggccgaggtgggtggatcgcctgaggacaggaggtcgagaccagcctggccaatgtggtgagaccctgtctctactaaaatacaaaaattaactggtgcacacttgtaatcccagctactcgggaggctgaggtaggagaatcacttgagcccaggaggggaggttgcagtgagctgagatcacaccactgcactctagcctgggcaatagagtgagactctgtctcaaaaaaaaaaaaaaaaagtcctattaatccttatgtcaggacaacagacacaaactctatgtctctgtgtaacagaaacagggcatggagtacctttcctgtcagtccttgaagtgcgtaacacagaaaggtggaaaaggcgtacctgtctttgtggctgtcctctgttaggggcagcaggaggcctgtgtagtagggggcgtagttctgatcctgggccccttccctgcgagcccttggtaatgctcaggtgggtgtcctcacacagccacagagacaccgccaccaagatcgcagccactgcttggagggccctgctcgcctccaacaccagctacgcgcttctctggaatctgctggagggaagggtggccctagagacccagcgggacctggaggacaggtgaggcctccccaggtgtgggtagaaactttggggttggcctcctggagccaacagggcctagccaaaggctgctggttccagagccagctcccttgagtcctgacgttctttgtcgttggtgtcttgggtctgcatcctcctcggagtggggccacagggtcttgggcccactcggtggtgagtcgcagtaacccacttttgcctggggggatgcaactcagcctcttcaagagaagagacaagaactggaacccagagcaacagatcccttgctctccttctgccgcattccctgacccccctggccccggcgccccagcccagggcagctcctctgagctcctctgaggcaccagcttctttctctgcctctgcagacagacggctctgcttttctgctttggtgaccccttctgtccctctcagtttaaaggttcatggagactccccagcatcttgcttgagccccttgacattcctaaacgagacattcctaaacgagaatgggattggctccgcttagatcaggtgtccagccctgagccagtcaccatggctgggggaggtcacatgacccaccccaggggcagagcgatggctctctaaggaggagtaagggatggaagggaagccagaggtctccaccccagcaatgcccttgtcgaggaagaatgggtgggacaggatgtggacagctggtcaggacagaaaacccatcctagctgattggttatagaccacaggcctgtcagggcaaaagggcccacagggattctgcagcccagggctctccattcatcagtggtgaggacgtgcccaaggtctctggaaagggcatggccgagccaggaccaggaccggggccgctgtgctccccacttcaccgggcattttcctcttcaccattcacccagaagagccaaacatttgcaaacatgtgattcttgagtggaaaccaagcagagccctttcagcaaagtgtggctgagctgaatgatgcagaaacaagaatgtggccctttcacagcccgtctggctcatctgaaagcttcagagaagcagccactttccgaggcagctgtacctaccccgcagagggctattctgcctgggaagttggcagaggcctttgcaaaccagtggctccagcctggggcccagacagggatggggagggctagttctgcacccagctccgtggcctctgcttcctcccaggtaccaggaggtccaggcggcccagaaagcactgaggacggctgtggcagaggtgctgcctgaagcggaaagcgtgttggccaccgtgcagcaagttggcgcagatacagccccgtacctggccttgctggcttccccgggagctctggtcagctcagttgtctcagagctccgtgtggggtcgggaggatctattatagaagctggaggctgggcacggtggctcacgcctgtaatcgcagcactttgggaggccgaggcgggtggatcacctgaggtcaggagtttgagaccacctgggccaacgtagtgaaacctagtctctactaaaaatacaaaaattagccaggtgtggtggtgcgtgcctgtaaccccagctactggagaggctaaggcagaagaatcacttgaacctgggaggcagaggctgcagtgagccaagattgcacctctgcactccagcctgggcgacagagcaagactccatctcaaaaaaaaaaaaaaaaaaaaaaaaaaaaaaaaaaaaactattatagcagctggagaaaccggtggggcccaggcagaggcaggtgatatggctcatttttaactatattgcagctaagtcaaatgatataacctacctatggggcttggcagagtcagagctcaaccatttcaaccattctctgttgataatgttaaggctggggcctcttcctccttacagtgacattagcagtgtcatcagatggacacgggatgcaatcccagctctgccactccagctctgtgacctcggccaaggactttcccttcctgagcctcagtctgtcacatagaactcacccattaggttatttcgaggctgcttccatgggagctggacagagattcgggagcaatgcacgaggtagctggccgacccctctgtgctcatcgccttatactcatcacctctgcatgaaccgggtccatcgtgtcgattcagtaaccctgaaatcccaaaactcagaaactgaacattaaagaactcagcttggccgggcgcggtggctcacacctgtaatcctagcactttgggaggctgaggcgggcggatcacgagatcaggagatcgagaccatcctggctaacatggtgaaaccccatctctactaaaaatacaaaaaaattagccaggcatggtggcgggcgtctgtagtcccaactactcgggaggctgagaatggcatgaacctgggaggcggagcttgcagtaagctgagattgcgccactgcactccagcctaggtgacagagtgagattctgtctcaaaacaaaacaaaacaaaacaaaaaaaactcagcttataaaaatgcatttgggacaagtgctaacccagattgatgcccaaggctgcttatttgagatctttgctcctcccactgcgtgcggagagtaatgcacagctgttagtgtgtttgagcccaggttctgcttccagcaccactcagggtgttaggtcataggtagaacctgcacagttctcctataagtctgggaaattctgcattcggaagccatccagcccccagatctcagttcagggctgtggagctggggaagcattcccactttgcagtggggcagtgtgggtcagggaggttagctgggttgctcaaggccacgcagctagaaattggtaggactgtcatctgagccccaagtaagggcttccccagcctggctcctctcgccctgggccctctgcctccaggggtccacacaaagcctgacccctgctattcctgcctctgggcttccgagctacctggggcatcagctaggctcaccaggttttcagggggcttgggttcttggctggcagccaggggcagacccgccgcctcagcccagcagggcacctcccccaaggagaggatccgctgcttgcccttcctttccaggccctgcctgagcgcattgtctccctgcagcctcagaagtcccgggctgaagacctgggcctgaaggcgaaggccctggagaagacagttgcatcatggcagcacatggccactgaggctgcccgaaccctccagactgctgcccaggcgacgctacggcaaacagaacccctcacaaaggtcagctcttgtgctttgaagcaggggacctgggagaggttggggctaccctgaaggtgatccagggtcagggttgcaggagggagaagggcagagacagaagtagctctgtccggccgggtgtagtggctcacacctgtaatcccaccactttgggaggccgagacgggtggatcacgaggtcaggagattgagaccatcctggctaacatggtgaaaccccatctctactaaaaatacaaaaaattagccaggcatggtggcatgtgcctatagtcccatctacttgggaggctgaggcaggagaatcgcttgaacccaggaggtggaggttgcagtgagctgagatcgcgccactgcactccagtctggcaacagagtgagaccccatctcaaaaaaaagaaaaaagaagaagtagctctgtccatccctctggtgcctcctgcaaaactccacatacagcctgagataggggaggggaccctgataccccgagaagagatgatggatagactgacagaggacagcagcagcagcacccggggccacacccaccatcctgggatcattctctctcatgcctccattcattagttcattctctagttcattcatggctcatttgaaagctgcagagaagcggccactttccaaggcagctgtaccgataattttgtttttaattttgtttttgaaacagtcttgctctattgcctgggctagagtgcagtgacacaatctcggttcactgcaacctccatttcccgggttcaagtgattctcctgggtcagcctccagagtaactgggactacaggtgtgtgccaccgtgtctagctaaattcttttgtatttttagtagagatggggtttcactgtgttggccaggctggtctcgaactcctggccttaagtgatccacctgcctcggcctctcaacatgctaggattataggtgtaagccaccacacccagcctcattcctttttttttttttttttttttttttgagacagactcttactctgtcaccaaggctggagtgcgtggcgcgatctcggctcactgcaacctctgcctcccaggttcatgcgattctcctgcctcagcctccagagtagttgagattacaggccctcaccaccacgcccagctaatgtttgtatttttagtagagatggggtttcaccatgttggccaggctgaactcctgatctcagatgatccacccacctcagcctcccaaagtgctgggattacaggcacgagccatcacacccggcttccattccttttaaagacaggataagggggctgtctgtgaggcatgagaatgtatctgaagagctgagcccagtgcctgccgcttacccggggagtttggctttgcccccggggtagcacctgctgatctggtccactgccctcgtccagggtgaggttgccaggaagagaggtgacttccccaggagtcagggccaggccccagcgtgtacagatgcctcaccccaccacagcacccatgccttcgtcctcctccccaccccatgagcaatcagaataggcctgaggcagtactagtggctcctcaaactactatttatttattcttgttacagtgacattcacgtggcatacaaacacccattttagatgcaatggctttagcacgttcacgatgttatgccacctccacctcagtctagtttcagaacattctcaccacccctaactccatgcccactcagcagtccctcctcatttccacttccgaggcccgggcagcctccactctgttctctgtctctgtagatttccttagtccagctcttttgcagaaatggaatcgtgtaatatgtgccgatggtgtcaggcttcctcctgatggcatcaccttttcagggttcacctgccttgcggcctggatctatacttcctccctttgaaaggctcggtcatattccagtgtgtggatgaagcacattttgtttacccactcatctatcagacccaaattctttcagtgtatctagtcctgttgagtggcagtggggaagaaactgatcttccataagtcaaggtggtgtcataaacagatttgcgattttcacatccacttgctgagatagagcagtgttccctccctccctccctccctccctcccttccttcctttctttctctctcttttttagatggaatctttatgccacccaggctggagtgcagtggcttgatctccgctcactataacctctgccccataggttcaagccatactcccgcctcagcctcccccagtagctgggattgcaggcatgcaccaccacacctagctaattttaaataaatttttagtagagacagggtttcaccatgttggccaggctggtctcgaactcctgacctcaagtgatctgcccacctcggccttccaaagtgttgggattacaggtgtgagtctctgtgcctggccaatagaacatgttctaaagagatgttcaggtgttctcgttcctttaattctagtgttttagttttcctccgggcttttgtggacaggtatctcttgggagacattcggagttcaacttttgtataataacacagatcaggtgctcctggtggacagcgtgacccagcgtcagggatttggtgatgatttgggcacccatgtatgtgggtttggtgcccactgagctgcccctgggccctgctcctgtggagccagctgcccagcctctcctcatctctctccagctgcaccaggaggccagagccgccctgacccaggcttcctcatctgtccaggctgcgacagtgactgtcatgggagccaggactctgctggctgatctggaaggtacgtgagtccagctgaccactaggctgtgtaatgacgaacgcccctgacagccactcacctctcgcctcagccagggcaggcttgcagaggacaggagtctggtcttgtgggcttaattaagccaaacagactttccctccacctctcaggatcctgccccatctcatacatcactcacctcggacttgcccatgtggctatcccatacaccccaggtcatcagaccacatgcagagcccctccagaccaagtgagaggagactctaacatcattggctgttcaaccaggtcaagtccactctggcctgggctccagttagttatctgatacaaatatggctgtccgggtccaatgttgagttggggctatgggaagcagatggagtttctctttagaaggggctatgggttgatgccagtctagtgcccccattttgcagatgggtaggctgaggaaaggaattgctattcatccctgggtcagagctaagctgggaatagaagccagcaagtattacgattctgcaagtatccacctgtgtgatgggcttctgtgatacccaatttgctccagagagaagccccctcaccctttgtttgtggctccttatccaacgggctggataaggcaggaacacactctgaaccccagatgtctcttggggtctgaggccagaagtcaggcttctgctgttgttctgtggcctccctccccagccctgcccactgcccggaagagatggagcgctagctgtggacccagcccctctggggcagaggatgggctggtcagtgctcctgttccccagcttcctggcggcttgaagtcctagtcacccatcgtttggggacttcctgtcggaaaggcgtggccgtgtgtgcttaagtatctagagtcatatttagaaaaaggtacattcaatgacttataatgatggaatgttaggatcttagaacattagaattataagaggtcttaaggtcatctgctgcaaatctcacacctggcagtggactcgcccaccctcagcttgcctatctccaacaatggggggctcactaccttacaagcttttaccttctcattgtcgggttctgagaatgagaacattcttgtgtgtagtggatggaaatttccttgcactgttcccataatccacaggagggctaacctcaaacctctaaccccaggctcttttccccattctgatcccattttagagacaccctttcttaccaccagcttggctgtgctcagttggtgttcaggataaaaggaaaattcacaaggtgaactgtggagcagtcttccccagggtgtggccgggggtctcctagcctattgatacgctctgccaagagagggtttgtgttcaaataagtttaggaactgtctcttgctgcagcatcctcttgaggtcttacagagaacgcttgagaatattaaaggttctgagaaggcctgtaataaagaaacctgcttcactttcaacttaattgacacttccccctaacgtttgttaacaccgtggagaattagggctccacacaatacatgctgagaaacatcaattttgtgtacaaggagcaaagcaggtctaatttctggatggaacaattctataatattatgccctcaaagattagaaggctttattcattttaaaaattgacttttactttgtccactgtaataagtgctttttttttttttttttttttttttttgagatagagtctcgctctgttgcctaggctggagtacagtggcatgatctcggctcactgcaacctctgccttctgggttcaagtgattctcctgcctcagcctcctgagtagctgggattacaggtgcccgccaccacacccggcatttttttttttttttgtatttttagtagagacagggtttcaccaggttggacaggctggttttgaactcctgacctctggtgatctacctgcctccgcctcccaaagtgttaggattacaggcgtaagtcaccgtgcctggcctgtattcagttcttttgatgataaacttcctttagaatttttttttgagttggggtctcactctgtcacccaggctggagtgcagtggtgcaatcatagctcactgtagcctccaactcctggcctcaagtgatccttccacctcagtctcgtgagtagctaggtctataggtgtgtgccaccatgcccagctaagcttttgtctttttgtagagatgaggtctcactatgtttcctaggctggttttgaactcctggcctgatcctcctgcttcagcctccagagtagctgggattacaggaatgagccaccgcacctgactaaatttcccttagaattttatctgaaaggaaaggaaatagtctctttgtttaccaagaaataaactacttcttattggataataaaatctatgggaattctaacatttcctctgggtgtggtggctcacacccgtaatcccagcactttgggaagccaaggtgggtggatcacttaaagccaggaatttgagatcagcctggccaacatggtgaaactccatctctactaaaaaaaaaaaaataccagccgtgtatggtggtgtgtgcttataatctcagctactcaggaggctgaggcaggaaaattgcttaaacccgtgaggcagaggttgcagtgagctgagatctctccactgcactccagcctgggtgacagagcgagaccttgtctcactgcactccagcctgggtgacagagcgagaccttgtctcaaaaaaaaaaaaaaaaaagagaattgtaacatttccctttttgtcttgattgcttgaaagctcagtggtcaatcaaacatttggtttctgcaatgtcattatcgagattttctggtacttctccctctcctctgtccttcctcatccctccagttacatcagactcttggttttccatggtaaggatccatttgttgatttacccatcactatacactgccttaaagcattgtttagacgtaggcagtacatgaaaatgccgagctgagcagactgagccatggactgtgctagtccccaccactggccccagcattgaccaccatgtaattccttgactttaatagacatcctaatagaatgaatactcatctcaaaattccccaagcagtatgtctgtgtctcgcttgcttttgttttctcctggataagcctgagaaggcgatatgcacgttgcatgcacttcagacctccactcgttgtccaagggtctgtggtcagccaggcagctctgccagcggctgcctgggaggcaccggaggtgtgagcccagttcccctgacccagcctcagccgggtttgcaggaatgaagctgcagtttccccggcccaaggaccaggcggcattgcagaggaaggcagactccgtcagtgacagactccttgcagacacgagaaagaagaccaagcaggcggagaggatgctgggaaacgcggcccctctttcctccagtgccaagaagaagggcagagaagcagaggtgttggccaaggacagtgccaaggtcagggtggtggctgtgacaacagtggcctccttccctcccggggggaccgcccttccgcgggccccttcccgacatccgtgctgactactccgcactcactcactgctcagtgggcccaggcaattagctcagagacttcacgggggtgagtctgtgggttcctcacgaaataggtgtcattgctgtccccattgtacaggtgagaatgctgaggtgcagccagcttcatgaacttaaccaggacttacacctgggtctgctggctttcctgcctaaacttctaggtttttcttttcttttttgttattttgaagtttgcgtttatttattttacctgcctttttgttttcaatttttttcttaattttttcagacagattcttactctgtggcccaggctggagtgcagtggcgcaatctcagctcactgcaatctccgcctcctgggttcaagtgactctcctgcctcagattccagagtggctgggattataggcgtgctccaccacacctggctaatttttgtatttttagtagagcggggtttcaccatgttggccaggctggtctcgaacttctgatctcagatgatccacctaccttggcctcccaaagtgctgggattacaggtgtgagccactgcacccagcttaagggtttttggttttgttttttttttttgcttgtttgtttgttttttgtagagacagggtctctgtcgcccaggctggagtacagtagcacaatcacagctcactgcagcctcaaacccttgggcttaagtgatcttcctgcctcagcctcctgagtaactgggactacaggtgtgtgccactgtgcctggctaacttttttttttttgcagagatgaggagtctcggccaggtgtggtggctaactcctgtaatcccagcactttgggaggccaaggcaggcagatcacttgaggtcaggagttcgagaccagtctggtcaacatggtgaaaccctgtctctactaaaaatacaaaaaaattagccgggcatggtggctcgcacctgtagtcctaactactccagaggctgagacacaagaattgcttgaacctgggaggtggaggttgcagtcagccaaactgcaccactgcactccagcctgggcaacagagggagactctgcctcgaaaaaaaaaaagaaaaaaaagattggggtctcactatgttgcccaggctggtcttgaacctctggtctcaagcaagcctcctgcctcagcctcccaaagtgctgggaccataggcatgagccactgcacccagccctggctgattttaactaggcttttaaaaaattggtgccaaattctaatcagtgcctatctccccagctctgctgctggttctgttgctcacacaccaaggaaactgtctttatggtgcctaggaaaagtgctgggtttgcagtaggggtccccgggcttgatctcttgtcatgcccctcgggctttggccagcccctcctcccctctgtgcctctgtttcctcacctgtaaaatagttagaattgctcctcctgaaacgggtggtatccagcagtctacactgtgcccagcacttagcctgcattcagtacatatttgttgcgtgcatgaatgaatgaatgatctgcctggtacagacaactgcttggcatcattgccataagagctatttacctccaaaaggacttgctgcactcacttcttctccctgccactgccacccatcccatagcttgccaaggccttgctgagggagcggaaacaggcgcaccgccgtgccagcaggctcaccagccagacgcaagccacgctccaacaggcgtcccagcaggtgctggcgtctgaagcacgcagacaggagctggaggaagctgagcgggtacgtttgccagggcccctaccctatcgcctcctgcccctggcagcccgggtggggacgccattcaagctgtttcttcctcctccccctgaaaggtgggtgctgggctgagcgagatggagcagcagatccgggaatcgcgtatctcactggagaaggacatcgagaccttgtcagagctgcttgccaggctgggtaaggaggccctaaggctgggccctgaacccctgggtccctggggcacctctaggatcttcctgtgagctccagtcctggggaagatttcctccttgtcctcattgccatgcttcccgcatccccatctttgtggtcaatcacaagcatttataaccatgcccaggcccccttgccatgtgggacagggttggcatctagaagtgagttcactttgagtaactgtttgtgcctccagggccctctattctttggggcagggcagggggcacacagaaaactcaccattggcaagaacacccacaggcaccgggtgagcaggtgagcaggtcagtcctcaggagctgagggttcaggagaagaagaaagactgtcacggcagaaagtgtcatcaggtgctggtctgggatcagactaagattcaagtctggctctgtcccttctttggccattagacctcgggcaagccactccacctctctgagcctcagatcccccatctggaaaatgggagtaacagtggggtggtttagaaagcgcttaccacggtgcgtggtgtatgttgagagtgagtaaatagcggctcgtaggaaggaggtcagattcaagatgggccttagcaaggaggcattttggatgaagggaatagcacctcccaaggcacgaaggttgcagaggcccagtgttgtggggaggctcaggagacagcagacagggcagttgggctgaaaagaacagcatgtatttttttcaaattgtaaaagacacataatattttccatcttaaccattttgaagtgtacagttcagcagcattaagtatattcattgttgtgcgatcatcaccactacccatctctagaacactttcatcatctccaactgaagctctgtcctcctgaaacactaaccccccatttccctcccccagcccctggcagccatcattctactttctgtctctatgaatttgactactctgggccaggcagggtggctcatgcctgtaatcccagcactttgagaggctaaggtgggtggatcatttgaggtcaggagtttgagaccagcctgaccaacatggtgaaaccctgtcccttctaaagatataaaaaaaattagccaggcatggtggcacatgcctgtaatctcagctacacaggaggctgaggcaggagaatcgcttgaacctgggaggcggaggttgcagtgagccaggatcacaccactgcactccagcctgggtgagagtgagactccgtctcaaaagaagaacttgcttagaatcataggtgggaattgaacaatgagaacactcagacacagggtggggaacatcacacactggggcctgtcatcgggtggggggaggggggagggatagcattaggagaaatacctaatgtaaatgaccagttaatgggtgcagcataccaacatggcacatgtatacatatgtaacaaacctgcacgttgtgcacatgtaccctataacttaaaaaaaaaaaagaatttgactactctggggacctcatataactggaatcatatagtatttgtacttttaaaatttttttggagacaggatcttgctctgttacccaggctggagtgcagtggtgcagtcgtggctcactgcagcctcaaactcctgggctcaagcgattcttccacttcagccttcgaagtagctgggaccacaggcacgcaccaccacacccagctaattttttttttttttttttttggagacaaaaaaatatgttccctatgttgcccaggctggtctcaaactactgggctcaagtgatcctcctgccttggcctcccaaagtgctgggatcacaagcgtgagccaccatgcccggccttatttgtcctcttttgactgacttatttcacttagcagaaagtcatcaagattcacccatgtggcagcaagcattttcaattttcattcgtagtaagaggagagagaattgccatgctctacacgttgtctggacaccaggcccacactaagctattcacacacgtgatcttacagaattctcatactcactctttgacgcaaggacagttattcttttgccgttttgcagatgaggaaactgaggtgaggagagtttatttttattttttatttatttttgtttttttgtagagacagcgtctcgttatgttaaccaagctggtgttgaactcctggcctcaagggatgctcccacctcaggttcccaaaatgctgggattacgggagacagccaccacacccagcttagcacagagtttagataatgtgcccagggtcccacagccagtcggtaggaaagccgtggctcacctgcgggtccaagtgactcagcgtgcgtgcaggtagccactagtcgacacctaaggccctgtcgtggagcagacactctcttcaaccattcctgcattgtcactgtcattcattcacttgtcacactctgtgttggccttgtgcttggcctggggatgcagaatgaagagcacacgcctggccccttctccaggagccctaggcagcctgggcaggtagagtgggggctgtaatccatttctgaatctcttcgaagaccaggctgtttggattttgctgtgggccatggggcctcttgaggtcctcctaggtcagcagggccttggctcccctctgccttctcttgcacactggctcagtgcttgcagctgcttgcccaggaaatccagggcctcggggatcccaggggcccagtggaatcctgtggggttagaagcagccacttggggctgggcatggtggctcatgcctgcaatcccagcactttgggaggccaaggcgggtggatcactggaggtcaggagtttgagaccagcctgaccaacatggtgaaaccctgtctctacaaaaaatacaaaaattaggcaaggcgtggtggctcacacctgtaatcccagcactttgggaggctgaggcgggcagatcacctgaggtcaggagtttgagaccagcctggccaacgtggtgaaaccctgtctctactaaaaatacaaaaaaattagcggagcatggtggcaggcacctgtaatcccagatactcgggaggctgaggcaggagaatcgcttgaacctgaggccacagtaagctgagatcgtaccactgcactccagcctggacaacagagcgagactccgtctcaataaataaataaatgcatccatccatccatacatacatacaaaaattagctgggcatggtggtgtgggcctgtggtttaccccagtgattgcccacatccaggcccacaggcggcatctgtaaacgtgtgctgtcagtgaattgagccagcatgttcaagctggcaaaaatcacaggggcctttctcccacactgttttgtaaatgagtaaactaagactcagagaggactcacctgaggccttcttttttaacaataatagtaaaaccatcaacaaaaatgacatttgtcaagtgccacccaggaggatgttctagagtctgcccatgggcccgttgggatgctatgggtcctcacccacctcccagcccttctgctccccatctttccctggtggatggtgggccattggaatcctgggaggcctgagctggggagaggctcaggggctgggaggtgccctggggcctgcagggctgctggctcacagtgaggctgtttgtgccccaccacagggtcgctggacacccatcaagccccagcccaggccctgaacgagactcagtgggcactagaacgcctgaggctgcagctgggctccccggggtccttgcagaggaaactcagtctgctggagcaggaatcccagcagcaggagctgcagatccagggcttcgagagtgacctcgccgagatccgcgccgacaaacagaacctggaggccattctgcacagcctgcccgagaactgtgccagctggcagtgagggctgcccagatccccggcacacactcccccacctgctgtttacatgacccagggggtgcacactaccccacaggtgtgcccatacagacattccccggagccggctgctgtgaactcgcccccgtgtggatagtcactccctgccgattctgtctgtggcttcttccctgccagcaggactgagtgtgcgtacccagttcacctggacatgagtgcacactctcacccctgcacatgcataaacgggcacaccccagtgtcaataacatacacacgtgagggtgcatgtctgtgtgtatgacccacacgtgttcaagtctaatccatccagtcagcagcttacggtccacacacattacagtccacagctgttgtgagagccacctgtgtgctggacaccctctggatgttgggcaagttgttacatgagatgccctggggtgctacatccactcactccagatagcagggaggtctcagcagatctgcagagatcaagggggtcagcaacagccaaagcccctagtcccagagctggctgccctctgtttcacagcagctccctgacctgtgttgctgcgtgcactccctacagctcgacacagccaggggaccaacaggccaagaaatgcaagatcccgggagggttcttagcagcagaatctgaggcccagagaccctgaggccgtggccaggcctgctagtctggctagagcaaggcccattcctggcgggggtgtcattgccttcaccggacgcttccctctcagggtcctgggactgcaccagatgccctgagggaatggcccaccctggcctgtacccacttcagcctgtgatctatccaaagagccaggcccaaaagcgcctaggtcagggtgctcaggctaccaggagcacgcctctgtgcccccggcaacccagttgacctttaattgacgctttccagaccagccctgcggcaccacttgccatgcgggaggccaccagggtgtgcaagcctggctgccattccagtctgtcctgtctgggaatcgccctgtggccaggcccgcatgctggcctctgcccaggactcctcagcatttcctcttggcatccctcccctctcccagaccctcttccagcagatggcaaggcctcggcattgggaagtcaggcacctctgcgggcccagccccctcccgtggctcccctgacaggggcaggggtagggcagcagcacagaccaattccgttgaacgtggaaataaaggaccctttcactgggcagggtggtgtgcctcaccctccccggctggtgggcagccagggccctggctgtgggtgtgcatatgacacacctagtaggtggccagcatgtggaccggacgttggtaggaaggtggcaaaagccgagctcgtggctgggccagtacctcccattagagggctttgctggggttgtgtgatcacaggtacctaccctgtcctctcaggcacttaccacgtaaagcctaggagctggtgagttggaggggtggggtgcggagaggccctcagctgacctctggttcaggctcgagacgaactcacagccaagtgtccgaggatggtgaggagcagggaggggcgccatccaggagggggatggtgtgggtggggccttgaagggtggggaggcagagaaggaagcattccaggcaagagggtggacaacagtccggggcccgcagggttggggctcggccagcttgcatcactccaggaccccaggttgaatggggtgggatgttggagctgctcagtcagggctcttggccgcaggcctcaaacccctcctgaggtggtttcagcagaaaaggggtgttgggagggtcgcttggaaccctggagtaaaaacggctgccacgtgttggagatagcctagggaggggagcctgaggcttccgggataggttggcttccctcttcccccctcccgcctctcttcttggtctgtgtctctgctctcctctcctgtatctgcttcgttcttttctctttatttattgattttttttgagatggagtctcgctctgttgcccaggctggagtgcagtggcatgatctctgcccactgcatcctccacctcccaggtttaagcaattctcctgcctcagcctcccgagtagctaggactacaggtgcttgccaccatgcccagctaattttggtatttttagtagagacagggtttcaccacgttggtcaggctggtctcaaactcctgacctcagatgatatacctgcattggcctcttaaagttctgggatttcaggcatgagccactgcaaccggcccattcttttctctttgcagagtggctttctttgtttttcttgtgcctgataggagaggacacccacccctaccgccatcccccataatggccccaggtgtacatgtcatcaggtccagtgcttgcaagagacaagctggtgactctgtcctgattccagcttctcagcttaggtgaagtcccaccaacccccgttcaggataatgaggatctctggatctaaggccaataatggatgaccggtgccaccccccaacctaatgggagatggtgttcagagaagaggtgtgctcctccacagaaaactgtaaaatcaaggctacggtgggggattgacatgattaaactgagctaggagtga

SEQ ID NO: 1210 - DNA, 139117 bp, Homo sapiens
gcggtactgtgacgtcacctgaggggggcacttccggtctcgtgccgccttcccaggaccctcagggagagcgggcagccttccaggtggacaggtgaggtacagcttgccgagctcagggtgactgcccaaaggaaggacgggtgggcaggcacgcgggatctggcgccccttcttctctatggttcctcgcagagcccctgttgccctgggccagatggcccgtagcagcaaaaataatactgttccgacagctcgcgagttcggagccacttggcctgggagtcccttgagttgcaggccgggcagtcgctcacccgagcgcggtaatgcagcatttgaacccctaagtgtagcccacctgtagggagtcttatggtgcccccgcggaggagtagaggccaaaaagttgggcagctggccgggaagaactcgctaggaggggtcaaactctgggccgggagtgttctttgcccccggcgtttagtgctcacgccgccttttattcacgctgaagaccttaaccgtaaaccctcatccttgggtcttagtttggttttgttccccacgcaagacagaatgcagattggaacactttattccttggttaattcgtatcttccctcgcaagtagttaccggacacctgctttgtgtcctgtgtaccaaacacaagagttgatagtcctggccgggcgccgtggctcacgcctgtaatcccagcactttgggaccccgaggcgggcggatcaggaggtcaggagatcgagaccatcctggctaacacggtgaaaccccatctttactaaaaatacaaaaataaatacataaataaataaattagccgggcgtggtggcgggcgcctgtagtcccagctactcgggagactgaagcaggagaatggcgtgaacccgggaggtggagcttgcagtgagccgagatggcgccactgcactctagcctgggcgacaaagtgagactcagtctcaaaaaaaaaaaaagagttgatagtccttgagttgaaagaacaaatctgtatggagaaagagatacaaccaaaagaaacccagaagatttagaagcatctccagaatgtttattctcaaaagctgttttttaattaaacttctttctgaaactatacgtaggagtgtctcttgtgtgtttccccatttttccacctgaaggttaaagacttagaaacctgctaaggcccctctttccagcatgtagcattctagggggataatcagggcaacacagtgggtgcccatctaaaattttatattttaatattttgctttttgataacttaatgccttcagactggaggattttttctttcttttttttaatttttttaaaattatactttaagttctagggtacatatgcacaacgtgcaggtttgttacatatgtatacatgtgccatgttggtgtgctgcacccattaacttgtcatttacattaggtatatctcctaatgctatccctccccactcaccccaccccacaacaggccccggtgtgtgatctcccccttcctgtgtccaagtgttctcattgttcaattcccacctatgagtgagaacatgtggtgtttggttttttgtccttgcgatagtttgctgagaatgatggtttccagcttcatccatgtccctacaaaggacatgaactcattcttttttatggctgcatagtatcccatggtgtatatgtgccacattttcttaatccagtctatcattgttggacgtttgggttggttccaagtctttgctattgtaagtagtgctgcaataaacatacatgtgcatgtgtctttatagcagcatgatttatattcctttgggtatatacccagtaatgggatggctgggtcaaatggtatttctagttctagatccctgaggaatcgccacactgacttccacaatggttgagctagtttacagtcccaccaacagtgtaaaagtgttcctgtttctccacatcttctccagcacctgttgtttcctgactttttaatgatcaccattctaactgctgtgagaagatgtctcattgtagttttgatttgcatttctctgatggccagtgatgatgagcattttttcatgtgttttttgtctgcataaatgtcttcttttgagaagtgtctgttcatatccttcacccactttttgatggggttgtttgtttttttcttgtaaatttgtttgagttctttgtagattctggatattagccctttgtcagatgagtaggttgcaaaaattttctcccattctgtaggttgcctgttcactctgatggtagtttcttttgctgtgcagaagctctttagttaaattagatcccatttgtcaattttggcttttgttgccattgcttttggtgttttagacatgaagtccttgcccatgcctatgtcctgaatggtattgcctaggttttcttctagggtttttatggttttaggtctaacatttaagtctttaatccatcttgaattaatttttgtataaggtgtaaggaagggatccagtttcagctttctacatatggctagccagttttcccagcaccatttgttaagtagggaatcctttccccatttcttgtttttgtcaggtttgtcaaagatcagatagttgtagatgtgtggtattatttctgagggctctgttctgttccattgatctatatctctgttttggtaccagtaccatgctgttttggttactgtagccttgtagtatagtttgaagtcaggtagcgtgatgcctccagctttgttctttttgcttaggactgacttggcaatgcaggctcttttttggttccatatgaactttaaagtagttttttccaattccatgaagaaagtcattggtagcttgatggggatggcattgaatctataaattaccttgggcagtatggccattttcacaatattgattcttcctatccatgagcatggaatgttcttccatttgtttgtgtcctcttttatttcattgagcagtggtttgtagttctccttgaagaggtccttcacatcccttgtaagttggattcctaggtattttgttctctttgaagcaattgtgaatgggagttcactcatgatttggctctctgtttgtctgttattggtgtataagaatgcttgtgatttttgcacattgattttgtatcttgagactttgctgaagttgcttatcagcttaaggagattttgggctgagacgatggggttttctgaatatacaatcatgtcatctgcaaacagggacaatttgacttcctcttttcctaattgaataccctttatttctttctgctgcctaattgccctggccagaacttccaacactatgttgaataggagtggtgagagagggcatccctgtcttgtgccagttttcaaagggaatgcttccagtttttgcccattcagtatgatattggctgtgggtttgtcataaatagctcttattattttgggatacgtcccatcaatatctattgagagtttttagcatgaagagctgttgaatcttgtcaaaggccttttctgcatctattgagataatcatgtggtttttgtctttggttctgtttatatgctggattacgtttattgatttgcgaggacttttttctttgttaaaatgttgctctgctttcagcattttctcccttgtagtattaccataatgtatttaagattgagcacttaattctgaagtcactttaagtatacctcaaccaaagggaaattaatatattatttctaatgagtgtatttaatataggtaagtagtttgtacacttgtgaaattcttggcattaattgatgtccagaagctgaaagctactctctggtacattaaaaaaaaattgtgtgtgtaattacaagaaagtttgatgtcacagttgcaaaggagttgtgcaaaacaaattgcctttttccagtaaagataattcagcaagttcatcttgagtgtagtgtgtggtttcgtttttaatatgtcctcagcagtagtcatagattttatcttcatcatttaagctttattttctggcccacttgcacagatttaagaaaaatctcactggggttagtgtgcagtcattcagacagcaaatacagcaaaagtaggtgaaaatgtaaaagtcattaaaagaagaattgtgaaattgctcatctcgcaaccacatcaagcaggagcaaagacaactacacagaatcttggtgtaacatacactcattaccacttggactttctcctacagtattttgcagtttgttttttggattctttagtgttatataatatttcaaagtaatatgtgactgggaaatattggaataggtatcagaagactgtagaatttattttgccatttaaatgcttatgtccttgaacaaaaaatgtaaacatctttgaccttcaatttcttgttctattaattgcctgctttttaggtctgatgagaaaggaagagaatataatttgcaaataaaaagaagcaaaaaaaaaaagcagtagttttattgcaaggggctagatggtgatcaagttaggatatagaaaacaattacttgttcttacatgttattctggagaaagatgagatggatacccatagttacagcagaagcgtaaaaagaattctgtttatgcatcatctgtttatgtgttgactttcacctgtatgttttcaagtttatatagggctatgtgctaagattcccaattttcccctttcataccacttattataccagttgcaattaaatacatatataattattaataacttttttaaaaacctttttgttttgagagaattgcatattcagaggaagttgcaaaaaactttacagggaagtccttgtgtacccttcagactgcctgcctcaatggtaacaacttggataactgtggtacgatattaaaactgggaaattgacattgatacaattcacagagtatatttccatttcaccaactttataaggactcatttgtgtgtgtacacaggtctatgtgtagcttcttataactaccgtaatcaagataaagaattattccatcaccacaaggctcccttatgctgcctccttatagtcagtctatcttgtcccagccctatccctaacccgtggcaaccactgctctatctctataattttgtcatttcaaggatattgtgtagatggactcataccgtatgtaactttttgagatccatccaaattgtgtgtatctgtcatgcatttctttatttattgctgagtagtattccatgggatggctatgctacagtttgtttaaccattcattcattgaagaacatttgggttacactattataaatagagcttctatgaacttttgtctgaagatttttgagtgaacatacatttttccccctctgggataaatgcccaagagtacaattgctaagtcatatggtaagtgtatgtttagtgaattaatacttctttagcttgttgatatggtgagttacattgattttaaaatgttgaacacaactggtataaatctcacttggttaaagtatataattatatatttccatattctatttgctaatattttgttaaggtataggtagagaggtgtgagaggttaaggtataggtatgagagatgtgttgtagttttttgcttgtttgttttgtactgcctttgtcaggctttggtagggtaatagtattctacatggtttttagtgataacccttgtttcattattgctactgtattagtaatttgtgtcattttatctttttcagtgatgatttgctggttatagtgacctttttcaaagaactcgctctttatttcatctttgtctatttttatatttttaatgtcattgatttctgctcttatatttattattttcttccttctcactttaggtttattttgcttcttgtctagtgctgtgattattagtttaaggtctttctttgtttctaacgtaagcatttattgctataatttccctcttggcattgcttttgttgcatctcacaaattttgctgtcttgtattttcatttctatccagttctatatagtttaaatttttccttagaaatttgcttgacccatgaaaatatttgggagtgtgtcatttagtttccaagtgtttggtgatttacctgttgtttttctgttgttgatttctagtttttttccacaatgatcagaaaacataagctgtataatttttaatttttaagtttcttttatgactgagggtatggtgtatcttggtggatgttccatgtatgcttgaaaagaatgtgtattctgttattattggttgcagtgttctatacatgtcagttatgtcctgttcattgatggtggtgttctgttcttctgtgtcttcttgatcgtctaatagttattttcgttgctgaagatcccaactataattatggatgtctctgtttttcctttgagctctgttggttttggcttcatgttaaatatctgttgtttggtgcatatacatttaagatgttttcttgatgaattaatccttgtatctttgtacaataattttctttgctctgaagtctacttaactgatggcagtgtagccatcactacttaaaaaaagtagttagtatggcatatcttttccatacttctgttttcaacctaccaatgtcattatgttttagtgaatttcttatagacgctatatgcttgggtcttttaaaaaagaaacttctctgccaatctctgtcttttaactagtatagttatatcatttacacttaaaagtaattgctgtgttagggcttaagccagccattttattatttgttttctgtttatttcctgtttttcatatctgttcctcttttctggtctttctgtaggttgcttgaatattttcagaattctatttgacatgtttatagtgtttttgagtatctggcttagttaaccttttttagtgtgctttgggtataacaatagatgtaacaacttatcacaagggatacttttattgccttttgccaattgaagtttagagacctttcttccatgtaggtcctttctccttttccctttttaaaatttaatatttgtattttctctatacaccttgaacaccacatcaaatgttgttataacgtttacttcaactatcaaatatgatttaagaaactcataagatgaagaatagttcattttatatttaccatgactattacccgttccagtgttcttcctttactcaaattaaaccttattgatacatcatttcctttttgtttgaggaacttttttttaggagaacctcctaaagatatgtctgttagtgacaaattagtttccgtcatctgagaatgttgttcccctttgttcctgaagggtggttttgtcctatatggaatttggccttgacagttctttttctttaacatttgaaaaatgtgccatttctttctggcttccatgatttctgatgagaaatctgatggcattcaaattattgttccccttaaaggtaatgtgccatttctctttggctgcttttgagatttttttctttgtttttaattttctaaacttgacttatgatgtatcttttatttttattttttcccacttagggtttttctcagcttcttgactctgtagatttatgtcttttgtcaaattgtgaagttttcagctattatatctttatttttttcagcgccatactttcttctcttcctctaaaactctgattggatgaatgttaggtcatttgttattgtcctacaagtccctgatgcctttcttgtttctttgtctgtttttctgtgttcagactaagtaaattctgttgatctgttttcaagttcactgatcctgttctctgtcaattccactccactattgagcccatccagcaagtttttaattttaattagtattttttctattttgtaattatttttggttcttactttttaaaacatttcatccttcaaggagagctactttcaatatacatggaatttcttggaaaaactagtaacagttttaggttatttgtatatatgaactaatgttactcaagattttaaacctctgcagagttatctctgtaattagcagatgaagcatgaacatacataatttttttctctttttgtctcaggtaattccttgttacaggccctaataaaagggaaatggggaaggaaatggagaagagaatttaggccttggcaaattgaaaattgtctgtagtatctcactgacaggtaaagtaggaattttgaaattagagaaaaggaaccaggaatgaagatgaaatgaaaaatttatatttacttcactaaaacttttaaagttgtcatatagtttcagatttaaaaagctatttcttccagcctaggcaacatggtgaaaccccttctctaccaaaaatacaaaaagttagccaggcatggtggtgtgtgcctatagtctcagctacttgtggggcggaggctggaggatcacttgagcccagaaggttgaggctgcagtgagcgaagattgtgcccctgtattccagcctgggtgacaaagtgagatcctatctcaaaaataataataaaaataaataaaaaatcaaaaagttctttctcctttccttcatttcccttgaagaatactgaagattttacatagatgacaaattaggtaaatctaagaaaaaacaaaaattaagtagaacaggtaactttcagtggccatacttgagatttaggttatattgactgctgaggtttatcagtttgattcctatccctacaatataattaaaaataaaccatggaccccccccccccattgtcagactcactgacagtataacattgtgattaaaaagctctttctcagtaagtatgaaaagttaatgcatgaaaaataatatatgttaatttagtgggggaaaagatggtttctgtattacagtggtattaacacaagtagctttccatctgaaagaaaataaagttggatccttatataatggattaaaggtttagaagtagagactaataaaaattaaaatagacatctgggaaacaatatgtaaaatatggaaacccagaaaagagttagtatctgcattatacaaagttttcttacagactgataagaaaaagataactcacttggaacctagacaaatgatatgaagagacaatttacagaaaagatagtctaaaaagctaacaaacatgaaaaaatgcttaaacacacttgtagtcagtgaaatgcaaattaaagagtaaggtattttatatccaaagactgtaagacttacaaagtgtggtatcacttagtgatgatagggttgcagagggaaagataccattctacatcgctaaaagaattacattctttttttgagaataatctggcaacatctattaaaattcaaccagtaatttcacacttggcaatctggcctataaaaacaaaagcactggtagatatgaatgtatgtgagaacataggtatttaagggtacttattgcagcattgttctgaaaaaactgggaactaattgagtgcttggcaccagggagatggtcatataacttatggtatatccacattatggaaccattaaaaatgaattacttatataaactctttgacttggcaggatatccatatgttattaagtatgaaagcaaaatgcatagaagtatatataatatgctactatttgtcaaacactggcaactcattcatgaaaaaatacataaatgcttaacatatatttgtgtataattatagaagaatatggaagactatactaagttaataacatgggtttgggagagatatggatggtaaggaggagaggtagagtggaggcatgatgcaaaaggttaaaaaattgtttagaaaaatcacagcatgcattatatctcatttatccatataagtgaaattatatatatgcatataagtagaattttaaaaataaagaacatgagctctggaatctttcagacatttctggattcaaattctgactctgccactttacaacttactagctgtgtgacttaggcaaattgcgtaatgtctttgaatcaattttctcacatattttcttggggtgggaggatgaaataatagtacccatctatagggttgtcatcaggattaaatttagatagcatctgttaagtgcttagcacagtacctggcttacagaaagcactctcagttattagttcttactgttgccttggttcttacgctcttggacatttgttaatatctatttttaaaactttatcaccatcctgccactttcttgaaacactcctcactggcttacattactttacatgtcttagttaatgcctgtttctaattgttcctttttattttgctgatatcttttttccttacctatggatattgctcccaaaatatagcaggggttgccaaagaagcttttgaattagggtgactgggagaatattagtccatatatggcagcagagaagtcatgatgtagggtttatagggttgatttttaaaacaagatgattttgatacttgctctgcagaagttttatgcatcaatgaggcacccagatgaaaatgctcaatagctggaaaaacttgacaggaacttgagaagtagatataaaggattctctcacttggctaattctcgaagtggatgtaatctccaggggagagcatatagagaagggaatccagggcagaaactttggggacagggaataggagaggaaaaggttcccattgaggactgggaggtggcatagaagccaaaatagagaatttctttaagaagctgctggagaaactgtatgtctactttgttctctcttgagctttagttctgtggctcacattgtcttctggccttgttccttattttcttgaaacttaaactacatttgtaactaatcccagcttcctttcctcccactaaattcccttcttttacatttccccctatatgtatgtgaggagtgctttcattcccctcatctttggcatcaaaatctgtcatctctgcccctttcccttccctggttctccatatcattaccaagactctcattcactcctttttcattcccactcttgcctacatttgattgattattatcaaaataatctaaacaggatattttgaaataatctaaacaagattattttgatagctgccaaactctagtgtaatcttgtgttttttctgtctttcatagtcctcttaaaagaactagtttaggccaggtgaggtggctcatacctgtaatcccagcactttgggaggccgagaggggtggatcacgaggtcaggagatcgagaccgtcctggctaacacagtgaaaccccatctctactaaaaatacaaaaaattagccaggcatggtggcaggcgcctgtcgtcccagctactcgggaggctgaggcaggagaatggcgtgaaccccgggggcagagcttgctttgagccgagatcgcgccactgcactccagcctgggcgacagagcaagactcatctcaaaaaacaaaaaaaaaaaactagtttaatccagttaatccagtccctctgccttttaaatccaccagattatctttcctccaacatcttcccaaactgttctgaggaaggagatgaggtattaatgagagagattagtaggatcaccattaatgaaatatagtcaaatcagtttttagaaggttgagtccgggcgcggccgctcacgcctgtaatcccagcactttgggaggccgagatgggcggatcacgaggtcaggagatcgacaccatcctggctaacacggtgaaaccccgtctctactaaaaatacaaaaaaattagccggccgtggtggcgggcgcctgtagtcccagctactcgggaggctgaggcaggagaatggcgtgaacccgggaggtggagcttgcagtgagccgagatcgcgccactgcagtccagcctgggcgagagagcgggactccgtctcaaaaaaaaaaaaaaaagaaggtcgaatacctttttggcaccagggacccattttgtggaagtcaatttttccacaaatggtggggagtggggagtgatggttttgggatgaaactgttccatctcagatcactgggcgttagtttctcatagggagcatacaacctagatccttcgcatgcacagttcacaatagggtttgcgttcctgtgagaatttaatgcctccactgatctaacatgaggcggagctcaggcagtaatgcttgcttgccgcttatctcctgctatgtggcctggttcctaaccagttccagaccatggcccagggattgtggacccctgttgtatactatgtccccctctaaagcattctcagttcttatcggtgtgctttgaaaaagttcctcagaagtaaagcttatgtgcctttgtgtttaacttaactttgcagattgtgttttccaaagatggccacaatagtaactcccataccacatgttctttttacaatatgactttgacacttcttctactgacccctctcagtagaaatgtcacagtcatattgtacaaagaacatgctgtctttgaatattgatgggcttctgtctaacatggaagtgatgctatgtgacttttgagggtaggtcataaaaggtgatacaactttaatctggtactcttgagacatttgctcttggaaccaagccaccattttctgaagaagcttaagtagcccatattggcaggccaaatggagaaggcacatgcaggtgttccaggccaacagcctatgtgacaacagcatcagtcaccaagcatatgaacaaagatacttccagatgactcctgcctccagtgatcagatcacacccagttcttgagttttctcagctaaggccccagactttggatcagagataggctatctttgttgtgccctttctgaattcctgacccacagaatccataagcatagtaaatggttgtcttaagccactaagttttaaagtaatattttagatagcgagagtaactggaacacccaatgtttcctgagaacactttattttcttaagtatggtaactggtagcttgtgatacatgttccttggaaaacctgtttgtggaatttctggttttctaattttttagcttgccattcaaggccttcatagtgaacagtaggacagcttcggtattggcctatacatatccagcaaatcagtctcctccctgaatggtattttatttatagtttctgtatcagtattcttttactcttctagaaagcccttatgtttattcgctgatagtctcttttgtgaagtgcctgttcaaatatcatttttctattgagttgtctcttactgatttgtaaaagttctttgtaaattctggatatgtgcatgttgggacaaaaatctatttttatatcctgtgtgtatatatatatttcctaacaacaggctcgttttcagaatactatacatatgtgtatatatgtgtgtgtgtatatgtatagtgttctcccactctgtgacttgccttctgactctcttaatagtgtcttttgctaaatccaagttcttaattctaatggaggatggaatttgaaagtcttttcctttttttttgagatgaactctcactctgctgccaggctggagtgcagtggtgcgatctcggctcactgcaacctccgactccctggttcaagtaattcttctgcctcagcctcctgagtagctgggattacaggcacgcgccaccaagcgcagctaattttttttttttttgtatttctagtagagatggggtttcacgatgttggccaggatggtcttgatctcctgaccttgtgatccacctgcctcggcctcctaaagtgctgggattacaggtgtgagccaccacgcctggcagtcttttcctttatggctcatgtttactattaccttgtttacgaaacctttggccaccctaagctcataaaggtatgttccaatgttatcttttggaagctttattgttcacgtttcacatttagatctataatatacctagtactatattttgtctgtggtgtgagaaaggagtcaagattcatttattttccacatggatatccagttgaaccagcatcatttatttgaaagaccttgttttccttactcctctgcatgaacgccattgtcatgaatcatgaagatatatctttggatttgtttctggattccctgttcttgtccactgttttgtctatgttgtcttcaataatggtatatttttattaaacctggatatagggtaaagtcctccaactttgtggttgttcttcaaacttgtcttggctattctttttttttttttttttgagacggagtctctctctatcgcgcaggctggagtgcagtggcatgatctctgctcactgcaagctccgcctcccaagcgattctcctgcctcagcctcctgagtagctgggattatagacgcccgccaccacgcccggctaatttttttgtattcttagtggagatggggtttcaccgtgttagccaggatggtctctatcttctgacctcgtgatccgcccgcctcggcctcccaaagtgctgggattacaggcgtgtgagccaccgcgcccggccttgtcttgttattcttgactttttacacttccacatacatattagaattagcttaacaatttccatttttaaaaaaaggaaagggaaaagacctgatttggattggaattttacaaatctaagaattaatttggagtttatactagtgagacttccagttcacgaatacagtttgtcccctcgttatttaatttctctcagtaatatccagcaaaccacgtagctttctgtgtagaggtcttgcacatcatttgttagatttattcctaagtatttgatttttttgatgctgttataagtggtctcttttatgttttattttcaaattgtttgttgctggtatgtagaaatatatttgattttcatatattgaccttttagctaatgaccatgttgcattcacttattaattcaaataatatatgtaagggtttttttttttttgcattttctatgtatgtcatcatgtttgtgaataatcacactttcttcctatccaatctaaatatatttatatctttttttgttttcttattgcattggctgagacctcaagtatagaagtgttgatagcagacctccatatcttgatcccaaactcagagagggtttcaatattttacccttagtaaacatttactgaagatttttaatacttgtattatatgaaaaaaatgaatttcatatttatattttataaaagatttctttatttctcacttgttaagaattttttcatgactattggattttatgaaatattttctgtatcaattgagatgattatataagttttctttattctgttaatgtggtaacttaaactgattaaattttgaatatttaaacaacttctcatttctgatatatacacaatttagttgtcatctattacccttttgtatagcactagatttggtctgctaatattttgaatagtttttgcatctatctcaaccttaattataatgtacattttaaagtaaaaattacaaagaattgctgattgcataaaatgagttgggaagtgtccctctttttctattctctggacaactgtatgtaaaattggtattattccttccttaggtgttaatttcatctggaccaagaattttgtcttaaaatataagtttattaagagtcttctagtctgttttctttttgtatctgttgggtttggtttttttgtttgtttgtttgttttggaatttgcccatgtcaagtttattggcatacatttcttcatatttgtttattattttttgatgtctgtagaatctggagtgatatccttttttcacttctgatattgattgattgtaccatctcttttcttgagaagtcaagggtttacttatttataggtgttttcaaagtaaaaacttttgggtttgctaatcctctctaatgtaaactttttttcctatttcattaatatctactcttcattattatcttttttctattttctttatttggattcatttattttttttctaattccttaggccaaatggctaagtcctttatttgcagccttgttttctaatatatgcatttcaaaactttgaattttcctgcattcgtatctttatctgcatttcatacattttgtgtcctattttctattctctattgcttctctgctttctgcttatttctatattaattattttctatattttattaatttgttatacagtcttataaattctttcagtggttatggattttttttaacatttttaaaaaggttttctggcttttctaattgttctcaatggaagattatttgggatgtacagatcaccagcatgtttatgttggcttctaggccaattttaaaaaatgactaaagtaaaacttctgttaccaattaaaaattttgtttttctgccctgggcctttaaaagtcaaacctgcacttgaccagtcaccatatattttccaagtaggtttaatactagtgcctaggaatagcactaatgaaggttcagacacatgcaaagtatatgctctgctctgtgtcatcgtggcacaataacagagtccacagaatggtccacatttaatattattatgtttaaagtttttggcatttgaggaagttttagaagcttcctgttcatcttacatatgtaataaataatgtaagttatgactggatattgttggtactttaacttggaaagaaaaccatcttattacctctttttcaagtttttttgaaagactgtctggacatttaattgaaaactatttggacattgcaacacaaaccttaaaaaagttgttatcatctacagttcttacatgaataaagcagtattaccaagtagccaaagtaaaatgcagacattttactgtttgctgaagctgattaagatgtattatttataactccactttcaaatattttatttattagtacagtcttactgttctcaatggctaactttataataaataaatattatatttacatagaatcacttaatgtatactaagtatatatttaaacatataaataaatcagcccatgactttatatgtttgtattataaatagtataacaaatattataaatttgaacctctaaaatttatactagtcaaattatctaggtttgtatgagatttaattggaaaaaaccctcttactaaataaaattagaagcccattaagcaaattaaaacctatatttaagaaaataggcttgcctaagttacacagattgtatgcacgcttggtttttatccagcacaagtcttactgcttatgaaaattgattttattaaagattgcttatgggctgaggctgaaggcgtgccattatcctttaccagtatataattacaacgtactctcctttgttaatctgacagttatttgcagaactgaactaccttggattcttaggtagggaagagttttaattctcgtgcctcagattttccattgctgcttttacgtgggtgtgtgagattcagaaatacgagagtgaagtaaaataaacgatgctttataaatacatggaattaggtgcctacaggggaagctatacagcagctagccagcattttaattccatgtttctcagcttattttatttgaggtgttagagttgtacttttttgttttccaatgtttatagactgagcttgattttcatatctagttgaattctcactaattttgtggctaatcaagctcccacaatgtcatttacttgaagttaagtattgatatttatgatttgaatatatttaacaactttatagttaataactttaaattctcttctggtgaaggtattcagtttggccagtgtcttctcagtcagtgctctaatttaatatagtgtttagtgctaaatctaatattgtttctaacacattataaaggtcagaacttacataaatatactgtagtttgtgatagttttggagaatgggctacagtggcatttattagtgaagtaaaaattcagtccataagaaaatatgaagtgatactttatttagtccatatatttttaatggacagtggtctccactttctaagtggggatttttcatttttctaagtattcttaagagaatcagttttggacttttggttaaacatagaggttagaataaatatgtttatttcttcctaaattcactaaattaacagaataaacaataaaggaataaacaaagagaatgaaagaggcaatataacatcaggctagagaagtgaaattttagaaatgttagaaaagaaatgcataaattataaccaacttagagcagttttgatggaacataatatttgatcattatattgagttacaatttatttaattattccttaatatcgagtcatatatataatttttttagtgtctgataatgggttatcataattaagcattcatctatccatgaccatttagttttttcagcttttcactgttataattagcattccatgcatcagtcttaaaatattttaggtttttttcagaattgaatgactgaatcaaagtttataccttttatgagtattgatccatgctgccagattgctttgcaaagccatttttatgattaccatcaatgtgtggaatttcccatttcactacaacctagccaacattgcatttgccttaggatgttcaatctgggcagggacacatagcccttgcatcagttgcttgtctgtggtgctgtgggaaagtgtggcatgacatgacaaattttaccaggtgaagcttagctgtgtgcctttaccactgccaccttataataaagacagatgctgtgagtttagaggaagaggtgatttcctttgtttacctggggtgctcaaggaaggcttcatgtaacaaatagaatttgagctgtgtataatgagggaaagatttataaagaaaaatttgcacagacacatgagagatatatcagtctggatcaaatcagaagacagaagccacatagtaactaaaattgttagtttaacttaaagaattattagggtatgataagagaaaaactatgaagtcactctataaggagaactccaaaagttaccctagggctgaggaaaagtacccaatgaaggacggaattgaaatgaggttcagacctcattgaaagtgtggctatagcccattggatggtagagaaatttgctgcgttgtctgagccaacgctggtgcacaatcacagtgtgagcaggtgagttaagactggtaggagagcatgcagagggaatcagggcagtgcggcagggccacagtaacaacccttggggtgcaagtgagttgaggttggctagttagtagaaggagttggagcaccactttagataccactggaattgcaagttggagaggcctccctgtgtagcaatctagagcactgctgtttacagcttggggcaggacagtataccaagctgctgtgtggaacaaaggtcaggtggctggctggccaagccggtgcatatggtttgaggagaggggctggggagtagccacctggtctggggctcctggctatagtgctgctgctgcctgagtagagagctggagaaagaaagcacacagccgctagccagatgctggagaaagctttcccctgcaggcacctagtactacagcagtgttgtttttcagccttggcattattgaccttcagggctggataattatttgttgtggggagctgtcctgtgtattgtaggatatttggcagtatccttggcctctattcactgtatctcagtagttccccaagttatgacaatggaaaataatctccaaatattgccatatgtcctctgagggcaaattgtctctagttgtgaaccactgcaatagagaaatctcacagcagtggaacagtggaggggtaaaatataagctctccagaaacctgctgagaaaactccttccctccctttccagtgcactgtattgacagagcttagcatcatgtcatactggcaaatgaaaaatattttaaaggcccagatccacttttccagataagacaatgaagaatgaatttggagtagagaggtaataaactgatagctgtacaaagtacagttatgggattaaatatggttggagaattaaatatgagcaaagttatagaagcagaaaagcgtaggggcactagggaaattcaaggacaagaagactaaagtgcaaggctgatgtaaagtggtaagaggagaataagctagaagggccctttgaatcttaactctggagtgctttgagtgagtggaagagaggggaagagaaagacagaaagaccaatgaaggtttgagatttggtgctgtcagtagatgaggaaggcagaggcagaggtggaggagtgatagaaataattgggacctacatttttgcacataactaattactcaggaaatggttcatgatagtatatcctgggttttttcccacctatccatttcataatttaatgtagtgctttaatacataaaatatgcttattggggctggatgtgatggctcatgcctgtaatcccagcactttgggaggccgaggtgggtggattatctgagatcaggggttcaagaccggcctggccaacatggcaaaaccccatctctactaaaaatacaaaaattagccaggcgtggtggtacgtgcctgtagtcccagctactcaggaggctgaggcaggagaattgcttgaacctgggaggcagagtttgcagtgagccaagatcatgccactgaactccagcctgggcaacgtatatatgtatatatatatacatgtatattgtgtgtgtatatagatagatagatatagtatgtgtggatatgtatgtatatgtatatatacatatatatacacacatattcatacatacacacacacacacacacatacacacacacacacacacacacacacatagaatttgggagaagagaagagtaatatgaggaaataagagaccatagggagttcattgtccctcttactcttctatggagtgaatgcaagggcaagccagaacctctgcactttctcaccaggtgaaggtaggggaacctgtctcatggtaatgcacagagctaaaagagaattctagcagagggaatttgtggaagttacggttttgactcaaacccctctatagtctttcatttttccaaggatatgtctcctcctttctaagtactttcgtggcttgttttacgtgtcttgcaatcgtataatccagcatcactgaatagtcttatagtttcccagatgtccttgtggcatttccttctaggtatattgaaacttgcccttttttattcttgaattttgtctttggctcaaggttttacattttactgactcttcatactacttttctccccttatttagaaatggactcagaactcaaggaagaaattcctgtgcatgaggaattcattttgtgtggtggagccgaaacccaggttctaaaatgtgggccctggacagacctctttcatgatcaaagtgtcaaaaggcctaagctgcttattttcattattcctggtgagcgtaaaagtctgggtgaggagactttttgtagatactcataactatgtctgattttaaagtatagagaatttggtaaatatggaaaaccttggagaaggaattaaaatcgcttgacccattgttaacaaccacccttaatattttgacgtctggattttgtgtttttcttctatgtatttacattatgttgtctgttgtgtgtgtgtgtgtgtgtgtttgtgtcacagttggaagtatgtactatatatgcagttttgtaatgtggtttttaaagcatttcttaatatttaaaacttcatcaatatttttgccagttttctaaactttttctgcctcatttcaacatgattatatgtttattatagaatatttggccaggtgcaatggctcacgcctataatcccagcactttgggaggctgaggtgggtggatcacaaggtcaggagatcaagaccatcctggctaacatggtgaaaccccatctctactaaaaaacaaaaaattagctgggcgtggtggcacatgcctatagtcccagctactcgggaggctgaggcaggagaattgattgaacctgggaggcagaggttgcattgcccccagatcacaccaccgtactccagcctggggggcagagcgagactccgtctcaaaaaaatatttaaaaaaataaaaaataaaaaaataaaaattaaaaattagaatattctgatatttggcagctgagtcacttgtaacttttgctagatcattgtcaatagaattagggacagatgcttgagcgattgcaggtattcaaaatgcattttaaattgtgagtttgaacatacatgtttattcttattctgtgaattgccagttcgaaacccttgcccatttttcaattgtgttttcaatgttttccttattgattttcagttgattcttacacaactgtaaaattgtgttatatctgtcatacgtgacaagaatctttcctggtttgtcttttgacatcatttacaatgtttatttggttgtatagaaagtatctttgttatgtggccaaaatgctaagtctcttcctttaagacttcagggttttatgagtttcttagagagggctttcctactccaagattataaaacaattctgccatgtcttctagtatttttacaatttcatttgtgatctttaagttgatgcatctagattttaagggcaggcactgaggaagggatctacttttcttctccctctcctttggatggcttattacatggtccacaaccatttattgtatcatctgcctttctcctactgccttgcaatgctaactgtattgtaaagtagattatcctgtggccaggagtttctttccatgtttttcgcctcttcatgtgttcttcatgttttttaataaatgcagttttatgatacttttacatattttttggaacttgttcatttttattcttttccagaatattctttagcttcttttcttttggctgcagaatatattttttggcttcattaggaggaaaaaaaaagcttaaatgatctttaaagtcaactttcctaaaattgatctcgtaaaggcagagtataatgatagatactaaaggctgggaagggtgcagggctgggaggagggatgaagagagaggtaaacaggtacaaacatgcaagttagatgaaaggtgtaagttctattgttggaacttatttataccaacagaattggcatagtcggcagagtagactgactatagttaacagtagtgtattgtattggtataaagtagctagaagagaggccttggatttttctcaacacatagaaatgatgaatactcaaagtgaatgtactaaaacaccctgacatgatcattacacgttctatacaggtaacgaaatatcacatgtaccccatgaatatataacataaatatcaatatctttaaaaaaaataaataataaccaaaaaatcagcttttctagttccaacagatgttctcagaggcaaccacttttaacactggtatattcctgtgatatttattccacattcttttttgtttgtttgtttgtttagacagagtctcactctcttgcccagactggagtgcagtggtatgatctcagctcactgcaaccctccacctcctgggttcaagagattctcctgtatcagcctcatcagtagctgggattacaggtgtctgccaccatgcctggctaatttttgtagtcttagtagagacagggcttcaccatgttggccaggcgtgtgtcgaactcctggcctcaagtgatctgcccaccccagcctcccaaagtgctgggattataggcatgagccaccatgcctggcctttactcgtttctaaatgaaatacttatatttcttcttcttcagttgtcttttgttttgttttgagatggagtctctctctgttgcttaggttggagtgcagtggtgtgatctcggctcactgcaacctccgcctcccgggttcaagcaattctcctgagtttttaatattagatgttatctattgtcttcctccatgaaagaaaaagattagctttcttatactttcccttctccatgcacaatcatatacccctccttctccatctattttcctagtatgggaatatttcagttttttgttaggtcaatattcagtgcttttattattatgactatgtattatattatattatgtatattatattatattatattaattatattatacatagctaagcctatagggaattgcgcatgcatttcctttcttatatatttttgtttgttttccctgggttaatgatgttctgttatctttttgcttagttttttgtgctttaatcactcatttatcctagaactattctctagaagtgaaaagaatcctttcaatgcatttgagtcatcagtcagttttcagaatgctctgtcctttggctccagtctggactcattgctccccaggcctgctgcacagttgccatcctggggacttctgtcactttcttctggcttggatccctcgtttctcagatcccacatttttatcttagtttattctcttgtttttggtagagcatatcttctagtagcttccttagaagaggtacatgagaagtaacacagcatgctgcaaaatgtcttagactctaggttggaaataatttttctttaggaggaaaatggagggcgttaatggagggcattaatcattgttttccaacactcagagctgcttataagaagtattggtatcatttctgattttcgccttttgtatgtgaagattctctacccacattttcgagaccttttctttgttctgagattctgaaattttacagtgaagcaccttggtgtgactgttttttcatacaaggtacttgggttttggtgggcccttttaagccagaaactcatttcattctaatagcgctttgtttttcttttcttttttgtagtctcatgtttaatggatgcaatatcattttcttttcttttcttttttgtttttgcatttgcaagaattttcactgtgttccttttttcatttgcattagtctttagttttcctcaaatgtctggcaatccttgactatccattcatgtttaagaggaagacaaaaaacaaattggaagctttgcactcagagctggggcttatccagaggtgtgtctagggtgattagccatcctagcttgcctaggactgagaggttttctaggacataagactttcagtactaaaaccatgacagtctcgggcaaaacagaggagttggtcgccctaggtgggcctcatcctaaggtgattgagtagggacccagcatttcattgacggatttccagctttcagtgtctgaagctctttcttttattgttcagttttcctggggaggaatcttccaggctcctgtttgaagagtggaaacctgtctgttaatgttcaaagaggaacaggggaaaggaggtggtagtttcagtgtttggttatgcctagtccagcctcttctcagtatggtactttcattctcagctggactaagattcctgatcgagaatttctctttgttttaaccactaatgggaataaactattcttctgccaggatgtaacagtctttgtggaagtcagtccgttcagcatctattaacataaaaatacatgtacttttccagtagtgaaggagagtttgaaattatagtcatggcaagtgctgtttgatggagcagagatttggaatagcttatagcataggatagagaaaataagtagaaacattatcttaaactcgagaagggatatccttctaaggctagaaagaaggaggtgaaattggttactaaaatggaaaagtataaaggcgtatcagagggaagtgaagtctcctgcttcctgactactgttttttctgttgagagttgagaccatgttttgaatgctaatcatttccagctcatgaaaagatactaggcctgtggttcttaaagttggtgtcaggatcagaagtattgcttgagaactttaaaaatgcagttcctgggctctatccctgaccttctgaaccagaaagtctgggggttgggcaatcagtgttttaacaagccctgcagggaactgtgatacgcatatctgatccagggtgtagtcatgggaatgaattgcttaagtttaatgtaggtgaagttctttggatttcatcataataatgaattatgggacaaagtttttggctcagtcagtccaactggattttgaaatgtcctgacatgacatgacaagtgaaactgtcatttaagggtcaaggctttcagagaaagtgtgagtgactaaaaagttgatagatggaaatagatggcttgagtcttaaagaagaagaggttgttgtaatagtgaggtgaaatagtaagtgggacagacaacccacccacttccccacctggagatagtatttattccctcactcttttatcccaggtgctaggaatactgtgttgcattaagtctttgctctcattgagttatatgtggtgttagagaagagtgactgaggcctctgctgaagaggattgaaaggaagagagcccattacaggggagagccagatttcagatatggtgaggagataaagggagtattcagtgaagacactgagaatggagggaagcataaaacatttgtagtttgatagtctcattgtttatagtgctttgacattttcagatcatatttcatttcctagtgttcttttatgtttgccctgctcattagtttgtgggatttagaattgtattttgtgtgtgtgtgtgtgtgtgtgtgtgtgtgtgtgtgtgtggcaggtttcgggggagctaatctatttacactgtggtaataatcaggataacagtatttcaaggattgtgaagccactatggacaccatgttatgtccgtctctgatagactgacataacatttcattttaaatcacattgcttttgcagctagcaaaattaattcttcacttctaagttagtaatgataattgtgagttttcttttcttttttgtagtctgatgtttaatggatgcaatatcattttcttttcttttcttttttttgcatttgtaagaatttttactgtgttccttttttgatcagaatccacagattgaagaacttttaatttagtttcattttttctgatgaaccttagatcttggatttctgtaaagtaacattgtccttggactttctttaactagtgagatgaacaaagggaatcagattgagaactcaccatagagtacactgaatcataattcttaggaggtcatatggagataacagaaccatgtgaagtatcaagtgctgtgagcacagtggttggagatatagcagataaggctccatgaatgagtccaataggtctgtctacatggcaacctattatatagatactgtgccatattaacttgatatgtggcagttttcgttcctctccctacaaaattaactggaaggtataagtctatacttgcagcattgtatagttggagattattagcagtcagggcctagagatgatcactacaacttctgttatacattgcatgggtatttgactgatttgactgttatgagcatgttcaagtgtgtgtttataacacatttttatgtaaacttttgattaaatattttacttgcatgtctgcattggaatgttttccaacatccttacacctggacctctcccatacccctccgtgtgtgtgtcttttttagttgcataagtgtaggccttttaattttctttgtggtttcttaacaaggaggtttaaatggtgaagtatgaagtactgtatgcaatggtatttaagcattttgcattgcattttccacttctgtctctgttataagttagacctttgtgatacttgctatgcgttcagtttgaaaggatttattgtatgtgagtgccatgtacccaatctagtgctgcttggtgccactggatacagagaactatagcaagtgatggctacttttaaagaagttaaactttcaagtttggtacgttatacatgctacaatgttaagtatatttctgacaggataaaacttccatttttttctgcatctgttgaggatcgtatggtttttcttttacggttggttaatgtggtggatgatgttaatttttgaatgttaaaccaatccagcattcctgtgataaatcccacttggtcatgatgtattatgcttttaacattttgatggactcagtttgctaaaattttgtttagaatttttccatctttgttcacgaggtatagtggtctgtagttttttctttttctttttgcaatgtctttatgtggttttggtatgagggtgatgctggcctcatagaatgagttagaatatatttctttcttgatatggtttggctgtgtccccacccaaatctcttcttgaattgtaactcccacaatttccacgtgttgtgggaggggctcagtgggaggtaattgaatcacgggagcaggtctttctcatgctgttcttgtgatagtgaataagtcttatgaaatctgatggttttataaagaggagttcccctgcacacactccctttctttttgcctgctgccatccatgtaagatgtgacttgctactccttgccttccaccatgattgtgaagtgtcctcagccatgtggaactgtgagtccatgaaacctcttctttgtgtgtgagttgcccagtttcgggtatgtctttatcagcagcatgaaaacagactaatacatttctcttctattttctgaaagagtttttatacactgggcatttttcttccttaaatgtttgatagaattcaccagtgaagctgtgtgggcctggattttctttgtgggaagatttttaacttaaattctaattaatccaatcaatttagggctatttaggttatctgtttcttcttgagtgaactttgatagtttctgtctttctaaaagtttattttatctaagttgctaaatgtattgctatgaaaattttcatatttttcctaattactcttttaagatagaagactttttttaaatttaaatctgattatgccttaaccctgctcaatctcttttaatgttacttagattaaaagccaaattacttatcatggcccaaaaggtatcacatgattgtatttctcttcctcttcaacctgatctcatacaagatttgatatctcttgttatgctttagccacactgatagattagatgcaaagggaagaaccaaggattatggactgtcttccatttcttcaagagctaagatctttatttcttgagggcctttgaattagctcttcaagagctaagatctttatttcttgagggccttctccctccttagtatttattctcttccctcaaattttcacaaggcttatttcttgtcattttggggtcttagctaaatgtcacctcctcagacctttttttcactctattctcttcccttctctatcatgtgaccctgtttattccttttataggagttctcacactctttatctcacctatttagttatgtgttgtatattctcccactagtacataaattccaaaaaggccctcatctgtcttttgcctgacatagtgactttcatacagtaagtgctcaataaataattgagggctaaaagaagctgtaattctgaatagaattaatgaacataagtaattggcatcatcatttacttgatgatgataaaattgtggatcagaaagcttaagaactcagacttaatcccagagatagggagaaaactttgttttatttatttatttattcttcctcatttaaaaaaatatgttaagttctgggatacatgtgcagaatgtgcacgtttgttacataggtatacatgtgccatggtggtttgctgcacctgtcaacccatcatctaggttttaatgcctgcatgcattaagtatccattatctagtactcactgtttttcatatatcgtgtcattgtaacttacatctaaatcatggggttatctttagtgtctccttaatgttacaccagtttttaattgttataatagctgtggtattaatagctgccatttattcagcccctaccatgtgccaagttttgtgcaagtggctatccattcgttatttctaatgaaaatgccaactactttatagagatattgtaagactaactaaaacaaggaaggcagaagatcctacaccggattactgatgttttttaaaaattcagtattatgattttcttttgtatatactttcagtcatcaaatatttatttagcacttaccatatatgtgatgttggctaagttatttaacctctctgtactcagtttcctcatccataaaatggaagtaatgatagtgctacctcatatgataattaaataatatatgtaaagcacctaaacactgcctggcatgtagtaagttatagtacctaaaaatattagctattattattttctagccatatgaagaaatctatgagcaacgtaagacatgtgaatatgaggtataacatattcctagaaggttatactcagtaatataaaaatataaaatttttgtaaagtaatatattaatgagatgaaattttagtcacaatcccaaagagatttttaagaattgaaactagtgaaaataaccctaaagtttatgagaacagcctagaaaatttagaaaaagaaaaagggaagggatttgccctacctgttaacacttaaaaaaaaatgtagtaattaagacagtatggtcctggcagaggagaaaaggaaaaataaactgaattatttggtatcagaattagcaagtgaatgtaaaaatgtagtattgggtctgaagatatttcaaatcaatgcagaaagaatggattatataataaatggtcttggaacaattggccagtcacttggaaaaaagttggattgctacttagtattttatactaaaaagtattctaaacttactgaagacttaaatgcataaaacatgaaacagtgccacccacagcttccatagatgttatagcccctgtgctggtatgcccttcctcccttctttcttccttagctatacagtggccaataaactgaccaaagaatatatttctgcatttgaggaagttttcatcctatttgacaaagaagccaaaagcaccatcacaaaaaggaatttggaacttgggtcactaggtcagaatgcaacagaagcaaaataatatggatgctacggccgttgtatattaccgttatagctagacgttgttgtacaagtttgaatacctaacatttatataatacttgctgtgtttcaggcagtgttacaatgctttgtacattgattcacttagtcttcaaatgaggtagtaccattattacacattttgtggatgaggaaaccaaggcagagggaggttaaatagcttggccaaagctcacacagttggtaagtggcaaagccaagattccaacccaggtagtctggcttcagagtctatgctcttaaccactttactacactgcttatctagcaaactgaaagatataaaaatggagtagaaatcagtgaaattcgacaaggatgacagtggttatttacatcagtgctccagagccatgtcatgtaattgcagagaccagaaagcctaacaacatgaagaaatagataaactgatcagagaaatagatattgatggaaatggactagtagctgtgaagactttatatagatgatgattacaagatgaaaatcccatttcgttgtaatttcccccctacagatctatcagattgaatgtttttaaaaagatcgtttatttattgtttctttatagcaaactcatgtcaaaaataccttctgtacacacataagaaaaatctacatgtacttgtagacgtttgtttccccaaaagatcaagctgtacacctgtttacaattataagtgctagtgataagtgacaaggaaacagtagactccttaaagctctccctgtgcatgcttcttacactattttggctggcttgtttttctggttttcatgcatcttgttaactgagcatgaccaaatcttgaagtgccttatatgcagtattactgattttagacttcttccagatgactttatctggaagacactgaagggtgtttaaatagggtactgctgtgattttaatggaagtttgaagataatctctcttgggtactctgaagaattcagaggaaagtgtgaaaagaaacagacccatcttttctagcctgcgtgtcatcttatgcctgtttattactttgattaatctaaggtctgtgtttcttttcttaggtaacccaggtttttctgccttttatgtgccatttgcaaaggctttatactctttgacaaacagacgctttccagtttggactatcagtcatgctgggcatgcgttggctcccaaagacaagaagattcttacaacatcagagggtatgtccttgttaatatctactttcctttagagtgagtgcagggtcatgtttctagcaagcttgctaaggttaagagttacaccagtggaaacctctgcttgtggcattaggcccatggtgccatattttggtaaacttaggatttttagagacattttaactcttcatgtaattttctgtaagaatatgggtagataaaacaatctatgacttgccttctttatttaccaattagtaatcaactgtgtgttttttgatcatgtattatttttccagggttgttctaggaggaatggtggggaaaaagcagtccccaaccattttggcctctgggaaccagttttgtggaagacaatttttccacagactggggaggggtggatggtttcgggatgaaactgttccacctcagattaacaggtgtgcaacctagatctggcatgcacagttcacagtagggtactcctatgagaatccattgctgccgctgatctgacaggaggcagagctcaggcggtaatgctcactcgcccgtcgcacaccttcatctgtgtggccgggttcctgacaggccacagacaggggttgggaaccccttttataaaccatgttctttactttaaagaagctttttctctcatatttagagaataattaagtgataaaccgtggcctgctaatcatatagacacctaaggggtaaacaaaggagaaaacacagtgtgggttaggagagactttgtggagtaggcatgtgtcttagtcagtttgggctgctatagcaaaataccatagactaagtagcttttaaaaatggaaattgatttctcatagtttcttgagactggacgtccagtccagtctgcactggcagattcgatgtctgatgaaaacctacttcccgattcacaggtggcattcttgctgtcctctcgtggtggacacaggaggcaagccctcttgggactctcgcgggctctaccctcatgaccccatctgatcctaattacttcccaaagacccctctccacctcttaatagcatttgggcatagggtttcacctatggatttgggggccatataagcattcagaccattacagctggttttcacaattgaataaaatttggatttagggcatggaggtgggtgcagaggtacaacagacagaaagagtagcacagaagggagcaagatttaatagcgatgttactgctaagcagggccagtttgagagggactttgagagctggagagagagccaggactccatgctggaaggtttctaaatggaagaagtaataccatggagatgcaaactacctcctttaaatctgtgagaattctagcatgttcactgttccaaaaaataaaaaatgagagaaaaaataacttaaatataagtttataaaacataaacataactttataaaagtacagcatatccaagagttgaaggacactttcaaaaggtgtaacaattggaatgctctataggcattccattcaagggcgttttgtcctagggggtttcctttagttaatttgaggtgagatcgaggtggctgtgacttcattgcccagtttgcttctggttcttgtacgtctctctagtggtatgagcatctttttgtgcttattgagcttctcagttttaaagatattttacaataaagttacattttacatctatagtcttcgttattatatatgcatgattcttttagacattgatgtacaaggttgaacatacaaaagcctgtactctttgaaggctagttttgattatatttatttttaattgtaatctctgacctcagcctctgatcctcatatcagatacaattttttgtttctattttaaaatttgaatgtggtggcaataaatatggctgcatatgtgaactcctctgaatactttctgaaaaacattagtttactaatctgttattaatttgtgtaaatgttgcacgtcagataaacagtatcaatttatctagttttatctaattgttaaccttgtattttgcaactgaccctttagctgcagggagtatgttgtataattttctatttattttcaaaatggattaccttcctttattgtatttttagattaaaaagttatatgtgcttattaaacaatttagtatggaaaactgaataagaaaataaaaaatcggtgtcctgtaagttaaaggttgaaaagaaatactaaaacttcataatggtttaattatgcttaaacattttcagcctaaagcctaacaaacgttagcaccttggcactaagagatgagatttttcaatgaataatactttgtgtaatagctcagatattttctaggctgaagtaagcatctaggaatagcagcacaagggaccatatttttagtgctttttcccctatgtcaatatcgtgatgaagtgtgtatcttaaatgttagtgaaatagttacatttagattttcagggtattttttttcaacatttatttgcttattacctgttcaaaacttgtatttggcatatgttatacattaagaaaatatttagcatagaatttttttaaaaataaatagtggacttccagtttcagctctgacatgtagaacttggagtttgtcacttctctcctcgcaataagaaaaaagctgaggctaagtgtggtatctcatgcctgtaatcccagcactttgggaggccaaggcaggcagatcatgtgaggccaggaagttgagaccagcttggccaacatggcaaaactgcatctctactaaaagtacaaaaattagccaggcgtggtggtgcttgcctgtaatcccagctactcgggagactaagacatgagaattgcttgaaccttggaggcagaggttgcagtgagccaagattgtgccactgcactccagcctaggtgacagaatgagactgtgtctcaaaaaagaaagaaaaaaagaaaagaaaaaagctgaacaaaactaaaaatcatttttcttagacctttcagagaattgaggtcacaggacaaattgtcacctaaaatctagagagacaaggaaatacaatgaagattgtagaagacactagtgccgtttatgtagaatacactacataagtgtagaatacataaatggtgattttgatgaattgctgggggtaaagtacagactattttaaaagtaacaaacttctgcaagcctattcttgggggacttcttcactttcataggtattacttctaggaaccttatcaggtacttttgtgaaaatttgagaaatgtcctctatggttttttgttaggagtggaagagaagtaagcattttgcagtatgtccagaatattctcaataacatggcttactttccaagggaaaaagagttccagagctttatccaacctggggggaagggcagttagccaactccgtcttcccctagccttcatgtctcacatgctggaggagaaaaaaagatgacaaaaacttttgaagatcacagcacaggcattcaggcccactgaaagactgaggtttaatcattacattataggatgtttccctcctcattttaccaccatgtctacaggcctctaccttaataatagttcattataactataggagctacaagacacaaactctatttaagaaggagttcttagggaaaaccaaaggcaatggaggaaaaaaaaacaagaacattagaggaaactgaagtttctgatacctatagctacagaaaacattaagcatagccctggccaggcgtggtggctcatgcctgtaatcccagcactttgggaggctgaggcgagcagattgcttgaggttaggagtgcttgaccagcctggccaacgtgatgaaaccccatctctactaaaaatacaaaaattagccgggcatggtggtgcaagcctgtactcccagctactcgggaggttgaggcaggagaattgcttgaacccgggaggcagaggttgcagtgagccgagatagtgccactgcactccagcctgggcgacagagtgagaccctatcttaaaatacaaacaaacaaaaaaagcatagcccagcttctagtggcattaacatatagcctcacataaaaggtctatttacctcattcctattacttaatacatcatgtccagctttaagcaaaaagtaaaattagaaggcattgtaaaaggtaagaaaaaacagtctgaagagacaaagcaagcatcagaaccagagtcagatatatacttattaccaattttagaaatatcagatcgggaatttaaagtaaccatgattactacgttgagaactctaatggaagaagcagcatgcaagaacagatgggtaatgcaagcagacagtagggaactcttaagaaagaatcaaaaggaaatattagaaaacaccgtaacaaaaatgaaaaatgcctttgatggactcaccagcaggctggatgaagctgaggaaaaaatcagtgggctggaaaaataggttaatagaaattttcctaactgaaatgcaaagagaaaaaaataatttataaaagtacagcacatccaagagttgtgggacaatttcaaaaggtgtaacatatgcataattggaataccagatcaagaagaaagagaaaatggagaagataagagttgaagtacttaatgccagatgacaaaacacaggtctaggaatctcagagcacactaagcaggatcaatactaaggctctacacctacatatgtcattcttaagttgcagaaagccaaagacaaaatcttgaaaataggcagaggaaaaagtgccttacctgtagaagaacgaagatgagaattacagggaacttcttgtcagaaatcattcaacaaagaggagaatggagtgaaatatttagtgtcgaatgaaaaataacacttacctggatttctctatctagtgaaatcatccttcaaaagtaaaggagaaagaaagactttttcagaccaacagcagctgaggaaattagttgctggaaacatcctatgcaagaaatattaaaagaagttctttaggggaagggaaagcgatagagattagaaactcaaatctgtataaagaagagcatcggagaaggaataaaggtttaaaaagtttatttttcttgttccaaattgatctggtagatagctgtttattcaaagtaataaaagtaacagtatgttgggtaattacaacatggataaatgaaatgaatgtcaatcatgttataaaggatggaagagaggaattgggaatactcagttgtaacatacctggactaacggtgaaatggtatagtgttacttcagatgaacttgtgtttttttgttttttttgttttttttgagacagggtctcactctctcgcccaggctggagtacattggtacaatcttggcccactgcagcctcaacctgccaggatcaggtgatcctcccacctcagcctcccaagtagctgggactacagacgtgtgccactacacctggctaatttttggatttttagtagatgcagggtttcaccatattgcccaggctggtcttggaactccttgggctcaagcgatctgcccgcctcagcttcccaaagtgctgggattacaggcatgagccactgtgcccagccaaaaaaaaatttttttaataagtataattattatgagaagaagagagaatgttagatcatttaaaatgctcaattaaagctaggaatagagagtaggattttaaaaagaaagaacaagtataacaaagaagaaacatttataaatatgatagctattaattcaactatatcagtaatcactttatttatttatttagagatacagtctcactctgtcacccaggctggagtgcagtggtgccaacgagactaactgtagcctgaaactcccaggcttaagtgatcattcccacctcagcctcctgagtagctgagaccacaagtgtgtgccagcatgcctggctaatttttatattttttatagggacaggattttgccatgttgcctgggctagtcttgaactcctgggctcaagtgatctacctgccctggcctcctaaagtgctgggattacaggcatgagccaccatgcccagcctcagtaatcactttaaatgtgaatggtctaaatataccaattaaaatacacagattgttggagtggtagggggagatccaactatatgttgtctacaagaaaccactttaggaccaggcacagttatacacgcccgtaattccagcactttgggaggacgaggtcaacagattgcttgagcctaggagtttgagaccagcctgggcaacatggtgaaactccaactctacagaaaaatacaaaaattagtcaggcgtgctggcacgcacctgtggttcagcctactcaggaggctgaggtgggcagatcacttgaactcgggaggttgaggctgcagtgagccgagatcatgccactgcactctagtctgggcgacagagtgagatcttgtctttaaaacaaacaaataaacattttaaaacaaacaaacaaaaactttaagtataaagacacagatatgttgcaagtaaagggatatacagagatataccatggtagcactagtcaaaagaaagctggagtagctattttaattttagacaaagcaggcttcagaaaaagaaaatgtcagggataaagaggagcattacataatgataatagaaccagttcttcaaggaaacataacaatccttaacaaatatgtacctaacaacaaaggtcagaatgcaggaggcaaaactgatagactgcactattataagtggaaacatcagcaatcctttttctgtaatgaatagatccagcaaacagaaaggcagtaaagatatagttgaactgaattgcaccttcagtcaactttatttaattgacatttatagactacttcatctaacaacatagtcttctcaagcacacatggagcattcaccaagatagactacattccgggccataaaacataccttaagaaacttaaaattgagtataaattatacaaggtatgctcttagaccacagtggaattaaactagaaatcaacaacagaaacatagctaggaaatcccaatatatttagaagttaaacaacacacttttaaataacacatgggtcagtgaagtctgaagagtaacataaaaatactttgagcaaaataaaagtggaaatacaacttataaaaattggtaggatatagcaaaactagtgcttagaaggaaatttatagcattgactgcatgtattagagaagaaggaagatataaagttaattacctaagtttctgccttaggacaccagagaaagaacaatttaagcctaaagcaaagagaagaaaagatgataaaaatgggaacacaaatcaatgaagttgaaaacaagaaattattagaaaaaaaatcaacaaaccaaaagctagttatttaaaagactaataaaattaataagcctgtagccaggctaaccaaggggggagaaagagaagacgcaaattacaagtattcagaaagaaaagaagattcattgctgctgatctcttagataataaaaggacaataaacttaacttagataaaagggaccaatttattgaaagatacaagctcccaaaactcacacaaggaaaaatagatgatcagaatagactgtatctgttaaagaaattaaaccaccaaagctgaataaggacaaaacaagaaaagtataggtcaatatccttgagggacatacatgcaaaaattctcaatagaataccagcaaactgaattcaacatcacattaaaaggatatggtcatgatcaagtgagctatcttaagtcatactatagacagaagcgaacatttgaagagaacatgaatggcaactttgaaagttgaaaacagactcagaggatcacccttgatcaggtgttctcaaactttggcatgcatcaaaatcacctggagggtttattaaaacacaggtggctacctctgagttgttgatttagtagatctggggtgggacctgagaatttgcatttctaacaagttcccaggtaatattggtgctgctggtcctgggaccacattttcgggaccacattttcagaaccactgccctagatgttcacaataaacactgatacggaaaaccagtagaaaatatctgtcatgtgtctgaatttttaggaaacagctttaattcttattgtaaattgacatcttattatttataactttactttgaatatgtttatctctagttggcctgcttgtgtactattgagttaataacttagtaattagtctgggttctttgctacctaatgagaatagtgccatctagaggcattagcccaaagggccaccatagcgccaaaggaagctgtggtttctggagagggtgagagggcaactcattatcatcaaggacttattgacaacctactaggttattaactgtcatgctacaagggtatacaaagagttagaattgcttgccagtctccaccttttaggtttgtgactttctgtatctgagtagctcaaaagttctgtgaaggctaagtagggctctgggccttggaccagccccccattcagctagaacagttctgctctcatctgttgtacacattggaggttatgtttgcaaatgtatgctatagtggctttggataggcaacacagatatattatttgctgtccaagattgtcctaaggtactgattttctggcatgcaaaataatggcgtgaaaaatatgtaatcattgagaaaaagggcataagctattaccacacatcaaatgttgaaagtatgttttccttcatattagcacatgttaaaattatgaacagttggaaataatattctagtagaccacattatcacaatcataagttgaatataattggaagaacagatgttcaccaatgtcagaaggggatgattcgaggggaaaaaaagtgtgaaaagaaaatttgaggagttaggagtataaactgttttctggatttgatttgctatagagtcagcacacatgatgggaaattcattatcaactatttcaagtcattgtttagaaagtatgaaatgaaagctagaaatcatgctggttttgtattagcagataaaaacattacctaaaaaagttatacaatcttgcaactaatgatgaatttgagtcatgcttatccaaagaaacaataaactactctcactgcagtcccccaaataggaagaaagagagaaaacccagtggagctttctcttgccaggactgggagtggcagggcaacaaggaggtaagatggaatgactagatgagcccaaggcaggaacaaccaatcaatcaactctcagggctcacagtccctagaaatgaaagcacgtaaatctgtgggtcagaagagcaaaaaaccaaagtgcagagcaagagaagaagttaggaatcaagcaaattgttaagagtcccagggcagacagaagtagggagagtgagcattgcagttaacgtccataacacagaccagattgtgcgctcctctcttggcaatctataggtatcttctcattgatcacagaaccgagtccagactccttggtgtgaagttcagtttcctacttcatttatacccaactttcctttttaaccttatgcttcacctttccatataaccacacatagccacagaactcatggctttttccaagtaacagccatggaaacatggctgtttccaaaatatcactttacaataaaaagtaacacactttttatgcctttttcttttattgtttgctaagtctataacattatgttctccttgctgaatctctctgctgtttcctgctaaggactgttgaagtccttagcagataattggttttagtcaagtggaaagcataatttgatgactgtggttttcaccgtttggagaataataattaaaaattattttataaaacatatgcttggggtttacaaattttgaaatttgttttctaaataagatagcagtgttaaatagaataattatctcccatctccttcactgtaatgcatactttaagagctaacagagttgtaccagtgtttagatacagggagcttacagaatacttagggagggagctggggtttgatgagagtgtactcccacttcagcctagtaacctcaggacagttgtgaaaggaaggccttatggatcgatgaagtaggtaagcctacagaattagggaccacagttctcattgagccaattcactgatattcagtatcaacccacaacatctttgggggcttctgtattccatgtgagaaagaaatcaatggtgattttccctacaaaataggtgtaagatatctaggaacaaccgcatgtcaatgcattcttttttttaaatttattttgagaaatttttaaaaacgtagcaaaatagagttatataacaatcaaagtttctattactcacaattgacagttaacattgccatatttacataaatattttttgttaacaaaataagtgaaataaaacaatacagaaaaaggtttgttttttgtatcccatctctagttctatcatgaatttagagtaaatatttcatgtctctttttatgtttgtagttatatatatttatatatatgtatagcatggtgaacaacatattatttttttgtgtatttgaaagaaattaaggaggaaactttttattttattttttcttaaaaaaaaaggtatacatgagcagaatgtacacgtttgttacataggtatacgtgtgctatggtggtttgctgcacctattgacctgtcctgtaagttccctcccctcaccgccccacccctcaacagccctagtatgtgttgttcccctctctgtgtccatgtgttctcaatgttcacctcccacttatgggtgagaacatgcttcacaaggaaactgtattttcatcttgatcaaagaattctttaaaatatgaaatattattcttagcctttcaatttttacatgcaagttgtttagttattaagatacagctttggagtaatgactgggggcaggatggaagggtttagtagctgagcaaattctggtgtgagatgtagttactgtctgcagactcagtcctaccaaaggcatgtgtagtgctaatctccagtcttgtctgttccatggtcagagatgaccaataaatactgtttgtatgaaaataaatagttgaacttatacatttatattcagtatatagccatatatatatatatatatatgaatggcagttaaatatgtagttaaatttaaactgttttgcttggattcagatacatagttaaatgtatacatttatagtaatatacatgtaataaagaatatcttctagttatttatcttgggtagagtgggaaaaggtacagtactttttatgaatcaaagggccgttacccttctattgtgatccaataaactgtgttcttttctcacacaaatgcttgagatacttaactttggcatttaatgattgtgtttttatctatgtctgtttcctgttagtagattatgatctcctgaaaggcaaaggtagtatattttatttatgtctgtactttcaataataccaagggccaattagtcactgttttctgtcagagtagtcaattcagttcatgtaaaatgaagaaaataataatcatcagatttatctgtgttctgaggctataagggaatttaaaattgaaagcaattttaatgactgcttaataactttaataactggagcagcaaatttgaacgattagacaaaaagttaatgcgaagtactgatattatttaatttctctactaactatttcagaacaagttgtgtgtaccttttgaaataaactctagaaccgttaggtgagctgtgaagtgatatctaatagagatgggtctaagaaataggctcaggttctaagagaaaattgtcaatatgatattggggctggggttacagattaacagcatctcaaggcagaagaatttttcttagtacagaacaaaatggagtttcttatgtcttcctctttctgcatagatacaataacagtctgatctctctttctttcccccacaatttattggtaacaatatggtggattggattgtcatccaccaattcgggcagttctcaatttagaaatctcaatttagattatgttccaaatgtgcttcattgattataacttggagtacattttccttatagaaagaatggtataaatgatttccatattagcattcttctggttttgatacaattgaatgtaattttttctacattttttggagagtaagttaataatttctagcattttctcagaatatattactattaaaataataggaatgaaaatatataatcaagtatatagtcttttaacatttcattttctgctagtaaaataatatctagaattttatttactagtaaaatgaaaaaagataggctgggaatggtggtttacgcctgtaatcccagcacttcaggaggccgaggtgggtggatcacctgaggtcagaagtttgagaccagcctggccaacatggtgaaacctcatctctacaaaaattcaccaggcctggtggtgcacgcctgtaatcccagctacttgggagtcatgagaattgcttgaacccgggaggcggaggttgcagtgagctgagattgtgctactgcattccagcctgggcgacagagtgagactccatctcaaaaataaataaataaaaataaattttaaaagatagcacatttaaattttcagtcattgtacatttttagaaagtactttccccattaatcttaccactttggcaaacactagcaagtactgtgttcttgaaaatctactgaatagttcccagaggtaaagctagatctacctctgaaatattctgatttataatgtcctttaaagtttatctgaaatacaatgttttaggaccttatttatgatgtcagtgaaattttagaatatttagcccattttctttgctctaaccatgtaaatgttcttggtatatatttggaggaggacttaaataacaggaattgaaatgatgacaatcatagcttttatttatctgcttatgccagacacttaaacaacagccattggaggctagcattattatctctattttgtgtatgaggaaactgaagcctaggttaaaggatttgctcaagtcacacagttagggagatgctgagctgagatttaaacccagatgtatctcatctccagagcccgtttatctttgtactgcacctactgtcccaacagaaggaaaacttggatatttccaaatgctgcatattttgaaaaagaacttgggatgcaaatattaacattattgtggttttttatatcaaagaatgatatgatcacttctgggtagagtgattagagaagcaaggtataaactcttcaaacctaaatataatatttcatgcataaaaaggtggatttggagccattagaagtcctaccaaagtcaggttccagattctctctcttcccaattctgtttcatgctgaacttccttgttaagtggagaatggattgtaagctgacctgggaaaaagagtgagagcataacatgtttaacctgggagattaatagtactatggaaatagggaagtaagcctcattgagtcaagaaaaagcttttcaataactgtatgctggactttggggagcagtgataagcaagacctgaattgtaaagtaggagtgaattaggagtagtatagtgagataaataaacagggatgttgtggaaactgaaaagagagccactttactcctcacatcatgaatcataaaaaggtctctcagaggagataacgcttgtttcaagtttgtaggataaacaggacttagactaaaaggggagatgagcacacacacacacaaaaaaaaccatatacaaacaaaacagaagagtagtttttctgagtttggggtgcctcttgaatgagccataccgactgtaattcccatcaatgccttgcaagtcatgagagcaagaaattcagtgttcagtcactcaaattttaggaaacagttgactgtcttgtgatattttgaaatattacaccctgtcattgggttatatatatgttcatagggaaaacctattcaagttttctacactcgtagaatattagagtggccagcatcctcagagatcatctagtcagttccagttttcattcagccataacatttgctgtgtactagtcacaggacacatgaaaagatggaccttgccttcaaggaactcacagcctaagagaggaaataaacatacaaacagacaatgtgcaagtttgataaagtgctataataaaagaggtactgattaagcacagaagagagctcattaatttttcttgaggattagctaggtaaagttttaattaggtcttgaagaacctagaagagcagttcatttgtgacagggagggaggatatttcaggtcaggactgctgattatttaaaagggacagtttttaacatttctacctaagtttttcgatctggattctttaaataaataaagattatctaaaataattaagtcatgtcatggactttcttagttgtctattagtaatataaattagcctaagcagctggttctcaatgtgtggtactgggacccagtgcatcaacatctcctggaaacttggaaatgcaacttctcaggccccagcctagacctactgaaacagaaaccctggggtgtggagcccagcaatatgttttaacaagcctttaaggggattctgatgtatgctcaagtttgagaaccactggcctaagctaacagtaatacacagaattattgaaagttcatggactttgaggatttggagacctgaatttgaatctcacctctcccacttaataagtttgtgactattaatctgtcacctaatatctatgagcattgggattttcacctatcaagtgaaggttataatgtttccttcccaaaattgttgtgaaaattagttaatataatgaatgcctaatattatcactggcacactgtaggctttcgataaatggtaactgctttttatcatgattgttatctttttcttgatcttttttcagtgattacttttacttaatgaaaacgtgctcatatttttgcttttagattcaaacgctcaagaaattaaggacatttatggactaaatggacaaatagagcacaaactagctttcctgagaactcatgtgccaaaggacatgaaacttgtgctcattggccattcaataggcagctatttcacacttcagatgctgaagcgagtccctgagctcccggtaagtaggtctccagaggtaactgtgggtgctggactgtgtgcctgcacaaatcctcctcacctttcctatgttcttttgtctcttgttcagttgataaatagaacagagagagggatatttgctttctgcctttatccttatctccatattacgatgggcttatgtgaatgtatgttcataatgtttcaaagaataatgctgagggagataagaagtttctgaaagaatgcctttgaatctagggttatcggagttcttatgttacacattacttgctgttttttataaagaaatatttaagagcggtcactaggtaagacctagacaagaatctgtcttttgtgggaaggtattttgtaaatattcttgcctttttcagaaggaagaaatgtatcatcatcatcactgataggcaaacagctgtctttatggaacactacatctttattaattcataagttcagattcttacctattctgtatcttggcagcctttttgagacacatattcacaaatgcttgcaaatatttgttggataccactgtgtgccagatattaagtgaggcgctagagacgcaaagacctatttaaagtgcccaggaaagcaagtgaactataagagatataaaacaaaacaaaaaaattgtactttcactagcatataccattgaaataactcactgaatggatgcaattcacaagataattcatttctttattcaacaaacatatattaagccctttccatgtgtcagatcctgtgctatgttttgaggacatcccagagagtaagacagtctttgaagtaggagagcctggagtctgcttgaggagacagtctaaccaatagatgtgatacctactgtcttgtttcagttcagggggtgtgggagcatggagtgctggtaaacctagtaatctgaagccaagataggacgtgatcgcttcatggctgctttgtgctaggattttgactgtttctcactccgtgggataaaatatcttcagtggggtctcagagctcactaagcactcgctccttttcttgccagcttcacctgcttgcttcttattcgtaattgcccttgggaaatgtacaactatagcctccctcgctgtggtttttgatactaaatggaggttttaaattattattgggtataagaaaatatgtttttcatttctaagtgtgaattcaataaattcaagattgtactctgttctctgtattattgtctactgtgttgggtgttttttccctaaataaggtgtcttaatcagaatgcaggctttatttttccttttagcattttgcacagcttctaatctcttttgtgccttcgaagtctcctctagtactgtgtcatgtggttgccatctttatggtgtccagctctgcctcttagtggttctacttgcacagttgctgtgagttctggcagtagaatcaggacacctaggttccaatatttattgtccttttttttttttagtctgtctgatcttagacaagttattgagtctctactttagttttgagtctcaacctcagtttcctcatttgtaaaatggggataatatgttcttcaaagtatttttgtgaggaattatataaagcatcaagaatggtatctgtaactttaaagttccaaataagtattagctattattattattagggaaataactctagagtcattgtctcagtcattaggttaactattgtattaggtatctattgctgtgtatcaaattgccccaaaacttagcagtgtaaaacaatacacatttcttcactcgtagtttctggtcagaagtctggccacagcttagctggattctctgcttcagggtctctcccaagattttaaccaacatgtcttccagggctacagttttatctgaaggctttagttgagatggatctgcatccaggctcactcttgtggtttttgacaggatcccattccttgagagttgttggacagagagccttcattcagcagtggcatttggggggaggccaccttctttaacgtgtcggcctgtctagctgacttcattagagcacacctggaagaagagtcaaggaggcagacagcctgctagcagatgaaaatcacaggctgtaacccagttacaaagtgacatcccatcacgtttcctgtattcttgttagaatcaagtcactaggtctagcccacactcaaggagagataattacacaagggcatgaatactaggaggtgaaagtcactgggagctgcctcagagctgcataccccatcattctaaaattaggatttcacttgtgtgttgtgcagtcaagaacatggacataggatgtacataaattgttgcatttatttactggtgtaggcaatgacttggacctgtcaaataaaatgtagcaaactgacatgaaatgtagttatttgttgttagttgttccaggtgtcttaaacactttaaaaacattaaaaaggatacttgcatatttgaaataatagcattactgttctataaacataggaaagaaaatattcattttggagcccatcacagactattattaacttaatcacagatctgttttggtttttgtgtttgcttcagatctgttctgcatgtgatgtgtggtttctcttttgtgtgtttgaaaatgattgttcaatacattgtcttgaacctttctctctttttgggcccatattcacaatgtctgttgggaaagaagtagaatgcatctcaaggttaatgtgctttcttatagctttttcagcatcataactttctaattattgtcctgccttcaggtgtccttgcttttgcaggaatagtggtgaaaaggggaaacaaagatgaaacgtgaacttaacctactctatttgtggagacacaactcaaactgattatagagttttcagaaagatatgtgaagctgtgttttatcttcttaaaaagggtgtaagctagaaaataatgtgtgcaataaattgtccaaagggtgtaagctagaaaataatgtgtgcaataaattgtccaaaaggtcacctcttttggggggtaggaggggcagtgaacatctgtatgatttttaaattattattcagaagctttatctggtttcaattaactacattgttgaaattccctaccccatccccagcccccattaaacacctgggtcagtgaatattggtggtgtgatccctgccaaagtgttgaaatttcagtgtctctgggctactctaagacaccgcagtgcctgcatgcctgaagttagcatgacatgctccatttaagatgcatttgacaaatatgtttgtgtaagccagaatgttacaatccttaatcattttgccaaaaataagttagctattatgttttataacatatgaagtgtgataataagaaacttgtgtttccatctcttctgttattttttactggaatatttgactcttgtaagattttgaggacatatgtgtagtttagtagctagctggtttatttagttttattttggttcagctctttgtaatattttcataactaattataggcaacttggtcttaaatcattttaagagacttattgtatatgtcagatatactgtctgacctgtattttaatatactaaaaaaaagttgcccctttaaaaaaatctggcatttaaagttgtttatctaaacaaattccatacatagaattagagatattcttcatatattttgaaattagtgctcagtatagggaatttaaagagaaacttgagcaaataggtaattgaaagactgttaaatagtagctatcatgacttacaataataaacataattgtttttagattcatagaatcttagaactgagataggctttagagacaatctggccccatctttcattttatcagtgggaagtgagagaaaggtcccttgccagtattcagccttggctctgcctgaatctggggtggggcatactggtattagctgtgagtataaaaagaatccaagaaggtattgatggctccttcaacctgtggatgatagcagagcctatagctattacagtgtgccctgcagtgtacacaactgctaagttcgtgtgactcattgtgttggtgctccaagagtaggaaaccccgtgaatgctctagcaatttcaggattgtgtgttggggtggggggagaataatacagaagcaaaaaagtagtaatcttatctccactatctagaatcttctttctcttatcaaccctctatatgttaaaaatgtgtcacctgattttgccagtaaatctttttcataaagttcaagtttgggagttgagttgaaagcccttgattcttcactgagtcttggggtgaactttaattaatataactttaattttcctctaagaatttatataacctttaatgataacatgttctcctcttcgaaggatatcagatccttcacaaacttaattttttatattatttggccttctgtgcataataacacagagtttcctttgtcttctggttagcaaaaatgtcttctctctgaatgaaatttctggattacttaaactcactctcttaagtaccagactattttacccaactggataaaaatttgtctaaaatatattacttacttatctgccttcagcaatgcatattgactatagaggaattttttcttagtgatttaagggcagtggtaataacactattattttgatagtgttatgctagaataaaatgtaatcaaaaggaatgtgcctgtgtcctgaaatttcttaggtgataatgctttttcattttttaaaaaaaatgtttcatgtatgtctattttagtttttctatctcctctctcagtgttaagtacttcttctcttccctacttctaatttattgctactaatttgctgtgggcagagaaaaccagtaactacattataatttttttcagtaggaatgaacaggtcctaaatagataaaggagtaaaattgacagcattaaatgtgtggacattgttatcactcagcctttttttctcttcttttgagatcctcaaaaaggatgttttggggcattttaagtactcaaaattttagagactcaacatacaactatagctgagaagtttgcaaaactttactaaaagaattagaataacatgttagatcatatatgttttgattcaggaatatacctcatccatactaaggaaaaaatagcttcagtgttctccaacaatgagattattgagactgtggtttacttacactattctgctgagccttcatgtctgctgtcaaagtaagacatgcttgtaagaagcattcatattatgtcactcagctatgtttaacagttgagataatctggagggagggagaagaataggaaataactcatttgtcgtagtaaattttgtcagaatcctatccctagattcaagtgacaagtgacaagacacggaaggcaaaatgaggcagtactgtaaggctcagaaagttttgtggagagggttgtcttctacctgggaagctcagaaaaagcttcctggaagagcttcagggccactgaaggatgagttgtatctggaagtagaggattttatatggtggctagggggtactgtgcattctaggcaagggagacagcatgaagagaaatggttttcatcactgggcacggggagagggcagtgggtggtgtgactgggttgcggcagagtgtgcgtggaggggtcgatcgggcatgagattcaaggttgatagagatggacaaaaagctgggctagggagcatgggctcattttctggacagcagaaagccattgaaggatctctgatgatagcagtcatgcatcaggtaaattaatctctcagagaaaaggaaaatgagatggagatagaaaaagtgcagcataaaaagtgaagatccaggtgacaggaaagtttactagtccaaataagaaataatgaagacagtgtaagggataaaattgcccagggaaattgttgagaaaagagagaggccatagatgtgtatcagcggaatgatttcatttgccataaaggagtgttacaggatctttggggtgttgctgttctggccagaaacctgtggttggcggaatctttgcctgagttttgctcgggcccactgggctcgttccaccgactctgcctgacaggctatgctcagctcatgctgccggcctggatcctatgcctccaagggagactagagtcaggcgtggagtgatgaggggtgtgtgtgagcgagtatggggtccagccactgcacagtcagacatgctggctgctgccatggggcaggcagctccaggtgccagcatgggtgtcagctctctgtgaggctgcagctggaccaggcacactgtaagcagcttccccagctggcaccagggaatgcggtggcacccagaagcttagagactccaggaaccacaaggccccaaagagggagtcacagctctggctcagggagctcccaggtctgggctccctgaagtgctgcagattttctctccttctcttcactcgcaacatggcgagcagggggcatgtttcagctttgtttgtgttacagcagctcttttagcctcgccactcatcaggtcctgagttcttgttctgcgaccaggaagaatgaggtttgcagacatgcagagggtgagcaagacagagaggagctttattgagcaataaaacagctcagagaagacccgcagtggacagctcctctgtgtagccagggtgtcccagtgagtgttcagctcctagcagagagggtagctcctctctgcagctggtcatcccatcctgcagctctcagcagagaggaggccctgtaggtggcttctctgtgcaggcaagtcatccctttgtctggatctcttggcagagatagtagctcctttctgcagcaggtcatcccattgtctctctgtcctctgctctgctctggctgagcccagggcttttatgggcctcagagagaaggaagtgcccactgattggtccatgggcagccaggggtaggcccagaaagggcaccacaagtcccctactctggtccctgggactggcagcctggcccctagccttcaaaccctccctggcctgcaggtggggcctcaccggagatcctccctcttctgcccagtggcccatctgcctcctgccagcatctaaggcacccaggttgcttgtgccaaggggcacctgcaggccagtgctgagccgccctcaacacaccccctcaatttcccctcatgcttgtcagcacccgaagtccagaggggactgaggtggcagggagctggcatgtcagtgctcctcaagtgtgtgcacacccagccgggctgtgacagtgaccaggcttggccccaaccctactccaagatcagagcgggcaccaggagcagggagaggtcatggagtggagcaggcctctccaagccttcaagggcaagggaggggggacttcccaggcccccaagggcacagagaggcctgggtccacagccttgtcttgggctgctgcctgtttctggctctagtggctccatggagcatgaagcccagctgcaccccctcacagcctggggcaggggctctaggtacttgctgggcccaggccagtgtcagggtaggggcaacatctccatgagctcccccagtggccctggcattcaggggcagctgggagctccccctcgcccagattgtggccctgcccagtgcgcacctccaggaatggattgcaggccctggtctggccgtcaggagtgtcaggcctggtggtcaccctgatgcagggcagaccctggggacagagccctgggcggccctgcgcagagccccctcctgaggcacagaaaccctccactgctggccggtccccgaagcaggcgtcacagtcagctgcctcaaggacgtggggcacaggggacccaccaccgccattgcagctcctgtagccacttctgctgccaccgtctatgcctccccactgtggatagccccctgctgccatcaggaggggaaagaggtggaagtcacagaaagaggcagaagatataataattttccaaactattggctgcaatccattaatggatcccaaaatcacttcagtgggttgcaaccagtggatcagtcaagacagtagactgtgctataataacacaatgtcagtggcttttaacaacaaaggtttgtttcttactcatgatacaaatcctttgagggtaggctgcccctatgaagatctctctatgcaagctttctccagaatccagattgatggagtagcctctgcctggaatattcaagtcccatggcagaggatataaagtgaatagtgaaccacacctacattttaaaacctctgcctggaagtgaaaattttcactcctcaaattttattggacagagcaaatcatatgaccaagtcagccatcaatgaggctgtgaagtacagtcctccccagagaatggaagcgtctgtttgtgaccaatgaaacagtgtttttaaacaatgtataataaaatcaagtaaaatagaatagaataaaaatatattgcagtaaaggcatgtattatgaaacttttgtttcactttgtgtgtgtgttgataacatagtagattataatgtcgaatgtatatcttactgtgagttaaggtaaaaaaaaaaaaaagtttgaaaaccattcatctggactagagtacaccacagcagctaagaacagagcaagaatgtcaagaaaggggtagatatatggaggattacagatggccacagatttttttgtcattcctctcaagaaatgaaacctgtttcccttcccctttaaatttaggccaagcatgtgacttactttcaccaataagatacagtggaagtaatgtacttctggtagcttcaagtccaggccttaagaggactaggagcttctatttcctccctctcagaagccagctgctgtgtaagaaagccgactgccctgagaccacgaggctgagagaagcccaagctagctacgtaggaggatcatgaggcaccaggcctgagtgaaaccttctcgggtcttccagcccatctcagcccagcccatccgccactgaatgcagcccaatgagtgaccccagcccacaccacatggagcaaaagaaccatccaactgagccctatttgaattcctgacccacagaattgtgagaaagcaaaatcattgtgattttaaaccataagtctagagatgctatgttatatagcagtagataatttaaacaaggtaacagggttgaatgtaacaaatgttgaaggcttcaggcttctagagtaaaaggttcttggtgtcctcgaagacagacttttagtgaaataatgggacaagggggttgcaggaagttaggtgataaatggatagtgattccactggccagtgaaggagaagaacacataataatttaaggaagaagctggtcaagggaactttttttcctgtaagtaggggagaatttaacatatgctgagaggaacagcccaagcgtagagagatgtcgaaaatgaaagacaaataggaacttttgttggaacaggtttccttccatttgtcttttagtctacatacttgaaaacttggaaaatggaatttttcttaatatttatgtctttgcaaaagtggtttaccccttccctggggtgtagggggaacatatattacatatttggttctccttttccatctagaaaaagtctagctcaatttttaaaattgatgttattgtcattactaacagtgattatacctaacattcatttgaaatttataaaacgtgttcacatgtaacaaggtattttaacaatctgatttttcccatcttaaagatgagaccgaagtgccaaggagccatgtgtccaacccatatgtcaactagtagaaagtagcagagctgggactctgtattctgttttctaactttcccactacctgttttctaggtgagttagagaggtgatgattacagatggttagactaagttgctttcacaaatcaccaaactatttggcctaaacttaagatttctatttttgcttttttaatatttgagttcttcaaacacacagtgagtgttttagtaggaagcaggtgaatgcattgggaggagttcagagagaactgagagaaatgacagcatgtgtgagtgttctggagcataggagataaagagactgttgaggcctgggccaagggcagaaattaaactgaaaagatagtaaatcagagtcctagaattgagctgggaacagaaggactatgaaggaaattggaggattctgcaaacatagtgcatagtagtttgacagttacctctatgtgacccattaataaatcctgctgcgtgaaaaacacaggcttagacaatcagcacctaactactctgatttctgaaagattttccatttcagaaaaccgtaagtctcttactctaagtttgtattgtagatgatgaaatgctatttttccaatcacttatgcatttatttaagtatatatgtatctgcatatttgtgcgcacacacacacattatcttttctgagttacccagaataccttgctaaaaactagacacatggacagtttcaacttttcaacttcagccatttttagttatctgtgtatttttttaaatcctgaaattgctttcaaagtggaaaaattgtgtgggcttttttcatcttttcataactcaaaaacgacttaatatgtttttctcaaactttgcaaaaaaaaaaaaatcacctttgggctgaaaccaagcatggaaaatttcaccacaaagggctaattttttggaaagctgcaagaaagtgaaaacgggtttataatagaacattcttcatgcatgttaatacttagtactttatctaatgcatttcatctgagaatttctgaacacttttcagatttaaatattgagccattttaatatttgtgtaccaatgatatattgtcagatatcgaaaagttcccccatcctctcagatgtctaatagcttgggaattagtgagatgtgtttaaaatgacaggtggggcaaatgaagttaagtggctgctagccagagaaagctgtatatttactgcccaacacattttatcactacctcttcttggcccaggagtactgtagttgtaagtaaaatataatagatgacactgggcactaatttgaataagccaacatgtctcaaagtagtatcaacagcacctgtgatcttgttagaaatgcaaattcttccccctcttcaccccaaggggtggggctcaccaaccagcatttaactagcactgcaggtgattctggtacatgcttaagtttgagaaccacctacctaagctttccaaaagcttggaacagaatgcattgaaatgctgtggacagttaaatctgtccttggtctttctgtgatgtcagctctgtcttctcatatcccttggaagcaggaggaatatgaatcaaattctctgaaggaaaggtcttctgtgttaatgtgctctagttctttccacctatgacgttgtccataaacacagagactcccttgagtaaatgtgctgatatcagcttgttcagggtaacagcactaccaagatgtattttctcatttccttgaattattagggtcaaaactgaaatgggactataaatttctttcttatttctttggaatcttttaagttctaagatggtatcagatgtgtcagtggaagttgattgaagctctttggtgtgtaagttctcaatctgacgctttgcagtagacctctgcatttcagcaaactccatggtctgtatttttgtgtcttcaggcacggaaatagttgtttacgtggcattgtaacaagttttgaaaatattaccctggtgatggaagtcactagtctgtagtatgtgggcctttagctaatccttttagcttaggttaatttcttacaataaataatttgtagaaattcataaaaaggacagcaagttctcaaagatgcaaaggatgtgaacagataattcactgaagaactaatatatcaaaaagtgtgtgcctaccacaatgtgtgatagtgtttaatgaattagtatatagtagtatacttaatgatgtctgtttatattgagtatggtagtatttgctaatgttcatttgatgaatgaacctcaacagttatcaaaattaactattactattacatagtctaaaagaaaagttgtgttgtgtatgtgtgtacttcgatatccattttaaataagtttgaacaggtaaataccaggtggcttatagtagttttctctggtggttaggggtaaaggatgtattggagtgaaaactctacattgtttctgcttttctttataatgaccatgtattatcagaaaaaaataatttccattaaaaaagtattcataccctttgaacctactaattcttttttttggaatttatattaagaaaacagacaaagatagaaaaaatcatgtgcaaaactattatctattataacaaaaaattggaaacatcctaatgtccaaccttaaaggcaaggttaggtagagtatggaaagtacagccattaaaattatatttgcaaaagacattataatacataaaagttaattatagaatattaaggatgtcagaatacatagagaatgtgtgaatacaactgtataaaaatcacacatggaaaagcttgataattataaaatgaatttagtggttgtatttaagtggtgagtttgggttttttttttctattttttatttttgaattttctgtaatgacatatatttattcactattatagacatttaatggtcatgcatttttctctctctttttttttcttttaaggtgatttgttcatgttactttagagcagaaagttgttccaggatagatcttttttaaaaatttaattttggattcatagggtacatgtacatgtttattacatgagtatattatgtaatgggggggattgggcttccagtgtaccagttacccaaatagtgaacattgtacccagtaggtataaattatgtttgctttgtatattgtcaagttcagtgcagtccttcttagggctcaagttatcctacagggcccatattaaataccaaccttcttaagtccttctgggtacaagatagtttataaatagacaaaagaacaaataagtcattagccaaatgtcacttcctgcatgaaaactttgctgattgctccgatagaatataacttctgctacttttgggccaatgatattgtctcctgtagcttttctgttgtggcttgtagcttaagtgtaatttttttttatagccacaagaacaagagctggcttgttttctttgtacccttgcaagttctagcatagggtcttacacatcccaaaaggaagacatccattttttttttcatttaattaaattaaactatatgaaagttacatcagcagcttctgctggtaaaattctcacttggttcataagtgccactgacttcttctgttcatacagattaaccactgcattgaccttaaggaaacagttgtcttgttcgacagtgaaagagaatacagatcagcagcaagagttagcagctatatacatccaaaggagcaatactaattcagcttctataagatagaattgaagaatattattatggtctcggaatagttgaagatttcttaaattggatagcacaaatgtttgtacaaaatactgctgtaagtgaaaggaaagagcttaggggtgtggcggacagactttagggtgggtggcaccccatgatcctcacctcctaatgttcattcctacacgtaatcccctccataagtggatatgactgatgacttgcatctaaccaacaaaatatgataaaggtgacagacaggaagcacatgattatgtgtatgtgatttacatacctaagattgtaaggcctgtcttgcagaagtctctctcccatgctggctttaaaagcaaactgccatgttgtgggttgtctatgttgggcggcctatatggcaaggagttgcaaggggccactagaagctgaaagctgccttccgtcaacatccaacaaaaaaactgaaatccttgatgctacactacaaagaactgaatcctctccacaaccttagtgatttgtatccttccccagtcaagcctcagatgagactgcagccctagctgacaccttgattgcagtctggtaagatgctaagcagagaacccagctaagctaggcctggactcctgatgtgcagaaactgtgcaatatcaagttcgtattgttctaagctgcaaagttttagtaatttattacatagcaatagataacaaatcaagaagaaagtaaaagggtaatagcaactccttgttttctttgcaggaaaacccacctctaagaccagtagtggccctaagttagtatcagcattgtagcagtagcagctagcctagccttttcccctgtcacttttccctgcttttacactatcttacccactcttcctactccactcaattacctagacttttggtcttccttgcaatttttttattaacattacttctctccccacctcaaaaaaaagataatttgggttgttgataagcatgtcttttgatagcttgcctggtgattatttgatgtaataacaaaatcacaggttgggattcattagcatcattcatcctactctaggttgaagcagatcttatttgaaagtattgccatattcaaatctcatctgaccaagaggttaatagtggtaggatattgagaggccctgtggtatgagagagtggcccatgctaaggcagaggtgatacatttgtgaattcccttgcatttgtgtggatataggtctgaaaaatgtcgcttgtacctggccacactgaagccttgttcatagaagagcacattcatagagcctcagtggacagactataactatcagagaagacataacagggaggggagtggaaacagatgaacaacattctgtgaaattgcctctttttggcttttgtttagttcagatagaagcttctttctaggtctgtttgtggagatgagaagtatgattgtgatctttaagaaaggaaaaagctctctaatatggttaaccagcatgtatgaggttgttttacgctcacttccagcttgtatggaaaatctgtgaacaatatgcaatgtaggccacaaaaaatttcctgaaatggaaaaagcctagcaggcactaaatgaaagctaggcactaaatgaaagatgcttcacaagaataaaatgtggttgctttgagatctcacattccaggccatttcagactaattgtatttgtttgggaagaagcaagattgtcaggtatcaggaaggtgtattgatacataaaagatggaagccagcgtcatactgcaaacctctccctaggaagccagacagtaaatcattttccagggtcagtcatatagagaccagagggagcatgcatgaatgaagacacagtctagaaactccatttcaacaaatagtttctcccctcaccagtactgttatgggagcttctgcaaaaagccaaattgagtgttagagattcagccttttcccctttcataatctactacccttaggaagatgctgaggagcttcttataacctcttacaaaggagaaagtctctgagagcttcagtaatattatattaatgtcaatagacattttttcagaagagatttcataaaaacttaaggacatattctggttatctgggtaccaggagggttctccttaaggcccttgtttccttccgttcatagttgctgtgtttgccttacagtccctgcacttagggctccatcctgactttataatttctcattgtctagatatatattttcctatctatgtgcctttgttgagctacttcctttctgctttgtcccacaccatctaactgatgcctcctgttcttctggaaaatcatctcaaacatgagctcctgtgtgaactctttcctgattcttcccagtcatttttactctgtccttcctttggtaacactttttctcataattcttctatattctaccctatattataggcattgcatatttctttgatttttcctgttagatgtttcagctttccttttaactagagcataatctgcatacagtaactcttttgtttgtctccctgcctcgttctagatatttcttctgacttaacattctacttcactaatcctcacttgagctatgtataaacacctttaaactcatctgttacatcctcaattttagttattctattttttgcctataaaatttccattttattgttataattactaattcctgcaaatctccatcttgtcatttaatatcttgatcatattatagttattttaaactccctatctgactttattctcctttgtaccatcaacaatttttaaaattatcattacttttataaaagttcagagatcatatatttgacatgaaaataaataaagattgtgtctgataattccaacatctaagtctcatgtggttgcattcctacttcagctttttcctttgctttggttatattatcttgtctatccgtatgcttgtgtattagtccaggtttgccagagaaacaaccaatgggatgtatgcacatggaaagaggtttattataaggaattggctcacatgtttatgggggttgacaaatcccaagatctgtagtcagcaaactgcagacctaggaaagccaatgatgtaattgtagtttcagtccaaaggtctgagagccagaatttctgatggtttaattccagtccaaaggctggcagcctcaggacccaggaagagctgatgtttcattttgagtctgaagacagaaaaaaaaaaaagtcctagcttgaaggtggtcaggcagaaggaattctcttttattaaaccttttggttctagtcagaccttcaactgattggatgaggctcactcacattagggagggcaatatgctttactcagtgtaccattcaaatgttaatctcagccagaaacaccctcacacatccaaattgtttgaccaaatatctgggcaccctgtggcccagtcaagctgacatgtaaaattgaccatcacagcttggcaagtattttttttaactgaatacctgacattatatgtgaaaaattagtaaaacaatattagaatcttatcttcctccagggaggatttacctttgtttttgcaattattcttagggtaggtcactttgatgccattgggaattgggttgaatcaaagctatctttggaggggctggcctatttccagttcatcgttacttctagggtatagtcctttaatagtttccactgaaagcctagagtgccttctcttttatgggcacacaattcccaggtttttccttcaagctcacaagatttttcagaaactctcttcagcttcttggcttcttagctactgcttgcaaatcagcaaataacaaagaaaagctacttcagcactcctctctgaagttcctttttccctagcattttagccttcaaatctcctctgcctctgatgccttcaaggggactttaaaaaactttcccaacttttctaattgttcttggcaaggagattgctctccaacaagatagcctgccatcttcacctcctatcaacaccattagcagctggtgctgagctttaagttcttccagctctgctattgagaagtatgtcatttcaagtttttaattatttttgtgaactgttttcttcctctggaaagttttagaatattcactttattgtcagtattatattttctgatgatattccttggactatttatcctttttaatccagaaactggcatacttacacactgaaaactcttgtatttttttctctacttgttttctcattatttgtgtgttatactttcagaaaagattttcttgatttattttcttttccattatccatttctttcaatttttagttttttgcaatgagaaataggggatattttccctactttatcttccaattcatctaattaaacttttgattttggcatctatgcaaatagtttctaaggaatttcttgttcttttcttcctttttgtaatatcctttttatttttacttcatgggtctctctttctctctctctcaggaaaacattttttagagtttttgggctcctgcattgtctgtattcattctgaattcctttcttcatgcttttaaaaaaagtactgatctgtctcttgtaagtgaagctttcctcaaatgtctagtgcttattcattatccactcatatttaagaatgaggcaccaggctgggcacggtggctctcacctgtaatcccagcactttggaaggccgaggtgggtggatcacctgaggtcaggagttcgagaccagcctgaccaatatggtgaaaccccgtctctactaaaaatacaaaaattagctgggcatggtggcgcacacttgtaatcctggctacttgggaggctgagacaggagaattgcttgaacctgggaggcagaggaggttgcccggagccaagaccgcgccactacactctagcctgggtgacagagtgagactccgtctcaaaaaaaaaagaaaaaaagaatgaggcaccaaaactatcaggaggttttgtatgggagtgggtttggtcagctggtcagctgtactacagggtaatttggacaggtatccaactttttttggtgtggtattctccagtgtacatattttttctggagccattaagtctcttcagaaaaacattttcaaaccacttatctaacacacagcatcctgaagcaaacagctcaaggagctggagtttgcatgggagaatgtcttagcatttagtattttggctttcacttatattgtttttatgatgttccttttcccctgcctttttctgtgccctgtgtctccagatcaggagcctctttcttctatttctacacagaataaacctccaggccatgatggggttatggagaagttgcttgagggtattggatgaggcaagtgtcccaggggactggctgcctctcagccagcctttcattcatcaagtctgctctgtgccctgcactgttactggcacctgttatggtcttggatccatctgtgaacaaaataggaaaagaaacaaaaaacaaactgcttatgcagaatttacagtttactaaggagagatggtaataagcataaaaatgagtaaattaatatgttcaaaggtgatactgccttgatataaagagtggagcaagataaaggggattggaagcaccatggctgggggatagagggcagtggtggactgcaagtgatttttaaaactttttatttggaaataatttcaaacttagagaagagttgtaagactaagaatagtgcaacaacatgagatacacttttaccagatttacctgttgttaatattttacctcatttgctttatttgctcccctacacacacacacacacacacacacacacacacacacaaacacagacacacaatatttcttcttgaaccgtttgaggataaattgaatatattattgccccttatccctaaagacctccttaagatgttcttaagaataagaatattctcttaatcaaccacagtacagttatcaatgtcagtaaatgtaatattgatgtaatactttaatctaccttgcatattcccattttgtcatttggcccactaatgtccttgatagcattttccctcttccactatggtctggagaatcaggtattgccttgaattttcatgttcctttattctcctttagtatgaaacatctcaagcatattcctttgttttttcataaaactgacattttgaagaatataattcctttttaaaaagagattatcctgattttgtatttgtctcatgtttccttttgactagattaaggttttgcattcttagctgtaaaataatacctcataggtgatgctatgtccttctcagagtaggtcacctgcaggcacatgacatccagctgctcatcattggtgatattaatttcaatcacctaatcgagatgttatgcagaatttctccactgcatgctttactttttcttttcttttcctttttttttttttttttttttgtggcgagggtagttggagtcttgctctgtcacccagactggagtgcagtagcatgatctcagctcactgcaaactccacctcctgggttcaagcagttctcctccctcagcctcccgagtagctgggattacaggcacttgctgccaggcctggctaatttttttttatttttttagtagagacgggtttcaccgtgttgcccaggctggtttcaaactcctgagctcagacaatctgcctgcctcagcttctcagagtgctaggattataggcatgagccaccgcgcccagcctgcgtactttactttttcttagcaatgaataaagagtctatggggaggcacttttttttcatgtcaatatcctcctcttcaacgaaattttctcctagattcaacatccattatttatccttgcctgatccaatctttaccaagattttctaactgtagtactttcttcacataaacccattagaactcaatattcttttataagcaagaaccttccttcttatgtatgtttaatttgtatatatgtatttatcagcatggacttatgaatttcggatttattaaaggtatatgattcattaccatattgattttggtgataaaattattccatatttggccactgggagccacttaagtcgggctcctgttgtaactgcaattttaagcaagatgtttattaggcatcatagaagtgacctgctggaggtagagttagccacatggctatctagggtacaagggttctaaacagcagaatagttattacaaaggctttaaggccgtgagtatgcctgtttgagaaacagcaaggccagtgtgactggagcaaagtgactaaggtgtgaagtaataagacagggaaactttcattgcatttgccctccccacactcttctatatcctgtggtccagaagaaacattaaatacacccttatacccaccaacaaacgaagaagtaaaaactgccattaagccaacttcttgaatttattttgtatgttgtaaaatccagatagctacatatagatgtgtactttttgaaaatgtatcccatcagccagtgatagttgtatttccatggagattattccagtcgcctgtatttgaacaattatacaggatctgactgtaattagaaaaaggagatgggcccaagtcaacctagtacaagtttggatttcacattttaaatcattggttaaataaaaacaaagtgaagatgaaaatgtttcttttgttaaaaaagataagaaaatataaaattggagcttttattaatttatacatgtctcagagaaataatagtcacagagaagtagcagacagtggcatgcacttattagcttctcacattattatattacactggaaacatgggctgttactgtacagtgaaactagagtttaaggtggagaaccagattgacctgatgcatgtgtttatgagtttcacattgaaggtgcctggtttttgttgttgctgttgttgttgttgttgttgttgtcgttgttttctctccaaagaatacagcttagaatgagtgaggcaagctcaaatcatgtagctgtaactgtcaacttggtgaatttctgagttatcagaaagtgagactctgggcatgatgaggccataagtcagggaatatcagcaaccatcagaagctggaagaagcaaggaatggattctcccctagagcttcttgacacagtgcagccagggcatctttatttcagcccagtgatactgatttggcctccaaaactgccagagagtaaatttttgttatttgaagccacccatttgtagcaatttgttacagcagctgctggaaactactacattgccattgacacttgatcgctatttcagtacgaagacctgtgtatctgtcttgttcagtgatactgatttggcctccaaaactgccagagtgtaaatttttgttatttgaaaccacccatttgtagcaatttgttacagcagctgctggaaactaatacattgccattgacacttgatggctatttcagtaggaagacctgtgtatccgtcttgttcagtttgggggaaactttcatgcattatttctgtcatgttcccttccctccctccctgtcttttctttctagaactcacttgataggacattagttttcctgggttgggtgtctgattttctttccacctgtttatctctatgctttcagtggaatttttttccactcagtctttttcactgatatttttaaattgaagtataaatttttttttttaaatactactgtcttgaccaggcacagtggctcatccccgtaatcctagcactttgggaagccaaagtggaagaatttcttgaagtcaggagttcaagaccagcctgggcaacatagtgagaccctgtctctacaaaaaatacaaaaattagcctggtgtggtggcgcacacctgtagttccagctacttaggaggctgagacaggaggatcacttgagcccaggaggttgaagctgctgtgagctgttatcattgccactgcactctagcttgggcaacagagcaagaacttgtctctataaaactaaataaatttaaaaataaaaaaagaataccactttgtttactgcgtgtttcttttatatcccactcatcattgatacagtattttctcttagctctaagcaaattacaatttcgtctgattcttcattgtcttttcctctgagttttatatttgttgtgctgtctttcatgttagaggctttacctaatatctgtcaatctgttgtttctttatagtaaggaagtttttccccctgaaatcaatggatgaatgggaattatatttttaagttattagaataagttaaaaatgtgtaaatagaataaatgcatttgcagggcatttactctcataagactgagggagagcatatgtgtgtattgtggcttattgttacaactatctcctagattcattgaagatagaagttacgtttgtttcatagtctcctcattggcttgtagcaatttttcaaaagaaggaaggaaacatttttaccttacaataaaagtctgaaaccacatattttatggtgatctataggaggactaactggaaccagtcacagggtactgtccctaacagaatgtgcatctttcatgcagtaattatattttactagtggaaactacattccaggaaacctttacataaaggttttacaatgttgaaaataaaagatatgctttttacctttaaaaagaaaggtggaacttaattgagaatattatagaattatttcaaaatcagactgcttttaaaaaaacttcaacttttattttagataccgggggtacatgtgcaggtttgtcaaacgggaatattgcatgatgttgaggtttgcgatacagatcctgtgacccaggtagtgagcatagtacccaataggtagtttttcaatccccccatcctcaagtggtccatagtgtttattgttcccatatttatgtccatatgtgctcaatgtttaacttccttttgcaggtgagaacatgcagcatttggttttctgttcctgcattaatttggttaggataatggcctccagctccatccatgttgctgcaaaggacatgatttcattcttttttatggctgcatagtagtccatggagtatatgtaccatattttctttatccagtctaccactgatgggcatgtgggttgtttccatgcctttgttattgtgaatagcacaacaatgaacataagtgcatgtgtctttttggtagaatgacaaagttagtctttgatttaatggtgacaaatgtgcttaattacttaatgcaaactttgctgtatgcatttgaaaagcgtcagttagttctatcaattggaaatattagctgtacttactgaacaactgtctagagccattgagttaggtgaatttcttggttactgactaacacagagtatatgatcctcagtttcatcatagagcatattcagataccgtggaggcacttttgatggacaaaggctatcagcaatgctatccagtcccattagggaagttaagagtctccccagagtctgttgtcctttctctgagctctgcagaagctgagacctcagaagtttagtaaggcagcccgggcacagtggctcacgcctgtaatcccaacactttgggaggctgaggcaggtggatcacctgaggtcaggagttcgaaaccagcctagcctatgtggtgaaaccccgtctctactaaaagtacaaaaatcagctgggtgtgatggcatgtgcctgcaatcccagctactacggaggatgaggtggaagaattgcctgaacccaggaggtggtggttgcagtgagctgagattgcaccatggcactccagtctgggcgacagaatgagactttgtttcaaaaaaaaaaaaaaaaaaaagtttagtaaggcagacgtaaaaatcaggaactaaatttcggttattgctgagtctgggagataccatggtaccaccaggagggatgctacccttatgaacctgttctgtctgggagtaaatgggaggaggaaacccccttcagagacctgtgaggaagaaataaacatcagatatgtcttctttcctgaactaagcaggacagatcctaacctgttctgttatcaaagctgatatggggacttatacacttcagccatttgggcctaaccttttctctgtgagttaactgcttatattcccaaggtttagtctctatctcatggggtcttagctgccctaactgatggatttgcttcttaccacataaaattgaacaagaaagctgtactctttgccttccagttgacttcctagacgctgagagtgtcctggggcagcttctgtggcagaaatcccttgtggctggggctgtgctgtgtgccctatacatgcctctggctatgggcctttgcattatattattcatccttggcctgaaaccctgtcacggatacctttgcctcatcttagtactggtataaaatggcattttagtatatggaactgaagtatacatgtttcacaatatcttttagtaaagttaaatagggaataatttttttactggtttcactgaataaccctgtattctatcatcagcactttgcttgtgtactcagtgtttgtcaagaaaatttctttctgagctgcttttcaaaggttccttgacccttatagagaagaaattttgagtgcctatttagtatgtttctattttactcttcatttcccatgtcctgatacctctctaaatatctctcccactagactttatgatctctgaaggcagggactttgtcttgtcacccctgtgtctccagcactcagcacagcacctggcatactgtaggtactcagtatatcttcatgaatgaacaaatgaacaaatgaatgaacaaccagtagatctaaggaatggctccccctcccagtcatgctaggcctgcgcttttaaatattggggtttttaacttagaacagtcccagtgccattgccaaagatagtggtggggtgtgtgtgtgcttcctgacccatacatagcactccagctccaactttatgccaagtagcagtttcttgatcagcagagccatcctatcacattctgtgtagctttacctctaggaaccatgagaaaggcctgttattgccaaaggccatagtagtcatgtgagaattttgtagctatagaccttaaggtttgctattcactattcactgaattctgaggctacctggagaacactgtttaattcaaaataacaggtgcttcctaagagatagttgtactgcagagcagcaggtaaagaataatttgcagtgagcctgtgagcatcattgttttctgaatgagctgtcagtgattctaaatcagaagagcccaaaacgaagtggtttccacaagatttcaagctgaggagaacagcattttgcatccaaaataaaataagtgcagagaatataaaatgataaaagcttgagaagaatgggctataggaagatattgaagctaagtttcaggtgtttgtgcagttataagttatgtaaagacctctgcaaatatgcaaacattccttattattaacaaccgtgacatgaagattaaaagtattaaatggctttttttttcacattcaggtaattaaagtgtagaaaaatctctgccccagaggtctgaatataattcacatgaatggaaaatggcaaaagtggttagtttcttgagtaccatcttaactgaaacatactaaaatggcataattttgtttcagtaatcagtagttgaaagatctcatgctttacttcttaggatatggatttaattatttctggagctaaatgatttgagacacttgtaaagattagcccatatctaacaataatagtagtaattggttcaaccataagaaaattgcctccaaacaataacaattacaaataacttattttgtacgtaaatatatagtatatataaaggttaatggcatggattcagaaatcatcctgctttaattcatatctctgtcactttgtggctgaacctcagttttctcttcagtggaatgagggaacttcataaggtttttatgtgtattaaatgaaacaatatatataaagtgcataagtgtagtacctagaaaatagtaagctatcactactactgttaatccaagtacttccctgcgaggcatattcttatctttctgacatatgaagtttttaagacagagtagaaaatctcaaaaagcaaactcttgattaaaatataatggcatttgcagtttataaactgcatacttagtaaataagcttactaagcttgtgtttccagtgtgatcctaaggagaagaacacatggccttatgggaagaggagataaactaaactaggattacttctagacctatgttttgacagctagcaagtttatctttgaaggctgtctggttgacattgcatgttggctaagacatgccttacaaatattgcagtcacataaaaagagaaactgtgtgctatttttttgtttgttttctgcttgtacggtggagaagcaccctgccataaatacattgggtgggttaaactaataaacaaataggcagggtggcagtgataatgtttttttgaagatgttgaagtactatttgtcgcagcttcacttagtcataacacataggcaccattgctgctctcccagaaaaatggatgcatctgtaataagctatataaacaggtgaagtctttcaaggattttgaagatttactgtttttttaaagcctatttaatgaaacaggttgtgcacaatccacacctaagcaccatacttcttaccttgtggccatacctcaaattgtttcttagctccttttctaaaaaatgattacaacaataataataaattcaagaaaaataagcatcaaaatactttcctctaacccctgcaaatgtatccagtataaaaattcccagtgtgcatatttaccttcctgtactgttcaagaaaacacggttgtgcttcattatcaaaagttcattctggtagataacagaagagaatgtgaaatatgcgaaaatgttttcttaggatagaatgaattggctaacatgggagttctttttttaatgagatagtaacataagaaaatgtttggtcgtgtacacagatttggaaaccttcaccacacagctgtgttatcaaattaggcatacttccttgacttaggtgatttttttttttaccaatatgaagaatgaaaaatttttattactgtgatttatcaaatttggactgcaaatttcattgaaattatcattacaatatctaggaaaagtgtcacccagcaggtaataattgttgttctccaaaggcaagagaggaaaaccagtctcatcaactaagtattagttgtgataaggtctttggtcttcttatatttttacaaggcagtgacgcattcaatgtacatattagaacttccttattgttttggtccattcccattatttcagactgcattttaattctcaatttgttattgatatagatcaatcaaatataaccctgtggttgcttatatatttttagagtttcccttacatgcagttttgcttaacatgggtcacagtaaaggatcgtttataaaagtaatggattgtttcctgtttctgccagctgatttgatcaatctgaagttccttatgtactatgggttacataaccagtctggaatctgtgtggtacattcttctagtttggtattaactgaattaatcatttatattctttaaatcattgaggacattttagtaaacacttgaactgctctcttcttcaagtactctgctccagcaatactgttcacctggctcttactcaaacacaccactttagctttctatggcctctgcacatgctcttccctctccccacaaaatttatttttccaagcatctcttagctcaccccctaactgcctttgcacaaatgtcacctttcatcaaagcctttcctgaacaccctatttaaaactatcccaccacccctagcaatttctagtcctcttttattattttatctgccccgtcataggacttgtgacttactaccatcatacatatttgattcaattattatttattgcttaaattgttatgatcatttattataaatcatgtattacagctaattaacatacatatgctcagtcatttacttgattagttattagcctcaattatatcttattttttaatatatatttttatttgacaaatagaaagtatatagattggtacaatatgatgtttggaaataagcatatattgtggaatgactaaatcaagctaagtaacttatgcagtaccttacatgcttatcttttgttgtgataagaacacttgaaatctattctactgtcttagaaatttaaaaatgggcaaaggacttgaatagacatttcttcaaaaaaaatgcaaatgaccaacaggtatatgaaaaggtgctcaacatcactaattatcagagaaatgcaaatcaaaaccacaatgatatatcacctaacacctgttaagatgtctattagaaaaacaaaatgtaacaagtgttgataaggatatggagaaatagaaatctttgtgtgccttgtacactgttgcaagagcattagtagaactactttggaaaactctttgtaattatctactaaagatgaatatatgcctactatatgacccagtgtttctactttgaagtgatacagccaacagaagtacatgcatacatgcaccaaaagacatatacagaaatattattaggacttctggtttccagttccacatgtagggagcttagaagttgccactccaaccctaacaagtaaaaagctaagcaaactgagaaatcaattcttatcggacccaggataggggaggacacagggaaaaccactgtccccaaaagactagagagacagactggcaaataccgagagccacaagttactagagcatgcagtcacaaacagaaacccccacaggaagcagtgccatggtagaaaaacctgagctgtaattgatgaattataggaggttcagtatgaacaactctgaaagttttaaactccaggaggacccactcatggggaaacaccacaattttgttagacttacctacatgagctcaattagattctccaagtaaatattgcagaaaaatccctatgtgcttctggcagggggaaggtgaaatgaaccattttgaaatatgccagagcactgtgctcttcttaacaaggtctgcccccaggagaaattagttagctaaatcctaacctgctggggtattattagagcctgacccaagggaagggaaatacctaactcttgtcagctctaaccttctgcatcagagaagggaaatactaaactccagacaactctagccatcctgtcctaccaaagaggggagaagaatactgaggaaacacttagaagtttgtacaccagaggcatatgcttactaaaagactgagacttaatcataggatgatagaatgtctcccctcccctttcccccacctaactgctacattgctaaaagctgatttataaaagttccttttacctggtacatcatgtccagctaccaagaaaaaattaccaggcataccaaaaggcaaaaaaaaaaaaaaaaaaatctgaggagaatagagcaagcttcagacccagacagatagggattctggaattatcagatgaggaatttaaatccactatgattaatatactaatggctataacagataaagaaggcatcattcaagaataggtagacaatgtaagaagagagatggaaatcctaaggaaaaagcaaagagaaatgctagagagtaaaaacaccgtaaaataaaaatggctttgatgggcttatcagtagattgaacatggctgaagaaagagtctctgagcctgagaatgtctcaacataaacctccaaaattggaaagcaaagaaaaagactgggaaaagaaaaaaaaagaataaggactgcaggacaactacaaaaggtgaaacatatgcataaggggaatactagatggaaaagaacgagagaaagaaacaagaaatatttcaaacaataatgacagagacatttcttaaattaatgtcagacatcaaacttcagatccaggaaactcagaaagaaaataataggggtttgaaactcagatctccataaagaaaagaagagcatcagagagggaataaacaaagactaaaatgttcatttttcttattcttaattgatctaactgataagtttgttcaaaataataatagcaacagtgctttcgattttgtatgtttatatgttatatgtatgcttacatataagtgaaatgaatgacaacaacacaaggagcaggagggaagacttaggattattttgtttttgtatgatacactacttataaagtggtatagtgttatttaaaagtggacttgggggtgcagcgcaccagcatggcacatgtatacatatgtaactaacctgcacaatgtgcacatgtaccctaaaacttaaagtataataaaaaaaaaaaaaaaagtggacttggactagttgtaaatggatattgcaaaatctagggcaaccactagaagaattttttttttttaagtataactgacatgctaagaaaggagagaaaatggaatcacataaaatgctcaattaaaaccacaaaaggcagaaaatatgtggaagatgaaaatagaaaataatgacaaatgtggtctatattaatttaactaccagtaatcactttgaacatcagtggtctaagtgcaccaaataggcctggtgtggtggctcacacctgtaatcccagcactttggcaggctgaggcaggaagatcacttgggcccaggagtttgagaccagcctgcacaacatagggagacagaccatctctacaaaaaatttgaaaaattagccaggcgtggtggtgtgtgcctgtagccccagctactcagaaggctgaagtgggaggatctccttgagcctgggaggtcaaggctgctgtgacagagtgagaccctgtctcaaaaaaaaaaaaaaaaaaggaaaaagaaaagaaaaagaaaagcactaattaaaagattgttagagtggatcaaaaaacaagactcaactgtatgttgtttacaagaaccccactttaaatataaagacacatgtaaatgaaaagtaaatggatggagaaaaatataccaagctaacactaatcaaaagaaaacaggagtagctatatttcagacaaggccgacttttcaaagcaaagaaagttatccagaataaaaaaggtaattacgtaatgataaagaggtcagtcctccaagaagacataacagtcctttacatgcatgtgcctagcagcaaagcatcaaactatgtgaggcaaaaactgatagaactacaagcataaatatatgcatccactatcatagttggagatttcaacacccctttatcagaaatggacagatccagcaggcagtaaatgggtaaagacctagttgaattcaacaacaccatcaatcaacttgatataattgacgtctatagactacttcatccaacaagagcagaatacacattcttctcaagatcacgtggaacattcaccaagatagaccacattatggtccataaagcacaccttaacaaatttagaatagaaattatataatgcctgctctcagaccacagtggaattttactagaaaccaataaaggaaagataactggaaagtcccaaaatacatggagattaaacatggattagaaaagaaattccaagataaattgagaaataattttgaactaaatgaaaatgaaaacacaacttatcaaaatttataggatgctgcaatgagccaggatcgtgccataaaataaaattaatatatcagagatgtatgtactccatgtccattgaaacacccttcacaatagcaaagttaacagaatcaacctaagtgtccatcagcagatgaatggataaagaaaatgtgtatgcactcaatggaatactgctcagtcttaaaaaagaagttttgtcatttgcaacaatgtagatgggcctggagaatattatggtaagtgaaataaaccagacacaggaagacaaatactgcatgtcctcacttatatgtggaatctgaaacaacagaacttataaagtggggagtagaatggtggttactagagtctggggtggtgggcagtgggagaatgaggagaggaatgttagagggtacaaagcctcaaatagacagaagtaataacgttttttcctttgggatatattgcacagtgcagtgagtatagcaaaaacagcctttataacaaatgatgctggaacaactgaacgtccatgtgcaagaaaatgaatctagacacagaccttatacttaccacaaaaaccaactcaaaatggattatagctctaaatatgaaacacaactataaaatgactagaagataacataggagaaaacctagatgaccttggatatgatgatgactttttagatacaaaccaaaggtacagtccctgaaagaaataacagataagctgaacttcattaaaattaaaaacttctacagaaagcagggtcaagagaataaaaagataagtcatagactgagagaaaatctttgaaaagacacatctgataaaagactaatccaaaatatacaaggaactcagaaaactcaaaataagaaaaatataaaacctattttaaaatgggccaaaaaccttaacagatacctcaccaaagaagatatacagatgacaaataaacatatgagaagatgctccacatcatatggcatcaaagaaatgtaaattaaaatgacagtgagataacgccacacctgttagaatggccaaaattcagaacactgacaataaatgctgaaaaggatatagaaacagcaggatatggagcacctctcattcattactggtgggaatcaaaatagtacaaccaccttggaagacagtttggtgatttcatacaaagctaaacatattcttaccatgtgatccagcaattgtgctcgtaggtatctacccaaagaagttgaaaacttagtgcacatgggcatttatagcagctttattcataattgccaaaacttacaagcaaccagtatttccttcagtaggtgaatgaataaatacactacggtacattcagatgataggatattttttagcattaaaaagaaatgagggggcctggacatggtgggtcacgtgtgtaatcccagcactttgggaggccaaggcaggagaatcatttgatcccaggagatcaagaccagcctgggcaacacagggagaccctctctctacaaaaatataaaaaatgagccaggcatggtggtgcacacctgtagtcccagttacttgggaggccgaggtgggaggatcacttgcactcaggatgaggctgcagtgagctgtgattttgcctagttataggctgagagggtggtgagtggtggttcttctcactctgaagagatctctagtcattctaaaacccattcatttgtcattactatatagaagagacaataagtaatggacctatcctttaagaaaacctctcatcaaagtatgcttctttattgcaggtaattcgtgcctttctgctctttccaacaattgaacgaatgtctgagtcacccaatggcagaattgccactccacttttgtgctggtttcgatatgttctctatgttactggctacttattattgaaaccgtgtcctgagacaatcaagtccttgctaatcagaaggggccttcaagtaatgaacctagagaatgaattttcaccattgaatatattagaaccattctgccttggtaagcacagattttaaaatgtgtatgtttattcttgtatcacaaaatgtttacacaatactctctgacagtggacaaatatcaagcaagcaattatttactagtttttttttcctcttccaaaagtttaaaactagaaataaataaaattagaaatagaatgaattttttcataagaaattagaaaagcctcatcaagctttaattttaccttatgtttctgattcttcactctagctgcagcacagtgagaaacacttcttccgcatatagtacatagtatatatggagtccctacaggaatccttggtgtgcctgttagcttagtgggagtactttacgaaaaacagcacaaggacacaaagcctaatattcttgtagagttaacaggttgtttttattttcctcctttaaatgttttgggagaatttaaatcatagaagtaataaatatttgtcatggtaatgtattttaatactgggtgctttgctgatttttatgaatatgctaggaaatgtttttgtgactttactttttggcttcaaaagttgttttaaaatgtagtctatctttttagatcatactattttatactacatttataaatgactttcataataaagtaatcctagtttcttaatctataatgtggggataacaatactccgtacttcaaaaggttattctagtgttaaatgtgataaaatatccaaagcttctatctagtattttatttataaccgacctccaatgaacgatgtaacaattagttgcagcagtagctgatggcactttctaagcttttacctgtgttcctcaaaagaactaataaggtttagtattgctattgtccccattttagatgaagcaactgaggtacaaagaggttacatgattgcccaaagttatacaactagtatgtagtgttgaaacccaggcattctgccactgtattgcatttcctttcaccatagctggtgctgttgcccttgttaatgataacagcaggactcctgaataaagttttccatgctcagctgtattaagaatgccataaggtcacatgcctaatgaactagaaacaagttaacagccctgcctgttcaattgtgcagctgcagttcatatgggaggtgtttttctaaatatgtaacaagaagcagtcctcaaaaatacaaggttcagtatatttgtcctattgatagattttttcccccttccattttccctccaatttccattctttaatatacccttagcatagtggtttaaaaagatgagataggaagagggaaagcaagggctaaggacagtcatagaaattgccagaggttgatgttggaaatatcccttaaagaccatttggtccaactcctcatctctccaccatattattaaggaaaggggtcccgatccagaccctaagagagggttcttggatctcgcgcaagaaagaattcagggtgagtctgcagtgcaaagcaaaagcaagtttattaagtaagtaaagtggtgaaagaacagctcctccatagacaaagtaggatattcctgaaaataagaggagggatgcacccaccctaggtacaatgcttatatatatagggagatgtgttctgctacaagggtttgtgataaaggattaattttcttaattactgtattttgcaagaatctatatattattattattattattattattattattattattttgagatggaatctcactctgttgcccaggctggagtgcagtggcgcgatctcggctcactgcaacctccgcttcccaggttcaagtgattctcctgcctcagcctcctgagtagctaggactacaggcaagcaccactgtgaccagctaatttttttattttttttagagacagagtttcaccatgtaggccaggctggtctcaaactcctgacctcgtgatccgcccgcctcagcctcccaaagttctgggattacaggcatgcgccaccatgtccggcccaagaatcgatatttttatcttaaaagcaaaattaggaatgcctttgttctccagatatcaggatatctggacactcccaagtctgagtctgttttagtaaacattattaatttgttcccttaactttaaacatctagaggctcggaatgccttactttctgagaatacagtccagcaagtttcagcctcattttcctagcccacactcaaaatgaagtctctctggttcacacgcctctgaaaatattatggaacagatgcctactggtgaaaatagtactgacaggaagtcacaaaccctcaactctcattttggttctgccctagagtcactctgtggcttttgtttagttacttcccctcgttggttttcagttgttgactaaatcaagagttagggccagtctacctttggaaattacttgagacccaatggaatcaacatttgaaattctggcaaatatatgtaaaactctccacatatactttgataagatcattttacgtctctttacaggtttgtttgtctctcccagccccttgttgctttttgtcattttctttttgccttgtagaatgtattttataaagcattcttcagttatggattccattttcctcctgggacttctgcttccaggaagatagagtaaatggactttccactatttctcctgctaagtactaaaaaccatggatattatctataaaacaacatcaagaagactatacaaggtagagaatagaaagcaggctatgtagggactttgggacccaaggaacaaacacagtggtgagttctctgggttttctttttaccacatatatcctagatttggagccagcaacccagaaacaccaaagagtagagacttttaaaggtcctaacaaaagcctactctctctagcccaaagaccaggaaaggagcaatgttttatagagtaggaaaaaatagtcttctccctactttgtatagttcttacttggggcagatctttgttacaaaagacagattaacaagaaaaatgtataaatttattaacatttatatttcatatgtacatgggagatacccagagaaatgagtaaatctcaaagaggtggcttctgagttcagacttaaataccatcttgaactaaaacaaagaaaagaggtcagtaatgggaggtgaccaagaaaagcactgcacacaagacaagtttgttgtgcagatttaagttagtgccctttgcgttgataatagagtccatggtgatttagaatcatccttcatggtacagagaggaaaacacccatacaaatggaaatgtcctttatagatgtcaatttccctttaaaaagggaacttctccatttttagagcttctcctgtgtcttcagtttctcaaaatactcagtttaaaataatccttttgcccaagacacatctttagggatggtatattttggtcccctacagtcattttgcagcagtgtattctggttttcaatactttctttctttattattattattatatattttttgagacagagtctcactctgccacccaggctagggtgcagtggctcaatctcagctcactgcaacctccgcctcctgggttcaagcaattctcctgcctcagtctcccaagtagttggaactacaggtgcctgccacgactcccagctaatttttgtatttttagtagagatggggtttcaccatattggccaggctggtctcaacctcctaacctcaggtgatccacctgccttggcctcccaaaatgctgggattacaggcgtgagccaccgcacctggcctctggtctttaatactttctaaaagaaacatttagacagtaactgctctactctactccagccatttccagtcatgcctgcaaagattgagtggactttaccctctccccagcagtaatgaagcaccccctctctttccctgctctacggtactgtcccagaagaggctgagtagagagcgaagactttcatcactgccctgcagtaatggggccaccatcaccactacccccatattatcagtaaaggtcatgtggggagaagtagcaagggactcaccacttgtcccagccaagatggtaacagtggaagcctagtacagagtcagaattccttcccctacccagcagctatgaggagccccttcatcccttgggtgtcaacagaagtcaaatgggtaacttagactctaccctacgtggccatagtgaaaaaaacatctaaaacataaagtttaagtaagatccagaatctcataacataatactcaaactgtccatgttttagttgcaaatcacttgtctaacaaaatctcaacttgactggaaaaaaaaaatcaatgccaacaccaaaatgacagagatattagaattatctgacaataactttaaagcagccactataaaaattatttaatgatcaattaataaacatgtttgaaactaatgagaagatagaaaatcttaggaaagagaagattaaaaaaaaactgagtggaaattttagaacaaatttaaaatctcaatggatggaaccaacaataaaatgaggagacaaagaggaaagaatcagtgaatatgagattagattaatagaaattatccaatagagagaaaatagactaaaaaggggaaaaaaaggaacagaacctcagggacctgttggactacaacgaaagatctaacatttgtgataacactagtcctagaaatagagagtaggtctggaaaagtgttcaaagaaataatggtcaaaaactcccaaattttgcaaaagatatgaatttacagattcaagaagctgagtgaatttaaaacagaataaacccaaagaaatctatactaaaacaccataaccaagcttttgaaaactaaaacaaagaaaatgtcttgaaagcagccagaagagcaaagcggtacattattcatggaagaaagtctgtttgaaggacagctagtttttcatcagaatccatggagacccaaaggaaaatgacaaaatgcaaaatgaaaataactattaatccaaaattctgtatctagcaaaagtgtctttcaggaaagaaggggaaatttaacattctcaaatgttgaaaaactaaaagaacttgtcaacattagatctatcctaaaagaataactgcaggaagttctctcaacagagaggaaatgataaaagaaggaatctgggaatgtcaaaaagaaagaacagtgaacaagttaaaatgtggacaaatgcaactttcttcttctcttgagatttctaaattatgtttaacagttaaagcaaaaattatagcactgtctcttatggttctaaacatacacagaggaaatatttagggaacgattttataaatgggggagggtacagggacataatggcaagtaaggtttctacactttacttgaactgtaagatgtaaccatatgtacatagtaataagtcatgtatatatgtaatgtagtacctagaacagccatttcaaatgctattcaaaagagatactcaaaatcaccatggatagatgaagatggaattctatatttagaaacacattgattggaagaccagaaaaagaactcagagacatgacagagaacaaacagaaaacaaataataaaatgatcatccatgattatattgaatgtaaatctaaatatacaattaaaagaaattggcagggtagattagaaaacatgactcaattgtatgctgtcctcaagtcttagtttaaatataacaatataagtaggttgaaagcaaaaggatgagaaaagatacattatgcaaacatttataagcaaaggaaaccaggaatagctttattaatatcagataaagtagatttcagtgcaaagaaaattacctaatagacatttgtagaacacttcacccaaaacagaattgatatcaacatgttgatatcattgaaaccatacagagtatgttcagtgaccacagtggaatcaaactagaaatcagcaacagaataacaaaagttagatctttaaatacttggaaagtaaaccgcacacttctaaacaactcatgagtcaaaaatggaaattacaaagaaattcaaataatactacatgtaattaataaaactatagctcacaactgtaatcctagcactttgggagtctgagatggaaggatcgcttgagcccaggagttctagaccagccagggcaacacagtgaggccctgtctctataaaaaatttaaaaattggccaggcactgtggctcatgcatgtaatcccagcactttgagaggctaaggtaggcagatcacttgagtccaggagttcaagaccagcctgggcaacatgatgaaaccccatctctactaaaaatacaaaaattagctgggcatggtgtcgcacacctgtaacaggtcctagctagttgggggactgaggcaggaggatcccttgagcctgggaagtcaaggctgcagtgagccgagatcgtgacactgcactccagcctgggagacgaagtaagatcctgtctcaaaaaaaaaaaaaaaaaaaatagccaggcatggaggtatagcctgtagtctcagcttctttgggcaggctaagatggaaggatcacttgagcccaggaggccaaggctgcggtaagccatgatcatgccactgaactccagcctgggtgacagagtgaaagcatctcaaaaaaaaataaaattattaataattaataataaaactgaatcaaaatgaaaatacagcatattaaaatttgtgggacacagctaaaacagtgatgagacaaaaatgtatgctggtgtcagaaatgattacattagaaaagaagaaaagtcctagtaacctaagcttcaacctgaagaacctagaaaaagaagagcaaaataaacccaaaaggaggaaaaggaaagaaataacaagaatagaaattagggttaggagcagtggctcacatcttgaatgccagcactttggaaggctgaggcagaaggtttgcttaaggccaggagtttgagaccagcctaggcgacatagtgagaccctgtctctacaaaaaaaattgaaaacaaaaacaatagagaaaatcaatggaagaagaaagtggctactttgaaagagtaataaaattgacaaacccctagcaagactgacaaagaaaaaacagctgaagacacaaattaccaatatcagaaatgaaatagaaaatatcaccatagagcctgcacccatcaaaaggataataaaggctactgtgaacaactctacacatataaatttgacaactggaatgaaataaaccaattcttcaaatgtggacacactaccacaattcatccaagatgaaatagaccatttgaagagccttataactttgaaggaaactcaatttgtaattttaaaacttccaaaaaaagacatttagaggctcagatgatttcactgaagaactatacctaatgtttaaagaaatactaacacaattctacctattttttaaatagaaaataggagggaacacatcccaattcactttttgaagctagtattatctaatatcaaaaccagagaaaaataatacaaaaaaagaagaaactacaggccagtatcccctatgagtatagagacaaacatctctaataaaatattagcaaacagaattcagcaatatataaaaagaattatatactattctattaccaaatgtgatttattccagggatgcaaggctagtatgatattcaaaaatccattaatataatctaacatattaacaggctaaagaagataaaccacatgattctatcaaccgatgcagggaaaaaaaaatattttgaatgcttttcttctaagactagaaacaagacaaagatgtctgctctcagcactcttattcaacatagtgctggacgttctagtcagtccagtaaggtaaggcaaggaaataaaagatatacagatcagaagagaagaaattaatctcgtttgtagatggcatgattgtctgtagagaaaatcccaaggatggttctgcggctctgccagggaataaaaatatatcaaatgattaaaaaaaaaaaaactaaaagaaaaaaatgacaatcccaaggaatctaccaaaaacaaactttgagaattaatacaagttcaacaatgtcacaggatacaggataagcacaaaagtcaatattatttgcatacactagcaatagaaaccaaaatttaaaatataatgtacatttttagccagtcggaaaaattaaattgttaggcataaatttagaaaaacatatacataattatatgctgaaaatgatgactattaataaagaaatgaaagaagacctaagtaaatggagagacatactgtgttcatggattggaagactcaacatagtaaacatgtattaatgcactctcacactgggtaatttataaagaaaagaggtttaattggctcacagttccataggctgtacaggaagaggcatccacttctgcggacgcctcaagtagcttttacttatggcagaaggcaaagtgggagcaggcgtctaacatgggaggagcgggactgagaaagacaagtgggagaggtgccacacactttaaacaaccagatcttgagataactccatcattatttctataacagcaccaagggggatggtgttaagtcatgagaaaccatccccatgattcagttacctctcaccaggtcccacctccaacattggggattacattgaggacatgagatttgggtgaggacacaaatccaaaccatatcagatgtcaattcttcctaaattgatatgcatattaaacatagttgctatcaaaatccgagcaagatttttttgtagctatcgacatgattattctaaaatgtatttggaaaggcaaaggaataagaattactaagacagttttgtaaaagaagaataaagtggaaggagtgagtctgtctggttgcaagatttattatgtagctacagtaatcaaaactttgtgatattgataaagggattaatacataaatcaatggaacagagaagagaacctagaaatagacccacacaagtgtgcccaactgatttttgacaagagggcaaaagcaatttgataaaagaggaattgccatttcaacaatgttgctggagcacttggctcttcttaggccaaaagaaaaaaagaagaaggagaaggagaaggagagaagaagaaaggaaggaaggaaatgaacctcaacctaaactgtaaaccttacaccttataaaaaggttaactctaaatgagccatgaattttaatataaatcttaaaactacaatccttttagaaaaaaagaataaaatattcaggatcaggatctaggactaggcaaagactagctgggtgtgatcacagtgagatatcattacacacctatcagaatggctaaaataaaaaaaatcagcaaccataaatgctggtaaggatgcagagaaactggatcactcatacattgctgctgataatgtaaaatggtgcacccactctggaaagcagtttgacagttaaaaacctaaacacgcagctaccctatgacccagcagttaacactcctaggcattcatccctgatatgtgaaaactggtgttcagagaaaaacctgtatatgaatgtttattgtagttttattcataatagccaaaaactggaaacaacccagaggtattttcaatgggtaaattattaaacaaactgtggtaaagccataccatggaattctacttgataataaaaaggaacagacttttaatacacacagcaacctgtgtccatctccagagaattatgctcagtgaaaaaaagcaacccttaaggtttacatactgcgtgattccatttatatagcattcttgaagtgataacattatagaaatgaagaacagattagtggttgccaggggttaaaaattaaagatgaaaatttagctaggcatggtggcacacacctgtagtcctggctacttgggaggttgaggcaggaggatcgcttgagcctaggagttcaaggttacagcgagctgtgattgcaccactgcacttcggcctgggcaacagaggaagaccctgtctctttaaaaaatacatacatacatatcctggctgtaacattatactgtggttttgcaagatattaccatgggagaaactgggtaaaaggtacatggatttctctatattatttgttacacctgcatgtaaatctacaactatcttaaaataaaagttgaattaaaaacaaaaagcattctccagctagggataccactttcctccctgggataggtgttcccctcatcctgacggcctgaattaggagctccttgtccttgagacattgagaaggttgaggacccagagtcccagggctgaggacaccattagatatgcagctgtacttatgcctctttagaaatattttctaaactcaaatcaggacatgggatataaattttatacattttttaaatttatatatgaaaagtctagctatgacaaattattcttaacggtatatttactaaatacataatatgtcacatataacatataatcaagtgcttaatgtttttaattaaaacaggaaattatgtaaaggtattttccactttttctgcatcagagttatatacacttcaggagaagtaggctccaaaagctgcacttgaaagaaaggactcttccttttaattgcaataattgacctcctactgcatcttccaggagactgaagtttaggcagcagggagcaagacagtttaggcataagacatatttccctccccaatccaaggcaaccagagttttatactacattgttgcttgaagaaccctgggcttcctttctcacacaaccctgatatatgaaatacattttgtaaatcagactgaacattcagctacatgtcttcatctctgttctaaataacaaactagcaaacaaatttttggagcacagtcctcctatttcttacatcctttccttttctgatcttttaatcccttggctctaatctggccttctgatagccaaataactactacttcagtggtctctgatttttttttttccccataacctacccagtgtgtgtaaccttgggtaaaggaaaatgaggcagtagttagttacctgtcttctttcttctttgggttattggttcattccctgcttgggttcatagttcacttcctagtagccagcctcttccctctagatccccagtgccacccctgcctcctcttgcaataaccctcacagaagctgccttcgcccaggcttgcccttaccatcactatggtgattcctagtaccttgcttcccacaaagagaaagtcccaactgagagagcaacactcaacagaagactttgggagatgatcagtgggctctgctagagtttatactccatgaatagtggacataactaatgttcataccagctacttgcatcggcataattttcatggttacacaaagagaggggttatcaagggaaaagaagatcaggtcagagatcattcccagctgggaatctggtccagctggatatttccccctggcccccacagacctgtttctctgtggcttgactatcatccagacaacgaccttttaacctgccagcatgccttttaggaggctttgcagtgtttgcagattatgtaatgtctgtgcttcagtagaaatcttacggaaacaaatggaggaagtttgctagtccaagcagtggataataaatcctgccctatctagatagaaactggttttctgtatcctttagtttatacacacatttttgttgttgttgttgtaagctctgaaaaattctaggaaccaaaatattcaaatatttcaaatcctgctgcccttttggcaaagatggcacatcctttcctgtaggcttgagttctggggcattagcgttcttctctagtatgagtgagtgaaatgtcatttcctatccagcattcagagaagagtagccctacatcagttagtgtacattataaactttaccacagtgttcatcaatgtcattttgttaactaggttattttaaatgttatttttaaagaacatatatggattttttcttcagttttaattctggaatgtttgctactctgtattttctttagatgttcttccacttcatgaaaaataggcttttcactgagacagctaagttgattttctgatcaaagctaaaagaaaatacgtcttagttcagcagtatagcaagtcaaaataattaactttaaaaaatattctagggtcttttcgttagttaggccaaattgatattttatttcctttcagttacctaactagaaaaacatagcacagagacatagggaatttctggtagattacattactttgttgaatatattcttgtaaaataaattttcataattttttcttcccttaatatggaattagctttttaagatataaaatgaactattaaatgagatgacaacataagcatttgcatcactaaagaatcataaatttcttctagaatatttttaactcaatcccagaataatttttgagtaagacgaaaccagactctcatgttaccttacctattctctcatttatctgagcagcttatgaaaatatgtttataaaacccaactgtggcttttatttatttatttatattagagacagggtcttgctatgttggccaagctagtctcaaactccaggcctcaagcagtcctcgaccttggcctcccacagtgctgagattacaggtgtgagccgtcatgcccggccccagctgcagcttttaatgattcatgcaagtataacctaaaattcaggaatgaaggaaaaggtttttttgtttgtttttgtttttgtttttcggtcagtgttaggatttaggacaagaggtgattagtgtggtactaggatataatctctggtttagaagttaatagcgcaatgaatatcttattttttctaaagaaatttttatatttcaaaattaacgccagtctaaaaagttgcattattttttaaaatcatacaacacctccagttgtttttcactttggtgaactcagtgtcgcttaggtaagattatctgtttgcagactaaattgattatcgtaatgaccacagtcctggcttatagagaaatacataataaactatgttgactacgaaacatttctccaaattatgcagaaagtttagaatgggagaattatttttttaggtctagttttcactttgttgcaacttggcaccattggaaaggtggaaaacaacctggaaataaataaataaccgctgaagaattttcccttggaagaaggtttcatctgggtttctaagactatctggtcctacttaaccttttgacaaaccctgctggtatagcctttctgagtacccagccttactctgcctacagctgtgttggcatgtggggctgctcatgtctccagaatcttctagtcttgcagctcgtcctcaaccctaaattttgttcccacacagccctgcttgacttgaaccttcctaacttccctacactcagcacatcttgccagcctcaggaatagtcagaatatgtgctaggaggagctttcctgtgaaaggctctttttcagtcagctcctaccctgcctcctctcaggcaagccctggatatgtgcagatgccactttctcccccactcaagtaccagagcctgataggcagttaagcacatcagcccttgtgctgtgaccaaaaacacccagaatattcaaaggccctatttctattcacttttatcatctgggattgagtttgactatagataacagaaaaccaaattacagtggcctaaacagatagggatctatttttctcatgtgccaagaaatccaggcataggcagtccagaggtaaataacatctcaacagtgccatctgggacatgggtcgtatgtttctactctgttgtcctttgcacatcacataaacctttatccttgtggtcatcatctcatggtcacgtcatggctcctgcaactctagacctcatgtctaacattcagccagaaagaaagggaaaggggagaaaggcaaaaggcctactcctgattaggctttggcttatttaaaaagagaatgtcctccctaggaacttttagattagtagccaaaatatcccttactctgaggaatagagaaaagccatatgttttgatttccccatgactcagtagagtcaatcaagggaaatgaaaatttttgttggcttttaggtagttacattgcgtctactacatccacactgcaagatggtcttgagattcaacatccatggacttaatctcagaatagcccacctaccaaacactgaggtaagacagtcagtccaccagaactaaaatccatcgttgccatgttcctgcagaatgccttcaggcgttgtaacccttggcaagataagctcacagtgaggtctaccgtttatttcttaattgtgacaggtcttcttcaaatcttgtctaaataagtacccatccacagtagagctcatctcagctcccaagattattgtattttttattttaaagggagttttaaaatgtttggcatttcatcggtattaatgggcttactaatgattattctcctcagccaccccccatcatggtgctgaatctaccaaagccttttcctaacctgtcaaaccttttcatgagtactttaagaaagtgatttttccttgtaaacgtggtggtatattttggacatgtagaatctgtcagaccttttaaataagatcaaagtgactagaagtagtatctcagtcaccatagaccaagagtaaaactcacatatatattgcggtatatacacccacaatggttgatttcctacctcccaaattcacctgtcataatgaaaccatgcccatctcctgtaattccccttgcttcagtaccaacaagtccctctcctcaataatggcaaagccaaacaaactggggcattctaatatgaatcatactagtggtactaggctacgtaccaccaaaacagcagcacaacttggcttgccaccttgcagttctactttagaaaactatttatgcatcaccttccattttatgattagttgtggtttaaattgcctctacattgtctctggctcttataactagtgtgtatgtggcctagtttctgactagtcccaacaggggctgttagacttgtactctggccttcagttattcatctcacttttataccagtacctgccagcttggcttaccagtgtcagtgtgcttcagcctctagttctggcctccatcatgatgtcagctcttggaccacttcctccccaccccgctttccaaagcactagctgagtaaccttctctgtcagtctcttcccatttatttcacttaacaacccttccttactgatacctgctgtgagctaactgttcagataagcactggagagaataatgaatgaaatatagttcctgcccttaagttacttacagtgggatagaagagaaaaaatatgaagaattttaatatatcatagggctatcataaatcagatacaaggtatgaatggtaatgagaaaggagagatcagttctattaatacctaggtaagtaacagaggagaagatgaatgaatttggacttgaaggtgagttgggatttttccagacagacaaaatggcaccaggataggcaattagaaggcagccttctgttatggattatgtgtacttggagaattgggtgataacatttgacctgtgagatgaatgccctattggtcttccagctttagccctcactcggctatttcaaaccttttagccagcataagttaaagttgtatagtaatttttggacattaagcaaatcttagaaaataatgttagtaaataacattagactcttcaattagtcttttttatacctgtgtttaatggagcaaaagtaaagaattaacattcttccaaatcattctctttccttcatgtttttgtttccattactactgctactagacatttccttcactgtagtgcttgaaattctgagttctgctggatttccaggaatgctgttgacagtcattgccaagagaaatgtgttttccacttaggaaattacacttctatttggtattattatttctgaccactatgttgtattatgagcatttctgaggaatgacaaagatggcttccttggagcaattactggaaaagaagctggtgttctattaaaaaaaatatatgcttagataggaaattaccaagaaataaataagggtaggaataaaggtgggatggagtacattccctgatgaaaaaatttactttcagaaaataggactccttacaaattatttgaatttttaagtttttttttaatttaagaatgacaaaaaagtacttaaaacataaatgtgtcccttcatgaattatcacaaaacaaacttctattaactgccacccactcaagaatcaccattgcccgagtctcagaagacccccttatgcttctgcccatctcacttactccattttcccaaatgtaactactactaacatctagatgtacctggttttggactttaaataactggaattgtataatgtatacttgtttgtgtctgacttctctcagtcaacattgtatgttgcaactttaattatttcatttttattactaaatacttttccactggatgaatgcactacagtgtatttatttattctatgattgatgaatacttgggttgtttccaatgtggtactactaaaaataatactgtcaagagcatttttatgcttgcctttcagtgaacttatgcacatatttctcttgggtccatccagagaggaaatgcagaggtcatatggtatgcatatgtttagcttcagaagacaatactaaatggtttccaaagtggttgtaccaatgtgtactcccaccagcaatatatgagtttatgttgcttcatttgctcaccaacacttggtattgtctgtattttttgtttttgctatgttttgtaatttgggtcaatctagtaggtatatagtgccatctgatggtgttaaggttttctaaaaaatattttgagattgttctttttctttgattacataatagttgtacatattttagggtacatgtgacattcgaatacctgtatacactgtgttatgatcagattagggtaaatggggtatccatctcttcaaatatttatctttgttttaagaacattacaattcttctcttctagctattttgaaatatacaattactataattttcccactgcattatcaaatacaggaacttatttcttatatctgattctgtttttgtaccccttaaccaatttctctcatctgttccaccccgcttcctttctaagcctctggtagtgaccattctactgtctacccctgtgagattcactttttttttttttttttttttttgagacagtttcattctgtcgcccaggctggagtacagtggcgcaatctcggctcactgcaaactctgcctcccgggtttaagcaattctcctctctcccaccttcccccgccagtagccaggattgcaggcgcacaccaccacgctcggctaatttttgcatttttagtagagacggtttcaccatgttggccaggctggtctcgaactcctgacctcaggtgatccgcccgcctaggcctcccaaagtgctgggattacaggcgtgagccactgtgcccagccgtaagattcactttttagctcccacataggaatgagaacatgcaatatttgtctttctgtgcctggttttcacttaacataataacctccaatcccatccatttttctgcaaatgacaggatttcattctttttatggctgaataatattccattatgtgtatataccacattttctttatccattcaccaactgatggacacttagattcattagtatcttgggtactgtgaacagtgctgcaataaacatgggaatgcagatacctctttgatacactgatttcctttcttttggatatagacctatcagtgggattgctgaactgaactatgtggtagttctagttttagttttttgggaaaactctaaactgttttccataatggctatactactttacattcccaacagtttacaggtattcccctttctctgcatcctcaccagcatttgttattttttgtctttttcttgatagccactctaactggagtgagatgacacctaattgtggggttttttttttgtttgttggtttgtttttaatgttttatttccatagattttggggaacaggtggtatttggttacacgagtaagttctttagtggtgatttgtgagattttggtccacccatcacccaagcagtatatagtgaacttaatttgtagtcttggttttgatttgcattttcctgatagtgatgctgagcattttttatgtacttgttggccatttgtatgtcttcctttgagaaatttctattcaggtctttggtccatgttttattcagattatttgtcatcatgctattgagttgtttgagttccctaaatatcctggttattaatcccttgttagatggatagtttgcaaatattttctcccatgctgtagactgtttcttcactttgttgattgtttacttttctatgtgtagctttttagcttggtgtaatcccatttgtctatttttcgcttttgttgcctgtgtttttgaggtcttacccgaaaaaaatctttccccagaccaatgtcctgtagcattccccctaatgttttcttttagtagtttcatgtcctattaaagtctttaatccatttgagttgatttttgtatatggtaaaagataggatcgatctagcttcattcttctgcatatggatatctagtttcaataatgtttattagagagactatcctttccccaatgtgtgttcttagtgcctttgttgaaaacaagttggctgtaagtatactgatttatttctgagttctctattacattccattggtctgtgtctgcttttatgccagtatcatgttgatttaattactatagctttgtagcatgatttaaagtcaggtagtatgatgcttccagctttgtttttttgtttttgttttttcctttccttaggattccttagcaattcggcgtcttttgggattccatacaaattttaggattgttttctccatttctgtgaagcatgtcattagtattttgagagagattgcattgaatctgtagattgctttgggtcatataacatttcaatgatattaacccttccaatccatgagcatgggatatcttttcctttgtgtgtgtgtcctttccatttctttcatcagtgttttatagttttccttataaagaaaaacttgttttgttaaattcacttcttttgttaaatttattcctaggtattttttagtagctattgtaaataggattgctttcttgattactttttcagattgatcactgtaaacgtatataaacactgctgatttttgtatgttgattttgtatcctgcaactttactatctttatttatcagttctgagagttttttgatggagtctttaggttttactaaataaaagatcatgtcatctgcaaacaaggttaatttgacttcttcctttccaatttggatactctttgtttctttctcttgcctaattgctctatctaggacttctaatactatgttgagttgaagtggtgaaaatgggcatcttgtcttgttagatgttagtggaaatactttgttcactgttcagtgtgatattagctgtgagtctgtcatatattgcccttatggtattgaggtatgttttttctataccccgtttgttgagagtttttattatggagggatgttgaattttatcaaacacttttccagcatgtattgaaacaatcatatggtttctgttcttgattctattgatgtgatgtatcatgtttattgatttgtgtatgctgaaccatccttgcctccctgggctgaattccacatgatcatggtgatcttttcaatgtgttactgaattcagtttgctagtattttgttgaggatttttgcatttatgctcatcagttatattggcctgtggttttctgttatattcttgtctggtcttggtatcatggtaatgctggcctcatagaatgagtttggaaatattccctcctcttcaattttttaaagtagtttgagtagaattggtattagttcttcttcagatgtttggtagaattcagcagtgtttctatcaggtcctggactttcctttcatgggagacttattattattatttagatcttactcattatttgtctgtttttctatttctttgtttcaattttagtagattgtatttttccaggaatttatccattacttgtaggttttccagttcattggcatgtagctgttgatagtagtctctagtgatcctttctatttttctggtaccagttgtaatgtttccttttttgtctctgattttacctatttgggttttccagcatgttggtattgtctatctttaaaaaaaaaaaaaaaactttttcattttattgatcttttgtggttttttagtctccattttatttatttctgttctgatctttattattttttttattctacaaattttaggtttgatttgttcttgcttttctggttccttgaagtgtatcattaggttatttatttgaagcctgtatttttttgacataggcatttattgctataaacttccctcttagtcctacttttgctgtatcccataggttctggtatattgtgtttccattttcatttgttttaagagtttttaaaaaatttctctcataatttcttcattgacccattggtcatttgggagcatgttgtttaatttccatgtatttgtacagttttcaaagttcctctttgcaaagattctagttttattccattgtggtcagaaaatatacttaatatgatttctattcttttaaatttgttgagactttttggtgacctaacatatgccctatgctggagaatgttccatgcactgatgagaaaaatgtgtgttctgcagtagttggatgaaatgctcataaatgtctgttaggtccatttggtctagagtatagtttaactgcaatgtttctttgttaattttctgcctggataatctatctattgccaaaagcaaggtgctgaagtcccttactattactgtattgcagtctacctctccctttatttctgttaacatttgttttgtatatttgggtgttctggtgttaggtacatatatatttattaatgtaatatcgtcttgctgaattgatatctttataattatataatggccttttttgtctctttttatagtttttgacttaaagtctattttatgtgctataaatatagctattcctgctctttttaaagttccatttgcatggagtatctttttccatctcttcacttttactctatgggtatctttataggtgagataagtttcttgtaggcagcatatatttgggtcttgttttttaatccattcagccattctatgtcttaattggagaatttagttgatttacattcaatgttattattgataggtaaggacttaatactgtcgttttacttgtttgcttgttgttttgtaaccctgtcttcctttcttactctctttatttgtggttgtgattttctctggtagtgtgttttaactcattgcttttgatttttattatattttaggtttttgctttgggttactatagtgcttacaaaaacattttatagttataagaagttacctataactaagctaatgtttttgtaagcactcctgtagtcccagctaattgaaggctaacgtgggaagatctctagagcccagcaggtcaaggctgcagtgatctgtgattgcaccactgcactccagcttaggtgacagagtgagaccttgtctcaaacacacacagacacacacacacactgatagcaacctaactttgatcacaaaaacaagagaaaagaaacaaatacaaaacatgtacacattaactccattctccccctacattttgaatttctgatgttacaaaaaataataaaagaatttacttttaaatttgataatgttttctttcatagaggcagaaaagcatgtaaatcaaagattgacctgttcttgtggtagtcagtttgtctgtgagtccatttggcactccagcatatatcatattggaagagtttcagatttttgaatttacatttccatgatagctaatgagggtgagtactttttcataatttgagtaacttctgaaatttctgctcttgtctattgcccatcttgatgtttggtttccagcctttttcttactggtttgtagaagttttaagataaattccagataccagtacctttgacatatggcacatatcttcttccactctgtggattgtctcattagtctcttaatatggtctttttgctggaaaaaaattctaattttaatgtaatttaacaatcttttgtggttagtgttgtagtgtcctactaaaggaatcttttcctaccccaaagttatgaaatattctcctatgttatcttctagaaatttaattcttttgccttttaccttttgatctacagcccacctacaattgatttttatgtaaagttgaaggtagaaatcaagtttgtcttttcttctccataggactatccagttgacccatcatcatttagtgaaaagaccatttattaattttttcttgctgtgtaacaaatgaacacaagcttagtatcttaaaacaacacccttttattaactcacagtatgtaggtaaggagttcatgctcaaatcaagttgtcagccaggctcttcttgtctggaggctctgggaaaaaaaaatccaattccgaaattgctcagattgttggcaagacatccattttgtgtggctttagactgaggtccatgttttcttgctggctgtcagccagggtgcttctctactcatatatatatatatatgtatatatacttaaagttctagggtacatctacacaacgtgcaggtttgttacataggtatacatgtgccatgttggtttactgcactgattaactcatcatttacattgggaatttctccaaatgctatccctcccccaaccccccaccccacgacaggccccactgtgtgatgttcccctccctgtgtccaagtgttctcattgttcaattcccacctatgagtgagaacatgtggtgtttggttttctgtccttgtgatagtttgctcggaatgatggtttccagcttcatccatgtccctgcaaaggacattaactcatccttctttatggctgcatagtattccatggtgtagatgtgccacattttcttaatctagtctatcattgatggacatttgggttggttccaagtctttgctattgtgaacagtgctgcaataaatatacgtgtgcatgtgtctttatagtagcatgatttataatcctttgggtatctacccagtaatgggatcgctggatcaaatggtatttctagttctagatccttgaggaattgccacactgtcttccgcaatggttgaactaatttacactccaacaaacagtgtaaaagcattccaatttctccatatcctctccagcatctgttgtttcctgattttttaatgatcgccattctaactagtgtgagatggtatctcattgtggttttgatttgcatttctctgatgaccagtgatgatgagcattttttcatgtgtctgttggctgcataaatgtcttcttttgagaagtgtctgttcatatccttcacccacttgttgatggggttgtttgtttgtcctctctcacttccttgagcagtggttcgtagttctcctttaagaggtccctcacatcccttgtaagttgtattcctaggtattttattctctttgtagcaattgtgaatgggagttcactcatgatttggctctctgtttgcctgttattgaggataggaatgcttgggatttttgcacattgattttgtatcctgagaccttgctgaagctgcttgtcagcttaaggaaattttgggctgagacaatggggttttctaaatatacaatcatgtcatctgcaaacagggacaatttgacttcctcttttcctaattgaataccctttatttctttctcctgcctgattgccctggccagaacttccaacactatgttaaataggtgtggtgagatagggcatccctgtcttgtgccggtttgcaaaggcattgcttccaatttttgcccattcagtgtgatactggctgtgggtttgtcataagtagttcttattattttcagatacgttccatcaatacctagtttattgagagtttttagcatgaagggctgttgaattttgtcaaaggccttttccgcatctattgagataatcatgtggtttttgtcgttggttctgtttatgcgatggattacatttattgatttgcatatgttgaaacagccttgcgtcccagggatgaagccaacttgatcgtggaggataagctttttgatgtgctgctggattcggtttgccagtattttattgaggatttttgcactgatgttcatcagcgatattggtctaaaattctttttttgttgtgtctctgccaggctttggtatcaggatgatgttgacctcataaaatgagttagggaggattccctctttttctattgattggaatagtttcagaaggaatggtaccagctcctctttgtacctctggtagaattcggctatgaatctgtctggtcctggactttttttggttggtaggccattgattattgcctcaatttcagatcctgttattggtctattcagagattccacttcttcctggcttagtcttgggagggtgtatgtgtccaggaatttatccatttcttctagattttctagtttatttgcgtagaagtgtttatagtattctctgatggtagtttgtatttctgtgagattggtggtgatatcccctttatcattttgtattgcatctatttgattcttctctcttttcttctttattagtcttgctagcagtctatcaattttgctgatcttttcaaaaaaccagctcctggattcattgattttttgaagggttttttgtgtctctacctctttcagttctgctctgatcttagttatttcttgccttctgctagctgtcgaatttgcttgctcttgcttctctagttcttttaattgtgacattagggtgttgattttagatctttcctgctttcctgtgtgggtatttagtgctacaaatttccctctacacactgctttaaatgtgtcccagagatcctggtacgttgtgtctttgttctcattggtttcaaagaacatctttatttctgccttcatttcattatttacccagtagtcattcaggagcaggttgttcagtttccatgtagttgtgtgattttgaccaagtttcttaatcctgagttctaatttgattgcactgtggtctgagagacagtttgttgtgatttccattcttttacatttgctgaggagtgctttacttccaactatggggtcaattttggaataagtgccatgtggtgctgagaagaaggtatattctgttgatttggggtggagtgttctgtagatgtctattaggtctgcttggtgcagagctgagttcaagtcctggatatgcttgttaaccttctggctcattgatttgtctaatattgacagtggggtgttaaagtctcccattattattgtgtgggagtctaagtctctttgtaggtctctaaggacttcctttatgaatctaggtgctcctgtattggttgcatatatatttaggatagttagctcttcttgttgaattgatccatttaccgttacgtaatggccttgtctcttttgatctttgttggtttaaagtctgtttcatctgagatgaggattgcaatccctgcttttttttgctttccatttgcttggtagatcttcctccatccctttattttgagcctatgtgtgtctctgcacgtgagatgggtctcctgaatacagcacactgatgggtcttgactctatccaatttgccagtctgtgtcttttaattggggcatttagtccatttacatttaaggttaatattgttaggtgtgaatttgatcctgtcattatgatgttagctggttattttgcccattacttgatgcagtttcttcataggattgatggtctttacaatttggcatatttttgcagtggctggtaccggttgtttctttccatgtttagtgcttccttcaggagctcttgtaaggcaggcctggtgacaaaatctctcagcatttgcttgtctgtaaaggattttatttctccttcatttacgaagcttagtttggctgtatatgaaattctgggttgaaaattcttttctttaagaatgttgaatattggcccccactctcttctggcttgtagagtttctgctgagagatccgctgttagtctgatgggcttccctttgtgggtaagctgacctttctctctggctgcccttaacattttttccttcatttcaaccttggtgaatctgacaattatgtgtcttggggttgctcttctcgaggagtatctttgtggtgttctctgtatttccggaatttgaatgttggcctgccttgctaggttgggaaagttctcctggataatatcctgaagactgttttccaacttggtttcattctccccatcactttcaggtacactaatcaaacatagatttggtcttttcacatagtcccatatttcttggaggctttgttcatttctttttactctttttttctctaaacttctcttctcactttatttcattaatttgatcttcaatcactgataccctttcttccacttgaccaaatcggctattgaagcttgtgcaggcatcacgtagttcttgtgccatggttttcagctccatcaggtcatttaaggtcttctctacactgtttattctagttagccattcacctaatcttttttcaaggtttttagcttccttgtgatgggtttgaacatcctcctttagcttggagaagtttgttattaccgaccttcagaagcctacttctgtcaactcataatgtcattctctgtccagctttgttccattgctggcgaggagctgcaatcctttggagtagaagagccactctggtttttagaattttcagcttttctgctctggtttctccccatctttgtgattttgtctacctttcatctttgatgttggtgacctacagatggggttttggtgtggatgtccttttggttgatgttgatgctattcctttctgtttgttagttttccttctaacagtcaggtctctcagccgcaggtctgttggagtttgctggaggtccactccagaccctgcttgcctgggtatcaccagcggaggctgcagaacagcaaatattgctgcctgatccttcctctggaagctttgtcccagaggggcacccacctgtatgaggtgtctgctggcctctactgggaggtgtctcccagtacatgggggtcagggacccacttgaggaggcagtctgtccgttctcagagctcaaatgctgtgctgggagaaccactgctgtcttcagagctgtcagacaggaacatttaagtctgcagaagtttctgctgccttttgttcagctatgccctgccctcagaggtggagtctatagaggcagcaagccttggtgctgcagtgggctctgccctgtttgagctttctggccgctttgtttgcctactcaagactcagcaatggtggacgcccctccccctgccgggctgctgccttgcaggtcaatctcagactgctgcgctagcagtgagcaaggctctgtgggcgtgggacccgctgagccaggcgcaggatgtaatcttctggtgggccattagctaagaccattggaaaagtgcagtatttgagcaagagtgtcccatttttccaggtacagtctgtcatggcttctcttggctaggaaagggaaatcccctgacccttgtgtttctggggtgaggcgatgccccgccctgctttggctcaccctccctgggctgcacccactgtccaaccagtcccaatgagatgaaccaggtacctcagttggaaatgcagaaatcacccgtcttctctgtcaatcatgctggaagctgcagaccggagctgttcctattcggccatcttggaacggaccacttctctactctttttttttttttttgatacggactctcgctctgtcgccgaggctagagtgcagtggcgcaatctcggcccacttcaagctccacctcccgggttcacaccattctgcctcagcctcccgagtagctgggactacaggcgcccaccaccacgcctggctaattttttgtatttttagtagagacagggtttcaccatgttagccaggatggtctcgatctcctgaccttgtgatccgcccgtctcagcctcccaaagtgctgggattacaggcgtgacacttctctactctttaaaggccactctcaggtcctttccatgtgagttccatcttcatacctactatggtgcatttaatccttctagtgctccaaatctctgacttcctttctgcaaccaaccagagaaaactcagattttaaagggcacatgtgaataggttaggctgggcccactagcataatcctcccttcttaaagtcaactctgccagataacatgacctatcataggagtaatatgtcatattcacagggtcaaatatttgaaagacgtcttagaattctgcttaccacaaactgtctttttcccactgttttgaagtgctacctatgccaaaaacaaaatagtcatatatatgtgtatatatatgtatatgtgtataatatatatgtatatatatgtataatatatgtgtatatatgtataatatatatgtgtatatatatgtataatatatatgtgtatatatatgtatactatatatctatatatatatatctatatatatatatacacacacacacacacacacacccctatatatatatagtccggggtgagtcatatatatagtcatttctgggaagagtttatgtagaatcaatatttcttccttaattgttcattgaattgactaatgaaatcatcttggcctggggttttctttgtgaagagattttaaattacaaattccatttctttaatatatgtaagactattcagggtatctgtttctttttgagtaagcttaacatttttgtctttgtgcagactttgtccattttgtccaaggtgtctacattcatgacataaagtttttcacaaaattatgtgattatccttttgatatctggaatctgcagagatgtcacctctctctttcctgatatttgtaatatcttaatatcttttgtcttctcacatttttttccctgatcaatctggctaaacacttatcaatttgattgttttattgaagaaccagcttttagttccatttattttcttgattattttattggcttcaatttcattaattaattgcattaatttctggtgtgaactttatttcctgcctacttcagagttaactgctcttctctttctagtttcttgcaatggaaactgaaataattgattttgtaatgtaagtttttagcgttataaatttctctctaactactgctttggccctgtcccacaaagtctgatatcttggagtgtgacttgcttctttcacttagcataatgttttcagggttttttcatggtttagcatgtgccagtgcttcattactttttattgatgaataatatttcgttgcatgactttaccatgttttgtctttccattcatcaattggtggacattcagattgtttgcactctttgactattatgaataatattgctgtaaacactcatgtacaagttttttgtggacttatgtttctaattctcttgtctataggtggaattgctgggtaatatggtaactctgtatttaatattttagggaactgccaaacagttttccaaagttcctgtaccagtttataattctaacaacaagacatgagggttacagtttctccacatcttgtcaacactggttattgtttgtctttttttattatagccatcctagtgaagtagtatctcattgtggttttgattatatttccttgatgactaatgatgttgaacatcttttcacatgcttattggccatttgtacagattgaatatcccttatctgaaatgcttgagatgagaagtgtttaggatatgggattttttttggatttggaaatatttgcatatacataatgagatattttgggaatgggacccaagtctaaacacaaaatttacttatattttatatacacctcatacacatagcctgaaggtaactgcacaatatttttaattttgtgcatgaagaaagttttgactgcaacccattacatatagtcatgtgtgaaattttccacttgtagcatcatgttggcactcaaaaagctgaattttggaagatttcagattttatgtttttacattagggatactcaacctgtacatcttcttaagaagatatttagaaatgtctgttgcaatcctttgcccattttcaatcagattgtctttattattgatttgtaagagttctttatatattatggctagagatctttatcagacatatgatcttttcccattctttagattgtctttttactttcttgatggtgtcctttaaagcataaaagtgttagttttgatgaagtccaatttatttatttatttttgtcacttgtgcttttgatgtcatagttacaaaccattctgtaatctaaggtcacaaagatgtatttctctttcctactgagagttttatagttttagttgttacatttagggctatgatccattctgaatttatttcctatgtcatgtgaggtagtgatccagcttccttcttttgcacatgtatatccacttgtccaagttccagttgttgaatgtttattaattttattatctttgtcatttctgcatcagttttgactgatcagtttttctcctcatttgggttgtattttcttgcattgcatgcatgataattttttattggatagcttacattctgaattttaccttgtcagatgctggatatttttgtacttctataaatattattgagctgtgttatgggacacagttttgttatttggagacggtttgatactttctggtcttgcttctaggctgttagttggtaccagaatggcatttggtttagggctaattttactccaccaccaaggcaaaaacctctctgagttctctagttaccagtccccaacctttttggaaccagggaccggttttgtggaagacactttttccctggaccaggctgggggaatggtttggggatgattcaagcacattacatttattgtgtactttatttccattattattaaatgttaatatataatgaaataattatacaactcaccataatgtagaaaagtgggagggagccctgagcttcttttcctgcagctagacaatcccatctgagggtgatgggggacagtgacagatgatcaggcattagattatcataaggagcacgcaacctagatcccttgcatgctcagttcacaatatggtttgcactcctctgagaatctaatgctgccagtgatctgacaggcggtggagcttaggcagtaatgcaagcaatggggaatgcctgtaaatacagataaagcttcacttgcttgcctgctgctcacctcctgccgtgtgacacagtactggtgctgctctagtggatgcattgttggttgtgacgttctctggtggactggtagaaacagtgactattctcaattcagggattattccctctaattctttcagatgattccttcacccagcttctcaaaatttctcatacaattgtgctgatctgcacctagctgaaattcagggggtcccctctgcagatctctggagcgttctctcactcactacagctttctccttctacaactctgccctaccaaaaaccactgcggtagcctccccaaactatcacctctatctccttgattacaaatgcattgttttaatcaggtgtgttaacatggcaagcatggagacaactgcctttgaaagaagagctacttagaattcttgaaaggagggggcattgcacactaggcagggcctcatggggaagcacccagttggggaaggaggcagaaggagcacaggagagcatggcccagagccttcattgtggtccccatgggaaggaagggatgaggcagtttaggcagctgagcaggtttagttaggattggctggtatgaaaaattttggtgggctttgagctataggagtagttcctagatgtcttgtgtccagccctgaaataattcccagcaggatttagagtgatttagagtatttggcttgttgtgtgagagttttctaagggaggtggttggtgggtatggcctttggattggttgtttgctcaatatgaaagaaatgttcaccgtggaatcatttgctatctctaagaatttagctagtcatgggaggggcagcctctccccgacaagcaaggcctccaagatgtcaaagcatcataaaatgaagacaataaaaaacaattaatgcacttatcaactgagggagattaccaagctctgcttgtacttctccttcttgcactgtagcctgaaaacttttcaaatgataagctgagacaatcataagactcctctcattcgtttctcttttctcagggattgctgtctttttgttgcccaatatccagtgtcttgaaaacttttttcttcatgtattttatctttttttttttttttagttgtttcaggattttaggtaggagggtaaatccagtccctcttactccatcttgttcagaagtagaactatggaaaatcatttccatttgaaattaaaattcagttgagatttttgggaaccaataacagtttaaacaggtttggcttctatatcgataattcagcagtctttattaacagattggagtgttagagcaaggtagcgaaaagacagagcatctaagccaagacaaaggatgggtgggaagacttcaagtagacagaatgccatgaacaaaatggctgaggatgcaaattttatgtgtttagaggataagtagctcacattcactggaaagcatgagtctttaaatgaagccaagcttcaacataggttgggatcagattttgtagagaaggctaatgggagttataaagaaaatgagaatttctctttcaataaaatctgtcttttcctcatggtgttccccaaacttttttttctcctaagcccccactaatattcatttttcattccttcaccttctcctaatatctaatccatttcttagctctgtaaggtcggccttatttgtagctctagaaagaacttcactgctcagtaaggtagacattagccatatgtggctatttaaatgtaaatgaattaaataaaattgaaatttcagttccttattgccctggccacatttcaggtgttcaagaggcacatctagccaagggcctttgtattggttggatagcacagggaacatttccaccatcacagaaagttatattgcatagcactactctagaatgtgctcagaggcaaaattttaaatttcatatgcggtataactatgtgaaaactaagacttaacaataaaattttaaagatttaaatgaagtcatcaaaatagtaatattgattatttttcactaagttcttgctaatcatttcttctactcatataatttctgcattttatatacagagcacatgtttatagtaggaaaaattatgtctttgatcatttattctttttcatactataagcactttaagtctcattctctcccccactagacaatataatagtattctaactagtctcttagaaaataatacaaattgaaaaagagaaaggctatagaagaaaaatgacagaggattagtctaagagagccaataccctactagtaggagttccagaaagaggggatggagaaaacaggggaagaaattaccaaagaaataataaaagaaaattttccagaaagaaagttggtaagtccaaacagtgaatgggcccactggatttccagtctaattaaggaatagaagacttgtattagggcatattcctatgaaacttcaggattctagagctaagacagctgagtttgaggataaggagatgggataggggcaggacaaagggaagtagtcacattccaagaaactaaaattgaaatcataaaccttggatgctggaagataataaacttgagggtaagcccctttcagcttaaaattctatatacagccaaactatgtgattcatgtgggaaaagaaacaaaaattagacatgtaaacatctataaaaattcctgtgtatctttttattagttactggaaaatgtgcttcagtaaagtaagggaataaaccaagaatgagaaagtcatgaacagaatccataaaacagggaatccagtccagagaagtggcaaagggaagtccaaggatgacagctatgcagcaggcctggagagcaacccgtccaagattggatcaaaagaatggaaggctctgtggggggagggacagaataaatgaattattggatgtgtttgtacatttgggaataaaatctgatgcatttttgaagaaagaattttcattgtctactcatgagaaaagaaaatcaagtaaaggcaacaaataattctaggaaagacaaaatgatgtacaaagaaagaaactataacctatttgaaagggaggcagggaagtgagaggagaagaaaggacaggcagatcacctgggattccatcaaccagagataacgtgttattattttattgtttatcttttcaaataaatctgtaccatacacataatgtatctttacaatagtgggatcatactgtactatttcatggtttgttttttgtcagttactattatttttaaatatgtatttgacattatatattctgcaggataatttttaataggttatagaataattaatttagtgaatagaccataatgtattaatcaaatctctgttgctttaatttagttggtccttataaattccctgaaatatagtaaaacaaagacagttctgattttggaaccgggacttagagtcttatagtccagcttcttagtatataactgcgactaaatatcctgttctgatttaggagattaggccaagaaaatgcagaatatttactcctatatgtactcatgctaatatcacagacagacaagaatgattaaagtgctactttttaggattatatcatggctatatttaagggagcatctcctaccctattctctgtctagagtgctgctaacccaagtatctgcatggtccattttctcatttcattcaagttcttctctgttcacacatccccttatcagggaggtcttttcagtgaattttacataaaataggccacctctgtcactgcacagacttatctcctaagctgattttatttttctccatagcactttctcaccatctatcatcccaacactaaaatataagctcaagaatagtgtttctgtcttgtttgttgctccatctccagcgcctaaaataaggcctggcataaagtaagtaggtgctcagtcatctttgaatgaataaacaaatgaatgagttaattaactgggacttagaaaacaataggaacaacccaagaaggcagtgaagggaaattctaagtcgacagtggtccaggttagagcagaaggtctcagggtcctggaaaggaggtctccaggaagaattgactcagaaaaatattgagtagagttaagagggaaaaaaaggtaactgtaacgaaaacaaatgttggaggacagagaatggaagtgtaagagtggaagtgtggttctagataccacttggctcagcagtgaacaatattcagaagtaaaggtgtaagtatattatttaagtaagaatagaataattcaaaataagatataaacatgttgagaagatggcaggaaggaatggtagggctgtaaaagggagctaaatcctcatctttcatagcaactcagcaagggtaatcaataagttatcaagaaatgacaagatgatcgtaagtgtttagaggtttgaagataactggtggaaggacagctaaaagagttcagagaggcttcctctaggaaacgggtctagaaatgggaaatgatggaaaagaaaactatggtttggcactacaaccatttctgtgatatttgatatgaaactatatatgtgtatgtgtgttaccttgataaaactttaaacaaggaaagcagaggcaaaatgtaaaaattaataatctgggagctgggtgcggtggctcatgcctgtaatcccagcactttgagaggccaaggcaggcggatcttctgaggtcaggagttcaagaccagcctgaccaacatggtgaaaccctgtctctactaaaaatacaaaattagcggagtgtggtggcgcatgcctgtaatcccagctactctggaggctgaggcaggagaattgcttgaacctgggaggtggccgtgagccacgatcgtgccattgccctccagcccgggcaacaaagagcgaaactccatctcaaaaaataataataatctggaactaaaattccagatggttgaagcaacagggatggaggcaggatgggaggaaggcatggggaaagtgcaagtatgctaaggtcatgccttgtttagatgagtaattccagacagcaagagaaaataaaaagtaagtttgcagtttttaggtaaggctaaccactagataaataaaaatggaatttatactttcagattgttaatgaaaagaaatttgttaaatcctgggtggggaggaaaattcatcattcacactaaagataagaggcagaaataacaagaaagcgtagggtatataaagcaagatgactggcgtcagaccaaatagctttgatctcaatatatgtgaatatgtttagtccttctatttaagaaacagagactttcaaactgcatttttaaagaagtccacttacatgatttcaagagacatacttgaaacaaaatgacaaaagattgaaaatgaagggaaggacagatgctggcaaaaaagaaagcaagataagaataataataccagccaaaatggaattcagggtacaaagcattgaatgaaaattttcttaccagtacaagaaagccacataaactcatgttatctctggcgttcttcctctttcctaggtatttgacatcttgaaagtgagcatcactttgcttattttgcagccagtgtaatgggactaaccctattgaaaactcctggagaactttaaacgtatttttaaagataaataatccttttagttgtttcctttaaaaaaaaaaaagccagtatattttcatgttagtaactgtttgcattttcttggtatacatgatttattggtaacaatttgtacttctaagccttaaatcgaaatagcacatattggtctggtaaaattgcacacatcatctgctgtggtatctgacattgggctgtggcactgttaaacttttgctatggagaagccagatgaggttggaagaaggttcttttaaatgaaatgctcttgtttccagagactgtgtgcatgttgcctgactcacattcctctgttggcctcaccagtatctctcatcagatagcacgtgccaaaagaaaggaggaacatgaatttactaaaattaatttgaaatttgtgtttgttctatatattctaaatgtttgactttttattttttaaatgtagctaatgctgcctaccttgggggccaagaaatgatggaggtggtgaagagagatgacgaaaccataaaggagcatttatgtaaggtaatcactttagtgctgcaaggggatagataataagtagatgggcagagatacgagggcaaaggactagaactagttagaatctgtaagactttaagggttggtagaatgacatagagttctacttccagttaaaattgaaattatccctgaaagttgtgtagagagtagtaaagctaattgcataataacttatttttttatcacctgtttttgttgaattaattttagaatcaatacttttctattttgtcaatgcattttagcctctctaggccttctactgagaaaactccataatatttatagaataaataatgttggaatataaatgaaacagtggaaaatacattatatgttatatgatctcatgactagtgagcctttcttattctctaatgtgttagagtaggaatgtcctgctctgaccctaagaccagttttgtgaaatattcaacatttgggagttatgctgcaaatactagaatcttgcacacacacatctggaagcaccaatctctgaaactataagagtagggtttagtatatgtctaaggtcaccctagaatttggatgactgtggtactcctgtggcatcatttgtctggctgtccgttctgagtaggacagaactgtactaatattatagccactagccacatgtggttatttgtggctagccttaattgagttgtgccataagtgtaaaacacacattggatttcaaaagtttagttcccccagaagcaaagtatttcattaatttttatattgattacctgttgaaatactaccttagatatagtggattaagtaaaacatattattaaaagtaatttcacccattcctttataattttttaaacattgtaactaggaaattctaaaattgcatatgtaccttgctttatgcttctgttggacagcattagtcttaaactttacaattggtgctgaactatgatacctgctgaaatgatccctgctgagtggcaaactctcataggactcaggagcaatccacaagtgaaatacgagataacccactggacttagaatgtctttataaaccttgatacatttgacttaaacttttctacattgttaattcttaattccataacctcccagtacaattatcttaaaacgagaagtgtatatgttcttaaaattttttttttagaatattgaaaatattcacccagagaggacttttgaaaatgccagtgttgttttgtctcatggccatagtggtcatcatatttctgaaatagcagttggctagagattgaaatttggaaaccagaaggaagccctcactagccgaagggagagtgctggggcctcaggagggccccctctccagggctttcagctacttccagtcactgagcgatgtgaaaatacaagaaaaacagtattttattttccatttaaactgtaagtgaatctgtttcaaaaatgcatttaagttcttccaggttgggagttcataaaaacagctcaactctcagttaataataagactggcagatgctcacttccaaaattcacacttgctgaacaactagacccatcatgtgtcagagtctgctttaccacctgtggaagccagctgctgtaaaatactcatcatttctggattcagcttgtgtgttgtgctcagaaaaaggtcaaagaaaggtgctaacttattcctgtcccaagtgaaatccatatgcaagtgtaatcattcccagatagagggctgttcatggtaattatgtcaggactgtaagtttactgaaattttatggggaaatacgggggtgtaatggtaaatggtagacatttcaaggttagtattaacacacagtcacaggaataaactttttcaactccaggcaatagttttgtttttgagatagcattaaatatacttctagaatatggggaaacaaagcattgtttcatttaatcatgcaaaactaccttgcagttaattcattatcctttctaccagcaaaattcaagctctccactagaataatacaattacagctcctaagtgaaactaggtacagagagacaggaagtttattgcaactttttgtttctgtaataaaaagaggaaacatgctgtaatttaatattggtagaagttgaatcaacatatgtcccagtctgcttgagaaaataaggaaacttaaaagtgcacatagttctaggaagatagtgggcattgcttcctgccttccaaacacccccgataactggtcaaactaaaaccaatgcccgggattagaaatattcctatttaggtatcttaatcgaggatactctttcccatttccacccaaacaaaggcgttcagaaacttcagaactatccaggactgtccagtgtgaatagtcatcaagccacacattttgttgaaaaatcatttcctgtatctcagctattcaactaaaaatagttctgaaaaatatatctttgtgccatccagccagaatgccacaggaaagttagtctaaaaataagctttctactgtatcatgcagacagcattctacttctttctcctccccaagagaactatcataccataatctacaggctttggttctaaatccaaattttctaccactggatttccatttgacacaagaagagagctttttatatgcttgaggaaaatgggcatttttagctctaaaagatctgttgagctgattatcctccttctgaggtccagtgactttatacacagtattggacataaagtaatttattttattaaaataatttttctttcctggagcaaatataacagactcatggttgtttccaaaggagtataccatggtttatggcatcataggttatttctttttcctttttttgtttttttgagacagagtcttgcactgtcgcccaggctagagtgcagtggcacgatctcggctcactgcaacctccacttcccgggttcaagcgattttcttgcctcagcctcccgagtagctgggattacaggtacccgccaccatacccagctaatttttactagagacagggtttcaccatgttggtcaggctggtctcaaactcctgaccttgtgatttaccggcctcggcctcccaaggtgctgggattacaggcatgagccactgcgcccggcctataggttattttgtcatttgactaaatcctgcttgtctagtgtcatccccaagaggccttcccagtccttggttttggttagatgttactccctatgtaaagttatattgcatttatcacacagtatttaaacaatcaaccttcacctttccccacgttgaggtaaggagctgtgtcttcttcgtcttgatgtcccctagggcctagcataattcatacctggtaaacagtcagtaaatatgtgctagacagatggatagatggggacgccattaactagagtgtggattctaaaccttttttgtgccatgcatctctttcgctctctcataaagcttttggattctactcacaatgatgttaagtgcataaaatacacaagattacaaaagaaagaagttgttggataatgagatataatagcagtcagaatttttttttaatttgtaatgataagtataatgttttagttaccttgagcaagttagtgtgatttaaaaatacttatcatttttatagatgacaaaatataggcattactaatattgtagcttgttgcctgtattcctaattgaaagaaatactaaattttggttagagattaacaaaagtaaacatgtaaatttttccaaagtttacataaccccttctccaaacctctggacctgtacaccgcaagcaaagaagccctgcgttagagaaactagaaaaggttaggtagcatgatgttgtggcttaggcactggcctgagaacaaaaagtcatgatatgccacactgaagagactgttttggggagctattgaagggtctaagcatgggagtaacagggtgacagtcaaaacatttgacaaccatgtgatatagggattgaccaatcagaatgtatgccagctatgaacagccagttcaggggcaccagttcatatcagttagccctaggaatttggtgagattaacaaatgagagggattatcttgagggcaaatgtgtggtataatactagaaaaggatgaaatatgagttggggagcctgtttacaaagcttttataagaactaaggcattgggattgaagatggaaagatttaggagatagaatcaaaggtactgagtactaacaggatattggggaatggagatggaggaatctaagattatttctttgtatctggacttggtaataagacagggaatatgggaagagaagcagcagcaagttatgggagatggctgaacaagtggttcattttggtacttgtatttgagatgccagtgggacatgcaagtggatccgtgtctggcaggccctggatgtatgggtgtaaagcttagaaagatatttgaggctgacttttggttggggagtgatgaggctgtagttaaagccaagagcatgggtaatagcagcctaaagaagtatacagaataaggagagaagacttctaatgattgatcattagggaacccagcttaagggttgggaggaagacgaggagccactgaatgaataagatgggaggggaggtaagaagggtgggaaggagaaccaggatgaaataaaccaagggaagagaatcaactgtgcgttttcgccaccccaatcccagtttgtctggaaacctctggagtattctctgtttcatgaggcacctggtgtgtcagaggcaaataagaggtcagcactcccttgttctgtcactgttctaagccataagggatgcatgtctcattcattgaaaagtgaactcatgtttggtttataaacttgaagttttcatttcaaacccacttagggggggaattctaaactgccatgaccacgtttggcccaggcttacggaaacagctggtgtgtgctactgccagactgaatctgagcatcactatcagtaagtaggaatctgaaattgctccaaagagaacacatgaagtgcagctttcagatgaagttaggcagtggtaggggggctgcctgtaaggtggtgctgcccctgcccccagagggccaggccagggctacagtgtggcttgggaaaggggcaagtgtcctcaagaacaggaactcctctgctattgctctctccccatccctcttagcctgccttagcccaaaggtgtgtgttgcctttgggagcaaaccttgtgcagttgtttgcagattggggcatgcaaatccttctgacatgcacatgtcctgcctgctgcagcataggaaatgctccctggaccagctcaccaggcctgcctttccgccaagcctcggtattctgaaacggattgtgttagttctgcctgtttaatttaaagcctgtccagaatgtcataatcatcctgaaaatagataggtttgtttttatctcaatattgtgaccttgaaagctttatttgggcaattgtgtgagcacactctggggttctgcagtggagcctggtgactgaggggaggcaaacgtgctggagagctgggctcccagagtctcagccaagcttcaaacaccaaatccacccttgttcatgaccctgcttaagttaccggacctcactgtgcctcctttattcatcaataaaatggttaataatagtatgtagcctcatacagctattccaaaaatatgctataattcataccttgtaattcagaccttataagagtatctccgccgggcacggtggctcatgcctgtaatcccagcactttgggaggccgaggcgggtggatcatgaggtcaggagttcgagaccagcctggccaacatggtgaaaccccgtctccactaaaaatacaaatattagccgggcatggtggtgcatgcctatagtcccagctactcgggaggctgaggcagaattgcttgaacccaggagggggaggttgcagtgagccaagatcatgctactgcactccagcctgggcaacagagcgagactccgtctcaaaaaaaaaaaaaaaagaaagagtgtctggaatgcactaagcattcaataaatgtttttattactattacaaagttagttatagcctagttatgcttctaagcactttaaaaagactatttgcctaactgttcctcttctcacatccccttttcagatactttcattgtgttaatgaaaggtattagtgatgctgagtatgtggccaagagaccccggaatgcccaatgccattctaaacaacagccaccactccccataagatgcctcaaggagctgttgtataggaaccataatgaggggaaaacacaatagtacttgatttttaccaaggcttgggcccattattctagtccagagaagtctgatgaactggacttagcccttctctcagttagttgagtaaaaccattccagtacatttgcccccttcttggggcacagatccagggaaggacagaaacacagaaggagactggcgctcagggcctcttactttgccagagggcctcgccagaggaaagcagaggccctgggttagcatctcagtgcagtctcacgtgagaaagagacaagccagtcacttgatggcctcgtggcttgtatgtgggagggagaggatcctggccctttacatgttagccacacggaaaggagagtgctgctctgcacaccgctgtatacacagatggttgttccagctactggagagtgagccacacagtgccccataggacctactcctcctttggcgctcccattcccaccgctcccctctgtgcctgcagagagaagcagggttcacgggcgggaagcatttgtgttttcacctccatcctcagccactttttaaaaatctttggagatttcagttctcattttctcaagaatggtaattgagccagttaggaataaacggaagagaggaaacaaggtaactggaaaaactgaagtccctaaaccatctccctttctttagcaattctgcaagtccctaaaaacagaggctcagaaagactgcagtgaaatgttgacactttgcagctgcctgtgtccccaacagggataagattttttaagtaactgaaaggagatgcttatatcacagaatcggtttcctttaacattgcaagattggggcttacatgtctttgactctgaggggaggggagaagtggaagcctgctgctgtcatccagactgtctggactctccccagaaatgggcatgcattggaggacctaacagtttatatcccgagcccgggaaagcttcaaggggatgaaaacaggagataaaggcagggtaggggccctagctgggaagtagggggcctgtatgtgtaggtactaatttgatcccttggtattcaaccgactgctttatatctgaccttttgcttttttcacaaacaatgaaacaagcaaaaaacctgctctagtgcaaattatttcaaagaaggaaagaaaacctggagaaagcaggaatgacatatttttcttagacctctggaagaaaggccaagaagatagatctctctcagaatctgtgtcactcctctttggtcactgtctctagtgctggcttcctggttgccctgccatgcagcgtaagctgccagggagctacagctgttgatgaagtgctaacagaaagccttgcattgctcagaaaagcggtgggcattaccttcactgctgcaagaacccacaggctcaccctgtgagctcaccaggaagaaaagtaactcccagaatgtcggtgcctttcttcatttggaagatgctcaaccaaggatagccaaagggcactatagcttaggctccaggtctcctttatgaggaaaagtaggttttattataaaagtggaagtatagaatccacaccaagagctgactgttagtggcggcttgaggatagggatgtgcttcactgtttatttggttggcgacttatcttctaccccacctgtctttctctacagtcatgtctggggaatatgacatgtacattttttagataatgagtaagtatatggtaaaacaactttgttttatattttaaaaaatgtttaatacttatacattttctgagcctatgtcaaaaacaacttatcagaatagaatatattttctcaaaggctaatgtaaggtcatgtggattctttttccttgagcagggcacagctcccacccacccagcccaccattgcccagtctgtgtcgaggagctccctttgtcctcacctgtaaagcagcagcctttaagagtgcccaccatgtggaaagcacttgatacactttgttttccagtcctcagcactagcccacaggtaactagttctgtcttactttacagatgagtaaacaggcacagggaagctaagtaactggtccaggctcacagcaccaataaatggcagaaccaagattccagtccaggtggatatggctcagggacctgtacagtcttaacactgtactcactgcactacgctcttcttggctgcataaggagcttgagtagtttcacaaattactttagaataatataaatacaattattttaccacactgtgatataaagacattatgagaagccctttcactctcagcatgacacccccagaaatgccgtttaccaccctgctcaggcctgcactatatcacaaaacaggcaccccacaaattgactacccaaagtagtctgtgccaaaggctcatcaagctggatttctcgttggaaacatttcaagttgtattgatgagatatcgtttgtaccaaacttgacttcgtggtgaattatgatttaaagagcttctaaaattcagtttatccataaggttaacaccaacaacaaatatatatatgcaaaaatatatagagatgcaaaactttcattttattagcccttttattcctgtaatgcctgtagtcctactgtcctattgaatagacagataattcagatagagatttttatgtgtggcttttaaaattgttattattttaagatgttgctatgtcattgaaagtgagttttgttattagctaaatcataagatgcttctaatatttctttgttcttactataaatcctctattagtaatgcataaaagcatgcaactccaaatgtatactaaaacaaagctttgttcatgttcactccctcagggcagaatttgggttttcctgctttggggtcccgtagggctttgtccatacctctgtctgcctgttgtatttaagagccagtttatataggtctgttctctcgcctagtctgtgagctgttccagggcagagaccatcttacacacttctgaatgtcagccacttagcctagtaccagatatgggatggaatcagagtcatttttggtggaactcattttaatctatcagcttcagcaattcactgtccaacagtgctgtttgtagaccccccaaaaagtggggaaaaaaaaacacacagaagaaaagacagatgtggggacaagctgcagcaacctgcagggatattttaggagggccctgtccccttaggtgcacattaaacagttaaagggaagttcatctataagcccagagaccatagtaaccataaatccactttcctgcagaaaacacaggaggaaaagccaaagcatggttctggagaatcaaaatctagactgaaaaaaagttaaattttgtgcttaatagaaaacaatgggttacttaacatgacaatttggaaacagaaaaatttctatctcaataatgtatactttttatcaactctcatgagttccaaaacaagtgctaaggataaataaactacaggaaataatttattttcttctaaacctttgaatgtaaacatcctgctgattgcctgcgattctttgttaacaattccagtactttcatggcagttatcacccccatgacacacagtgcctcagaagagctacatagactgtgagaaggctttcagtaaaggtagttgggaaggctgggtgctgtggctcacgcctgtaatttcagtactttgtgagggtgaggtgggtggatcacttgagcccaggagttggagaccagcctgggaaacatagggagacttcgtctctacaaaaaaaaattaaaaattagctgagcatggtggcatgcgcttgtgattccagctaccctggaagctgatgtgcgaaggtcacttgagctcgggaggtcaaggctccagtaagctgagatcacaccactgcactctagactgggcccagagtaagactgtctcagaataaaaaagtaaataaaaataaaggtggctgtgttagctcctgttgacaactctcacactctattagttttcatatccagtttaagacctgccagttgtcaggttttatgtttttataacgggtctatttactggaattgtaagtagtagcaaaaggtacaagttaggaatgttgtctgtggatttgtagcccagctcttcaatgcaaaattgcttgaaataagcaggttaatcttgctaagcctcaatttccttttctgtaaaatatagatacaatactttccttagagtattgttgtgaggatacaacgagataatacatagaaagtgcttacttagcacagagcctggccattgctctcggcccattggttcatcatggtgcattgcgattcatttttgcataccgataaataaagagtatgcactgttaaccactatgtttttggtgtccagttgtttctctttctttctacttcacccctcctcccccatcccccgccagtgccaccacacactccatactttctcattttcctgttcagggctgcaggtgcggagttctccggtcagatctattgcctgtgatttataatttatagggaaaaggaagtatctcaagccagtgtatgtaaaggcattagataaccatgtgttttacttgtaagccaagactttcataggaagccctttagagaatatatagcctgaaaaagaacttgtaaaagaaaacaaaattttacaaaacgtgagcccacccccatcatcagttaggcgtttaaccaaatggggcccacttcaaacgtttaaggattgtagagaatcgagaaataaaatcagataagcatacgggaggtctagactcctcactgttctgctgtcttgaacactgacaccactctttgttgaggttcctagcacatgccttggacagtgtgtgccccataattacttggacatatttgtctcttgataccctgaggtgggtgtcgggtcccttaatccatgttgatcacccctgctcaaatcactgccttaactgcatgtacggggatggtgtttgctcagtgctgagggcttatcaagctggacttctcattggaaacatttcaagttgtaattgcatcacagaaaagtaaatggtacgttcttcatggaaacagtctttgaaatgtcagacagaaagcaacagcggtgcgtacagtgacgcttttcttgttgaggaaactgtattagatgaggtcttttctgtctggctttcctttgagctgactgccattatcataggacttcacactgtagcttgtactggagtgagggtcctagagtagctttctcagggtccagtgatcttgaggcgagagcatgccctgcagcagaggaacagacctgacaggtatgaacccaagtctgactttccagatttctcagcagtgttccctgctctgaggaagtgctgagtaactgcatagcgactgttccctatcctattccctgaatacaatcgaaaagattgctggtggtaaatatagggagtagcttagagagagcctaatgttatcagcactattggtagataattaatacctgcaaatagtttgtactcttgacagtatttcaaggcaaagctatagcagggtagttgctgagagatccggggaaacgtgtttttctactagtggaaagaatagtctcccactggttgtgaggttgcagcattttagagctacagaaagagctgagaccaggaggaagaactaggcaactgctaggctctcatattctctaggaagcaaaagaagttcttactctgctaagaaccatggcaaaatgaattctggctttaggggctttggaatgcccagaaatggttggagtgaggaaaagtaggagaatgcaaagaatgaattaagtgataaatctgtaagttgcaggtcctctgcagcgtgcaaaactggaaccccaggtaacaaccaagaaaacctccatgaagctggaatactatgcagtcataaaaaaggatgagttcatgtcctttgcagggacatggatgaagctggaaaccatcattctcagcaaactgacacaggaacagaaaaccagacatggcatgttctcactcataagtgggagttgaacaatgagaacacatggacacagggaggggaacatcacacaccggggcctgttaggggatggggggtaggggagggatagcattaggagaaatacctaatgtagatgacgggttgatgggtacagcaaaccaccgtggcacgtgtatacctatgtaacaaacctgcacactctgcacatgtcccagaatttgaagtataattaaaaaaaaaaaaaaaaaaaaaaaaaggaaacctccatgaagcaattcagagtaagtctgccacttgaggtttacttgttcataatttactctctggagtactatgttaaattttttcctctataaagtgtttttaactaaccatctaaatattggttaaggcatcatgttattgtaatgaaggccattgttttcgtaagatcagtctcatctgtcccatattcaggtcatggatttaataattgatacactcaaactatccagtgagcaataacgcctgcttccctgcactctcctcccccagcacttgatcacctccaatccttcttctcgttgtggccagagtggttttcctgacatagggacctcagcatgtcacttcactgtgcagtcttttttgccttgtggacttcgggataaagcgcaacctccttggcatgcatagaagatgctgtccatgacctcatccctctctgcctctccagtcttatctcccaccaccctatattccagccatgtggaattccagttccccacacatgccatgctctttcaagctttggtttgcttggtcttctccccacagtgtgctgccccagcttgaagactcaactgaggcatcaactctggggaatctttcctgcctactacttctgaccagctgcacctcacctgagctctcaaattgtcttgtatacatggggtccccttctcccctccccccaagactgtcttatctctattttccaggttcctaatacaaagtaggtgctccatttgtatttgatgaacaaaggaatgagtaagcaattcagtgtctgaatgaaggagcacatttggtatattagggaagctgcaagtgactacagctggccaactaggggctggagctaggcatagctctgtctttcagtgataacagaggtcaaaggatccttaagatttagttcttggtttttgtagaaattgccactatctgttcttctgaatataagatgttgctttgttgcctttatttttagaactaacagaactagaacatagcagtttttcagtgaaacacagcagcctagagcaatatacatatatatcacatgcaggtttaggtagatatccattcagggtcttagtaatgccacagaggaggctctgtctccattcagctgcttgctgtcaattgaagtatgattattgcacttccccactgaatcaacatacaggctgcatagagccttttcttagaaaggtcataaactctctcaggattctgatcacatttcatcagctacattggaaagcctgagtctatctgatctgtgtttgtattcattcaacaaatacatcccatatgactaccatgtggctatttggaaacaactaagtttattaactggtcactagtcattcagtgactatgtctcaataactgtcttcgtcatcctcaccggccttcattccagtgtccatcccaaccttagtacacaaaactttcctggtaagtcgtttcagtgaattatgagtgatctatcacacaagagtctcccagcatggggatcttcccaccaaattcttctaagtgcactcctgtacatcgtgaagccttgctgccttgagagagccacactctggagagagcttagggactagctcccagggtcaggcgtaggtgctgtcctcagagcactgccggctgctggtgtcatatctgtgtcaggaagggaacgtgttttctaataaaaggtttttgtcttgtctttcagcttacattttattatggtactatagatccttggtgtccaaaagagtactatgaagacattaagaaggattttccagaaggagacattcgactctgtgagaaaaacatacctcatgctttcatcacccattttaaccaggaaatggcagacatgattgctgactccctaaaggatgacttgtccaaaatgtaaattggcctgaggaacaagcccccactgccagtacatggaggcagtcagtgtactagacttagtaggtaaatgtttaattttgaagactgatattagaaatgaagaaagtgagaacctttgtcttacaaaccaactctccgctcgccatgttataggctgaagtaaacacagttgatgaatcattccataggtttaaccatacattttccaagactcagggaacacagtgatctacacagagtcttgtgtttgcacaagatgcccagtggcaccatatggtttattttggtaggcaggatctttgcagatgaaaaaaaaatctacatgtacttgattttaattgagttacattgtagaataggctcctctggaggaaattatgaaatacctactagaaaatgtaaaataaatcagtgaatgttaagagtatagttagatatgtgaagtgtatgagattatgacaaggatacactcatgttccaggagcaggaagtgaacctgggtctcctgtaagacagaagatgaagatgagcccaggctaacttagcacagatcttggctgagatcatcaatgtgacgtctaatgtacctgcactagacagagaataaagttcaccagacattactctggtcagctaaccagataaagaattgttgaaggaccccaactgtgcctcctgccacaggacaaccagcaagttctatgctgagccttagcctcccaggttataagctccctgcaggctcctcctctccagagccaggatggagaggcactgggctgtcccaaagcaggcttggatgtgccaacgtacagttgctccttctgtaattcttgcactaaaactccattaaagaccatcaatgagccaaatagtgtgctagccattgaggatggagttcttagctacttaatgattcttttcttctggaaatcttctagtgaataatttttaaaagcttcttttaaactgctcagtaaaacattgccatacattaactctccatttctgcattaacttcatttgctggaaagaaattattttgttaatgaaccaaacccagccattaagttatgtgaattcaccttctctagacacattgaggtatggcagagaagacacatattccctggcctagagtgggctgacaatattgctgcctcccctaaattgactcaatcttgagaaccacatactgcagtgacagttgatcatggatcagaaatattcctttttctcctagaggaaatccctcatggcattatcattccctaaggacaatgagatgtccctccgctcaaatcctaaagccccctgatgaaagatttggctctgatttgctgccaacttattggtaagtgctgaatgagttactgtgctttggcatagcttctacatcacagcaagtgacttctcagaggggaaaagccaagctccagacaaggagtgctgttagcccaaggggaagagctaatagatacataggccgtaagcacagggctgtacacagatcctttattggcatctgcatgagaggcctagaaatcggatgttagaagctaggaatcatggctctgagcgccttgcatacaggagatactcactgatactaaatcaaggcatgtaaacaatactgggtaaatcatacctaccagaataaagagtaacattcagagcttttcttttatctgttattttaaatgttactccatatttcaaaagtctgcacgtatgaaattgtgtcttatttctggtttttagagcctaagaaagatactcattcttaattcctatttatcatctgaaaaccaaatgaatttttgaaataaatgttttaccagcatttctgacctggtctggcctgatctctgtgttgggcaagagagggtacaatttgagcagttctcctgagttagactcggctcaaagtctctcttttaaagtgaaaagccacctttctcattgcttttttcataggtggaagaatcagatttcaagagactgaagttcattctgtttcattagggattagactaaaatggacaaacagtggaagaaatccattttccagaagcagctctgcctgtatgtcccagtcaaccacatggatggtctttgtgaaagttttaacttcctgcagagttaccgagtgctcagcgattgagctttgaccacacccgtgtttgttcctagtctgttcccagccataagcatctccacaagccctctgtggcttgtgtggcctgatgtccatggccaccaagggcctctcaccatacgcttctccactcaacctttggagagacacggaccaccaaaggcttgatttttcttcatcctacattatattcaaaacaaacaggctgggtgccgtagctcacacctgtgatcccagcaccttgggaggatgagctgggaagatcgtttgaggctaggagtttgagaccagcccgtgcaaaaaacgagacctcgtgtctaaaataatttttaaaaaagagcaaaaaaaaaaagcaatttcagattaaaggagactgaagagacatgacaattggacacaacatctgattctgaattggatgtttttgttataaaagacattgttgagacaatttgcacaacttgaatgaggtctgaagattagctgggagtaagatgccactgttaattttctgatttcagtggttgtactgggaagaagtaagagagtgtccttgtttgtactggagacactgaggtatctgggggtgaggggcatcatgtctgtttactgtcagatggttgaggggaaaataatgttctttgtacttgcagattttttggaagtttgagatgttttagaatttgtaaaaataattatttttaaaaccccaccatgctatctcctgca

SEQ ID NO: 1211 - DNA, 43406 bp, Homo sapiens
ttttgcagtctgtccgtggatactgtgaacatcaggctactcggccgggctcctgcgctcagggcttcgagaaatgctcattttggggctgcccctctgccggcctctctggattcagagggcagccgctgctccttttgttttgtgggcctggctctgggcccggagcagcacctccctggggaggccgcctttccttccgcggcttcttccgtctcctcctgaccccaaggtgcctccggcctctgcctccagctaaggacctctggccaagcctcctgcccagggagaggtgaagctgccgtgcctgggtgccccgtggtggccggacactcctggcggctgctcagtcttgcacgtggctgtgccaagcgggccaggcagctgctatttccctcagagaagttgctggcggcgctcagggaaggaagcacccgaggaggcggagcggcatctcagccacagaggtaaagactctgtgatgggcacagggccccgggaggtcctttccacctgccaatcgctgcgctgcccctgcaattccctgtactctgagtggttgtgctaatgttgctcatttggggtcaaggaacagccctggaggggctgccctccgtcaggcggcatggggacggtgaaggttcagcccactgtggccgcacgcggggccttctgcgggcgaggccacgtttggataggctgggcttgggatgggcagctgctctttcccctggacagagtggaacaagctccagtgggaaggtcacaatgggaaaaaagaagcaaagtgaccctcagtatgtggaagagatactctcagaggcagggagaggcaggtgccccgcaggtgaggagctctgcgcccaggaggcttcttgctggatactcgacggcatgatgtgttgaggtgttaaaatgtggcattcctggatatgtggtgggggctgccctcgggtagccaaacccatgagatgaatggagtctgtcccagagcaaaggcgagagtgagatggccttttcctcccgaactccaaggccaggtcatctttggaaaattgtgaagctcgatggtccacctctactcctgagtaaatcagactttcaagaagggcactgtgttcccctcagactgaaaagaatccctgggtctcttgtgtgttctgcaaatgttgagagaattgtggatcgacattccgccagcttctctcactgagctgccgtgtggcacagggagaagtaaggccattttgtgctggtcagagggtgtgtctaatgacagttctgagggcaggctcatatttttatttttatttatttattatgattatttttaaaagacaggagattgctctgctgcccaggctagagtgcagtgacacaatcatagctcactgtaacctcgaaatcctgggctcaagcgatcctcccacctcagcctcatgaagagctaggcccacaggcatgcaccatcgtgcccagctggttttatgctcctagttttaaaaagagacatttacttttcaatgtgttgtgaaacctgtgggtgccaggggcggtgtcctgctcactattcttcctttggcccagggagccgcccgggagggctccggctgtgcaggtgcttccccgctcccccccggggggttctcacagccacttcccaagttaactttggtctcgcaggaggcggctgaaggctttgaactttgtgttgatattcggcaggtctctgtgttttgccagttcccagtgccctgaaagggacaggccttaaccagatttggggcacaggccttgtagagtggccgtctgggtggcctcacatcacacggggccattcttggaacaggcaggatgaacagcctacctgttgggaaggcatgctagctcctgccccaggacctgggctgtggcaggagaccctgaggcctcctgagagctgcaaggccttctccattccctgtggtcacatggggacagggctgtggctctggatattggcggaggctcattgaggcactttgagaccccgggttctcctcagcctcctactgctgattagccacgctgaccaagcccagcccctctcttggccctgggtcccagctcccacgagcgttgggccctgggctgtctcaggtagctgtcccctggagtagggaagggagaaggtggggggtggagaaactcgggtacctgcccagcaaagggggtgcccacctgccctgaaccccagagggcagaaggctcgtgcccagggagatgctgcacctccttcaccttctaggacagctgtcatgtcactctgtggcccagcctcagcctcagagccccactgtcccccagcgaagactaagtgtgtgattcaagccactctctgaatgtccctcagtgatgccatcccataagacctgggaatggacactgcattctcaccttccctccccttcccctccccacttccaactgccgtctcttctctgccccccctttcagagcattctccccccaggggcactgtgtgcagcactctggggagcaccatctacacagaccccagggaggggtgctcctgggggaggcattgcaggggccctgcctgcccctctgcagctggactcaggcccctcactccaagggaccggctcttgacccaaacccagatgcttccctggcctctgcacgcagcagtgtgcacacggggcagtggcgcacctcctccctggagctctttccctccgggcttctgtggcacctcacactctcctgctctccccctcactttctgccagtcccacctcttacccttggagggctcctgactggtacagacaccccagggtctccatggagccctagagttgaaattccatttgtaccaagccttctgcatctacgctggagaatggacctctcttccctgctccaggttcacagtgccccgcccaccatctcccctgggatgcctggggagggcccaatgcaacgtcacccctcgctaacctgcccagactgtcccactgccaccaatatctaggaaagcaaggccacctgcaagtcctcttgactcccacggctgtacattcacacctgccacacacacacctgccccacaaccaccacacctgtgctgaccacgcccacgccggccacacacacacatccagattcccagcaaatcctgttggttgcaaaatagatcctgtgtttgatgccttctcaatgtccctactgtcgcacggcccaaggcaccagtccctcctggacgctcaccatagcctctaatcagactgtccctgagaccactctgtccctcacacagtggccacacagcagctagggacacttcccccttttgctatgaaaaagttcaagcactcatcaaagttgaaaacccagatacccaccacctagattctcccattaatatcgtcgtagactcacgttaccacctctctgtccttccctttacccatctccccatcttgagttcattttttagaggcagagtcatgctatgttgcccaagctggtcttgaattcctggcctcaagtgatcctccctcctcagcctccccgtagctaaggactagctgggactacggggatccaccacatcggctcatcttgatttaaacaatgtatttcaaagtaagttgcagacatcagtacctttctacctaaacacttcagcattgtatgtcattaactggagttcagtatcgtttacggtatttttcttttgaggtaaaatgtacatataatgaaatgtgcaaatcctggccatatattccatgagttttaacaaaggcatatacacttgtgtgacccaaactcctactaaaacattgcctgttaccccagaaactccctcacattccttcctagtcaacccctgtcctgccacctcagggcagtccggggtgtaatagaccagcctgaggcagccaccgttctgattttttctaccacagacaaatgttgcctattctagaacttgatatagatggaaaaggtgctcttttttcattcagtcagtatttctgagattcacccctgctgatgctagagtgttgtgtctgtctttgcttagaactctccatctaagggtggaatcctacttctgctgtggccctgctgctctgccctgggccctctcctttatttcccgtgcccctccacctgccacctcccctttttccagacccactggtcttctttctgaccttgcgtaccccaagctcatgtcacctcagggctgttgcacttgctgttctgccggaatgcttttcctgcagatggctgagggctggctctttcccttattctggtttagcttgaatgtcacctgctcagaaactttccctcacccttcactctaaagcagccaccaccattgtccttttctttgcagcacttacccttgtctaaaatctagtttgcgtatttatttatttgtttattgcccatcctccacctcctgctaaactccatgagagcctggtccatggcttctttctccccctagtacttccagtgcccatgcggtataaatactcttgaaggaacaagtggataagtgtgtgaatgtgtgattgccagctctttcctgcaactctgccctcttggctgaactgtgggaggctggccctggctccttgaagcctctgcatctccagcagggctaagccatgcccacaacccctaccagctgttactgagcttgccctggcccagggatgaggcacactgggagctgcatagggtcctggtttggccacatacagatccgtgtgtgctcagctatcatatgcagggaggcttttgggctaaaaggcaggaatgtggtctcctctgtggagagcatgggcctctggtgtaatgctttcaacttttcatcctctttggttcccacaagaccctgatattcaattaaccgtccagcagtggatttctggtgcacggccccagcatgcctacacctctgtgtcagtaatggtggaaagcctttctccctgtatgagcaggtgagccaagaaattatccatacttaagcttaatcaaccatcaaattacagttaagccgaatcagctgagacacgctcgcaacaagaagtaataactcgagacagtcggatcacctgaggccaggagtttgcaaccagcctgaccaacatggtgaaacccatctctatcaaaaatacaaaattagctgggtgtggtggcatatgcttgtaatcccagctacttgggaggctgaggcaggagaatcgcttgaacctgggaggcggaggttgcagtgagcggagattgcaccattgcactccagcctgggcaataagagcgaaactccgtctcaaaaaaaaaaaaaaaaaaaaagtaacaactgcaaaggcactccacaataccagccacttaggaacaggtgtcttttcccagcttatttctgcaggtggaactgcaggatactatcaactcatctttctgaacggcaccagtttatttgtgggttgctaattcacaccgtcatttctagatcatctttctctgctgccaagaccggagtagcaccacatttacacatcaggccgcccagctcccaaacctcagtgtgacatctgggctgcttccaaagatgagctgcacgccactgtccagctggaaatatctgcctttaggcagggcgggggttttttgttttgtttgtttgaaaatttcctccgaagagattccctaaatagtttatattacccctccatcttaacgcctctaatggtagcttctcagcgcttcattatacagaggcgtgcctggttcccctggaaacctgggagctgggcatttggttttgtcgtttaagaaatatctttcgccaagttagggcgatggcccgcaacgggggatgaaatcggaatttcccggggaaagcagctttgcgactgaagagggacgcctctcggctttagcctccctgggggcgggactgcgtggactcggcggtcccgggtgcctcgggagggagtcagtgcccagatccgcggtgggaactccgggctaggaaagcccgggagggaggtggtctcagcatcgcccccacgcctaccatctcctgcacgcgtttgcggttggggcggcccagggactgcagagggggcgccgggcggggcgtcccggcggggctgtgggggtgggggtgcttgttcgcgtttattataactttactccctttaaaaggaaagctatgcccggaatccaggaggtggcgagcagagcccgggttgggaaggacttgacccgcgcccgccgctggccgcgctccgtgtccctggagctggggctgtgcgggagcggggcccaccctctacctttacccctacttttacccccactcccacccccgcctcactctcacccctccaaccccaccgtcagccccacctttaacccccacccctccaaccctacccgccgccacccccacctgccacccccacccccacctatactcccgcaacctcccaccgtcacctccccaacacccccaccaccctcagccttgacctccccatcccaccccgccccgcgggccccaccctgccacccccgcccacccctctcgcgggcggagcggctcttggccttttttgggcgtctccctgctccgcggcccgggctggcgggcgggcgctcggctggcggctgcagcagcagagggagacccgcggcaaccccggcaacccagggctcggcgtcgctgccaccatgacgggaaggtaacggcccccacccacgcccccgggccggggaggcgggactgcgggacccctggccgaggcgcagctcgccctcgtacagccccgcggcgccacgatccccgctccgccctggcgcgtcggattctcgcagctgccggggcggcagcgcccgtcggggcaggggtcccccagcccccgcgcctcttcctctgggcgagcgcctgcagcggaaggtggagctcctgcccacccgcccgctgcaagatgggacagccgtctgctcacaaccgacgcccagggctgcgggagggggtcttgtccaaggtcagacaccaaccacgggcaaaaggttcaaaggttgcgtgcctcccccaacttccccgagcccgcgctgtgcgatccccgatcccggtgagtgtcatctctggagccttccgtttcctcctctgtaaacctggggtggtaaaaatgttaaaaatgttgaagggtatgttggaacttggccagagctgcgcccaagcaccagctgtgcaggggttggttggggacagggcgctcccctgggcctggcccaccctctgctctcaggcccctcgttgccatttcacagatgaggtcaccagaggccacagaggctgagccactcaggaggccagtcacaggtccaccagtgtccggccagtgtttgtccctgcagccctttctggaacctagctgggtacaagtgcatgactcaggactgggtgggagggggctgtccctgaggccctggtctcccccagccaagtcctggcagggggatgctgttcttcaggatcccatgacctggggctcttggggagccccagcccggagagtgacctgtggctttgctggggaaaggggcttggagggtacagggcagtgtccaggattgcagtctcaaatccgaggcccacaggggagctgcctctgtgatcgccattaaggctgtggcctggggtctcagggcagcccaggaaccaaaaatagcctgtaacttgtcactttgtaagtcctgccctccagacacacttccctttcttctccccaagcctctcttcccagttagctcccctgacttggagtcacctctaagccttggcccaggcccctctgcagtgagatggagggactcatcccccggagagtggcatctgcaggcccactggctgcctgtggtcaccccctagggttctagcggggctgcctcccattttcctcagagcatccctgccagctggctggttctcactctcctgttttctaggaaaagaaagtggggagagacaggaacagggtccggagcagccccagcagcagcattgaggtggaggtgggtgagaggcggttccttcaggcacaggagggatgtcgaggagaacagagccgtgaagggtgcggggctggaatgggaggccccgaggtgccactgctccctggcaagggtcctcttgcccctgagtcccttgggcctttccctggagacggaggccgtcaggtgagcccggccggaaccgctgggaaggcaggtggtggcgagcaggggtcagccttcccttgctgctgtgggctccaagggcctgagaaactcttaccctcaaatgacacagggatgacagtcagcctttggcaggcactgtgtagggcgttcctcgtccaggcaatactactcgtcttagagaataaggagaaacctggaaacataaaagataacagaaacataaagagaaggaaactgccacagttccactcccaagagcctccctttatgcagttcggtggctccccgcagtcctttctcctggagtttgtttgacgcagctgtgagcgatctgagtgtaatgcacccgctccttcaaaggtgaccctgctgcccgcagtgctggtgccccactggcttccctgccttccatacacagggattgggccgggccagtctgtgaggaacagacatccaacccggccttcggagtgggcgagagttttcctgtcccagaagcagtggagtttcatttccaccgtttcatgctgggtgcccttccccacgtccactgttcccatgtgatcccgggcagctcctcgtgcctggatcctggttctctcgggatcccccatgctgcccagagccaggctgcttttgggaaacaccctctctgctcgcataccttcagggcttctccctgccagctctccctaggacctcaccaggcaagagcagagggagggctgtggggagccaccaaagtgacctggagtggcatgtgtggccatgctgtctgcagatgaacccatgggtgctgtgtggagaaagggctgctgggaaggagatggggaaggagacagaaggcagccactagggaggcctctcctgggtggctgagcgggtggaggagaggaggctgactcagggttctgggaggtggagtggacaggacccaactgactggctgtgaggtgggccacagagggtggggctcgggaggatgcccctcctgtgatgacaggtgggggtggatggcatgcttggtgtggttgtggagtgcttgaagagctgtggcaagtctgagggggagccgtgggaggcacctgggcatggaggggctgaagcccaggagtagccagctgggcagggagtgaaggcagcccagagcatggggtggcacgccgtgggaagagagggggctcggcctcagcagcaactcagggactttgcaacttacaaccacaagatctttgactatcacagctgaagggacctctggcatcaccattgttctacagggaggatattaaggccacctacctagggacccagctgtccctggcattcctggaaatggagcctgggatgttgacacccacggccacgtgagctcagtggcttggctgcataaagtggagtcccacccatggtgtgaccgtcatgtgtgtcacatgtgaggctgtcgtatgcctgattgtgtgctgagcccatgcttagtacagcgcagagcaggctgctagatccctgccctcatatccaccaatcttgcccctcctccgggtgaggagtgtgcccggtggtcccctaggcagaaggtgtcggccaaggggcagctgactgcagctagagccctcagcacagcacacgaggctgcagtggcgtcaggggcttaagcaaactgtaaagtgggtaacaagtgatgtggcttgtgatgtggcaccactgagccctgagccccagactgggccaggtggcactgccatggcccctcacctccttcctttttcttctacttctggtgctgactggccccttctagccggccagtggcataatagggatggagggactgatctgcagggtgtccagtcccgtggtgtgatacccccacctgggctcatttcaagccaccaacatggcattaacgctttacggaattcctgaatagttaacagtcagcacttgtgaactggcaagggacagcccagggagccactggggagaggagcccgggctttctatccacagcgggttatccttcttctgtctgtccctatctgtgctgtgccgcatgcaggctcttttttttttttttgagatggagtctcgctctgtcacccaagctggagtgcagtggcgtgatctcagctcactgcaacctctgcctcccaggttcaagcaattctcttgcctcagcctcccaagtagctgggactacaggtgcataccaccacaaccggctaattttttttgtatttttattggagatggggttttaccgtgttggccatggtggtcttgatcttctgacctcttgatccacccaccttggcctcccaaagtgctgtgattacaggcgtgaacaaccgtgcccagcctgcatgcaggcttaaccatcccttaggtcttcacttccaggtgggaaaggggccaagggaggcactgtcactgtcttgcttgttctgttgaggtgtagcgtgtacatttctgaaggtgaatatttacttagatgacttagcaggatgaccaccctagtgagatacctccatgagtgaatgcatatgtcttgctgagatgaggtgactgaatacacatatgaacataaaacctactgtgtcctcacccacgtccttggaggaatacacgggaaactcatggagttgtcttcagcctcccagcgaggagtctggtgggggagctggctctggaggacagcctgtttgtggcatctctgcctctgtccgtctctgcctctgcccactgggctgagggcacgtgccccagggccttggggaggcagccctgcctcatagcttggggcctcagttccagcctctaagaagccatgtagttgcattcttcattactcacgtgttttttaaaatctgagacatagttcacatattattaaattcaccactttagattgtaaaattcagtggtttttcgtgcattcacaaggctgtgcaaccatcaccattaattccagaacattttaatcattcctaaaagaaaccttgtactcatttgcagacagtcctcatttccccctcctcccagccctggccaccagtaacctgccttctgtctctacagatttgtctgttctggacatttcacataaatggagccatatattatatagccttttgtgcctggcttctttcatttattaacaacatatttccaagattcatccgtatattgtagcatgaatcagtacttcattcctttttctgggtgaataatattccattgtgccatagtttgtttcttccttcatccgtggtagacatttgcattgtttccactttttggctaccgtgaataatactgctatgaacattcccatacaagttttggtgtgaacatacattttctccttgaatatatacctaggactggaattgctggcatatggtaactctatgttaaactttttgaggaattatcaagctgttttccaagtaattgaacaattttacatttattaaattttacaccaggaatgtatgaaggttccaatttcccgacatccttgctgatgcttgttattgttgtccggtttagtaggtgtgaagtggtgtcatattgtggttttgatttccatttccctaatgactgataatgttgagcatcttttcatgtatctgttggccacttgtaaatcctctttggaaaaatgtccattcaaactctttgcccattttttaaatcgggttgtctttttattgttgaattgtaagagttccttatttatttgaatactagacacttctcagacatatgatttgcaaattttttttttttaagatggagtctcactgtgtcgcccaggctggagtgcagtagtgcaatctcagctcactgcaacctccgcctcctgggttcaagcgattcttctgcctcagcccctccagtagctgggactacaggcgtgtgccaccatgcctggctattttttttttgtatttttagtagagatggggtttcaccatgttggccaggctggtctcaaactcctgacctcaggtgatcctcccgcttcagcctcccaaagtgctgggattacaggcacgagccaccgtgcccagccgatttacaaatattttttccttttctgtggatcatcttttcactttcttgattgtgtcgtttgatacacacgttttaacttttaatgaaatccaatttatttccttattctttagttgcttgagttttttttgtcatgtttaggaaactattgcctaatcctggctcatgaaatgaaaacatctgttttcttctaggagttttatactgttagcatgtagctatccagttgtcctagcatcatttgttgataagactactcttcgccccattgaatggtcttggcactcttgtcaaaaatcagttgaccacaaatatatgggattatttttggactctcgagacagggtttcactctttcacccaggctggagtgcagtggcaagatcttggtacattgcagtctcaacctccctgggctcaggtgatcctcctacctgagcctcctgagtagctggaaccacaggtacacaccaccacacctggctactttctgtattttttgtagagatgagattttgccatgttgcccaggctggtcttgaattcctgggctctgcctgcctcagccttccaaagtactgggattataggcgtgagccactgcacccagcctatttctggactcttggttctgttctatgggtgtatatgtctatccttacaccactgccacacttacaattttttagtaagtaaattgtaatttttaagtaaggtgtttttttttttttttttttttttttttttttttttttttttttgagacggagtctcactctgtcacccagggtggaatgcagtggcctgatctcagctcactgcaacctccacctcctgggttcaagcgattctcctgcctcagccttctgagtagctgggactacaggtatgtgccaccacacctggctaatttttatatttgtagtagagatcgggttttgccatgtgggccagggtagtcttgaactcctgacctcaagtgatccacctgccttggcctcccaaagtgctaggattacaggtgtgagccactgcacctggcctctttgtttttttttaaagttgttttgattattctgtgtcacttgcattttcatataaattttaggaatgccttgtctatttctttaaaaaaggcaggaattttaatggagattgtattgaatctataggtcaatttgatgtagtgttgtattgccatcttaacaatattaagttttccaatccatgaacatgggatatctttatttaggtcttctttaatttatatcaataatgttttataatttcagtgaataagaagtcttgcatttattttgttaaacttactcctaagtattttattcattttgatgctgtcccaaatggggttgttttatttcatattcagatttctcattgctagcgattctggtatattgagtgtataccttgcagacttactgaactcatttcttatctgtaaatagggtttctttttttgaggagggattcttccgagttttctatatatgagtatgtaatatgtaaataaaaatagttttactcttccttctcaaactagatgtcttttatttctttttcttgtctaactgtccttgatagaatctgcagtgcaatgttgaaaacaaatagcggactggaaatccccctgaccttaggaggaaagcattcattttctcatcactaagtatgatgttagctatgggttttgggtagatgccccttatcaaattgaagaagttcccttctattcccagtttgttgggtgcttttattatgaaaagatgttggattttgccaaatgtgttttctgcatctgttgagatggtcatagagtgtcctccctatattctattgatatggtatattacattgaattttggatgtgaaaccaaccctatgttcttgggataaatcccatttggtcacggtgtataatactttttatagagtgttagatttattgtattttatcgaggacatttgcatctatgtgactttagcattttattttgagatcaagataatatttatagaatgagttgtgaagtattccctcctagtctttcttttcttttgtttggaaagattttgtgaaggtttgttgttttttgttttttgtttttttctctttttgagacaagatctcactctgtcacccaggctggagtgcagtggcgtgatctcagctcactgcaacctccgccttccaggttcaagtgattctcctgcctcagcctcctgagtagctgggattataggcatgtgccaccacactggtgttttgtatgtttgtttgtaggtttggtgttaattctagttaaacctttgatataattcatcagtgaagccatgtcgctctggctttactttgtgacaagttttttggttactgtctcagtctctttacatgttactggccttactaagtgatttgggtaggctttgtgtccccaactaaatctcatcttgaattgtaatccctataatccccacgtgtcaagggagagaccaggtggaggtcattcaatcatgggggtgtttccccccatgctgttcttgtgatagtgagttctcacaagatctgctggttttataaggggctcatccccctttgcttggtatttcttcctgccaccttgtgaagaaggtgccttgattcccctttgccttctgccacgactataagtttcctgagtcctccccagccctgttcaactgtgagtcgattaaacctctttcctttataatttaccgagtctcatgaagttcttaatagcagtatgaaaatttagactgatacatttggattttctatttcttcttgagttcgttttggtagtgtccttctaggaatctctccatttcagtaggttatttcatttattggcatacagttgttcataatattccattctgctacctccttactgggaccacgagctattattattcaaggaagccatggagttagggagcaggaataagggactaggataagttaaaacaacacaaacctcactggtttgtgtttgtttgtttgtttaccaagattcatctgtttttcttgaccaaatgttcctagggttactgaaaacctttggtggatttgcagagttctgaaagagtagattctgataatttttgctaggtttttcattgcttttatggagggatgaacttctggaggtccttactccaccactttctgctgacatcactctcggtgtttttgcaaatatctagagccagagcactgaaccaaatcccatttggtcatggtgtataatactttgtatagagttctagattcagtttacagtatctgtggctcccaatcccatccctgcagcaggacaggctgcagaatgggtggtaaggttgtgcagagatttgggatttgggctcaatcagactctaagcctctctcaatttctagccttcgatgtccgcttttatagtaaatatttgttgaattgattagtacttggtaaacttgtgcttgaacttcatttacagattatgttgcacaaaacacttgtggctgtagcctcctttccagtgctatatgtgacccttggagccctaaataaatgtttcctccttacagaaaactgcgggtctgcatgagagtcctggattctagtgttgaggatttccacatggatgggctgagtcgggagtggtgagagggtctaggccctatggcattgacttgtagctgctgttaagaacattttcggtgtaagttttcttaagcattcggctacctacatcagagagtcagcggtattccctattcattttggctcctctgggctcagcttctccatgccctttagcccctggggccacctttaaaaactatttgttgaactgatcagtgttgggcaactttggaattggactacatttacaaattatactgtacccaatgcttgtcgtcacttgactgccagggtgcttaatgagtacctcctcctgttgggacttgctgggtgagtgtgttcctcagtggcgtgtgggcctggtatctgaatgccagtgagcccctccaaggctttctcccaccctagtttgggaggatcagtgccctgctgtctttagtgacggctgccagctcttgctttcagaaggcagaagaagatactgctcaagctttctgacctttctagaaaggtctttcagggaaatgggatcaatgctaaagatttccatgagtgctctggatctttattgtactgctgaccaggcttaccttggtcacagtttggatgcctaccgcgggtgtttatgaatcacaagtaactttgccagtctctctgggtaaaaatgcggggtacatggtgccttcctggtggttgccaccaggtccctctgcgtctgctcccctggaagctggaggattgccttttctctaaaataaggacctcttttggggtgcctgaccatttgttggccagatccagaggatcggctctgccctggtctgggtgccccacggtgatgtttgtggcagagggtctcagagaagggagcaaagcagaatgtgggcctgtgtggctccggtcctcggtttcctaactgttggcagggatcctaaaggcgccaggtcctccctgtcctcctcagctgactctgccctcctcagtgtgtccacgggcacaggctttcctcctggcaggtggcagccggagacctcctgggtgtcctgccgccactgtggacctcacctcagtgctgtctggggccttcccagaccagtcccctcccagcgggacccaacccccgccagcctcagctttcaggagctgcccccgcggcgcgaacaatatcctttctatttggagttgactctgctgccctttggagatcccagcgcgtaacgtgagctcgcgaccagcgcgggggaggcgcccacacgcccgtcccgtcttggtgtctggccccaggcggccgcgcctcccctccgaggtggtcccatagcccctgcaccaggcggcccgcgcccgcgacctcaaggcggctgccccgcgccatggcggcccggctgggtgcgctggccgcgtcggggctgtaccggcggcgccagcaccggcagagcccgccgccagccacggggtaggtggccaggggcggggcgggtggcggggacaatggccggaaagctgcggcggcagggcaggccttccctcggaaacccgaccggggccctccgacgccgtgggctctgccccggcgtcggatgggccctgggttggcgacagggtgggcgcgtgcgactttatctaacagggttggatgtcacctgtgatcagctctcctggcagggtgcgcccagggacctatgttagagacgagggagcctgtgtagcccccagcactgctttcagacgggggtgatcatgctgcactttatagatgagcagacaggttctgagcagagcagacacctgctggactcacccaccccaaacatggctatgctgtgatttgaacccaggttagactgactccagcagtggggttcaggatggtcctcagggcatctcagagaatgagttggctctggatggggaggttgggaggggcacggggatggtggtggagccacctcccctcactcttggggtcaggggcatgaggaggagctcctgaaaatgttgcctttgcagtgccgaggggccagcggggaagagagagcaatagggctgtgaccttggggtccttggcatcaaggtgacagatagggaccctggggaggaggccaaggctgggcagaagggctggggcgggggggcagggagggagccaggaacataagtcgcagaggtaggggagggcctggaggacccaggagcagaggaaggccagtgccacccagggcaagcatagcccactctcagctccttgtgtgtggtcagggaaggctcccagagtggcaattagaggactgagccatcaaagatatcttttgctgagaacagaagaggaaggagggcaccgagtggagggcgggaactgcaggccggcagcacggccatctgtggagtccctgctgcatgctgggctcccgcttgtgctggcatggcaggtctggggcagcctgctgttcaggtggggacccccagactcaggaggccaagtcactcacctgagtgtggcagagctggagcaggcaccctccctggtcaacctctggacagccctggatgcgtgtggcataactgtggtaccaggctgcgagtggccagggcactgatggccccaaggctgttctggagtgattttcacagtactgataccacagctgagatgcaggcaggacaggcacgatgatgacaggcctggggcagccctgagcatgcatgcgcatgtgactattcacactgtttttctttgaacttctggttcatgtcctttgtcagttctttgttgttagtgtaacatgtttcagttgtacctgcttaaaagaaaagccactagagcaaagagatatggcaagggcttcaaaaaagctctaatttcagacaggtttcatactgatttggagtctgtttctgatggtgtcaatgcatcttgtgtatagcagcccaggcagcatgttaattttttcttttttattttattattattagactttaagttttagggtacatgtgcacaacctgcaggtttgttccatatgtatacatgtgccatgttggtttgctgcacccattaactcgtcatttagcattaggtatatctcctaatgctatccctccccccaccccccaccccccaccccccaccccacaagagcctctggtgtgtgatgttccccttcctgtgtccatgtgttctcaatgttcaattcccacctacgagtgagaacaggcagcatgttaattttctagcgtccccatggtgggctggctttttgtacatttttgttgacctcatgtggccaggtgacccgacactggcctctggctggcttcatggaggcggggcagggaggaagcccaggcagtgctgagggactggagctgctccctgggctgtgctgcagtagggtccctccccgaaaccctctgcatctggaatagtgcctatcagtgcaggtgctcagtgaggacttcgttggaaggaggacagaagcatgggctgtgcttgcaggaatggcctcactgaaccctcccaacagtccctggaggtagctattcctggcccattttataaacgaggaagttgaggttcagagtcctgtgctgcaggtcacacagacagggggcgtcggggccagggttgcagcctggtgtgcctggctataggggacacacccttggtctgactgctgctcaggccgacgtggcctcagcaacacttgctcatcttgggtgtgaccagacttcttgtggctggcccccaactcttcccagatccttacacacacttccttgactcagatatcaggaaggctgggatggaggaaggtctggggttgttgaagaaacagaatccggaatgggggatgccaagaggagatgggaggaacatgagtccaatcctctgtgaccctcagctggttactgactctctctgtgcttcaatctccttatctggaaccagcctcctccccttatacaaaggcctggaacagagcaggctcctctgatcccacctcagactcagggacatcttgcaacaaattggcttgtattggctgtcaaaactgagagccttctggggtgctggagagggctgaggaagggcatgagatggtgtgctctcccccacctctggggtttggcttccaggctgggtgtgccctgggcagtatgttctacgtagtccagctgggggtgggtagtggtgtctcctgggggataactggacagactctgtgctctctatcttgaaggaatgtgcaaaggaggacatggaatgtccacgtctctgaccctctgacctctcgcagggaccgcaggcagcctgcaggccttcccctaggctgagccatgcagagggactctggaaggctcccagagttgctggaaaacaacagttctccttatccagcgctttgccctgcctggcctggtgctctgtgctggacacgtgggtgccattcattcactttggctcctcgatgtggctgtttctctggtgcacctctttacaaaagagaacgtgaggcctacagaagcgagcatctctctccaggtcccaggctggtggctggggctatcacgtgtagagctgagcggctgggcccaggcctctgccggcctctctgtgtcacactgcctctcttcctcccctgcaggagtcaggaagcgtgttctctcatggtgctgtgtctccgttgtctctgcatgcttctgtctgtcccgtctttgctcttggagcagaatgttccctcacagagctgctgttaggggctctctgtgacttgggctggggcagcccctgggcacaggaaggaggtggccacccccacatccgccccccccacccccacctatgccacgctttgtgcgatactgtcggccacaggcagcaatgatctccctggatgcattcagggaccagccgaggaactgcttacagactggctatcaggtctaactggaagatgagccggaaggtagaggagagtgtgtgtggccaggctgctgtcaggttgaccaggtgtgtccagcattggctccttttggtgggttcttggtctcgctgacttcaacaataaagccatggaccctcacggtgagtgttacagttcttcaagactgtatgtctggagtttgatccttcagacgttcagatatgtccggagtttcttccttccggtggggttgtggtcttactgacttcagaagtgaaggctcagaccctcccactgagtgttacagttcttaaaggtggcacatccggaattatctgttcctcgaaacgattcctccccgtcggttcatggtctcgctggcttcaggattgaaactgcagaccttcgctgtgaacattacagctcataaaggtggcgcagacccaaagaacgtgcagcagcaaaagctactacaaagagcaaaagaacaaactttccacaccaagcaaaggaaccccaactggttgctgctgtgggttcgagtggcctggttttattcccttatttggcccctcccacatcctgctgattggtccattttacagagtgctaattggtctattttatagagtgctgattggtcagtttttaccaagtgctgattggtgtgtttacaaacctttagctagacacagagcactgattggtgcatttacaatcctttggctagacagaaaagttctccaagtccccaccccaaccagaagcccagccagcttcccctttcagtgggaagcaaggtaactggggagtgctagttgagggtgtgtttatgaaacggcgagggaggaagggtggtgaagcagctgggctagcagggcaggagtgcccataaccacaaggaaagtcacaggtcccagcagcacctggcccgtgggagtagggtcagcacagctggaagccagagggggcaggcgtgtgggtgcaggccctaaacagcagttcctggaggcagagaacaggagcctggaagggggtgcgagggatgtgtgctcactcactggggtctagaggtctggctttaaggcggaatctgaaaggctggggctgggtggaagtccttaatttggcttcgttttctgggtccttggagtgaggaattccaggcccagagccatgggatttcctgttgatttccgacttctctaagactcccaaggtctcgctcatgggcaggcactggaatgtcctccctgccaccttgggtgtgtgtttcagaagaggaggttcacagtgttctcccggaaggaaaccaagcctgtcctagtgaagccctgcccagccctcgagggtggcttggggcggccaggctccaccttggtggcctgcctggctcgccccgtggagaccagcagggagctgggagcactgaggaccagccgctgggtgccgaggcctcctttcttcttggtttcttcccaactcctgttgccaccatctttgcttccttgcccctctggcctaaatgtgggctcgcatggtggctttggtctcctaagcaccccagagggcaggccaaggtggacagaagcccagcatgcccagaaagcctggttgaatggccttccagacagcctctgccacatgggtccctaagcagagaagaaaggacagcctgggtgcccctttcaagtttccagtccatctccatttcgcagcagcctcctgtgagaccctccgcccacagcccatgcccagaccctaagcgcagccctgtcgtccacccctggactcatcctaaggcccctcttctctgtggttgacactcttcagactggccctgcccagattgcaggccgcagaacagcccgacaggagcctcactcaccaagcatttccctcatgatgtcgcggcagtgactgctgggtgggattcatcctgggaggcagagcaggcggagaggtattcccaaaggcactgcactcgagtcctgccaccacccggctgcaaccaggcagacgttaccagctggttgcgtcactccccagcgagcctgatgctccctctctgcccagtcttccaggaatccactggagttgacacttgagacagaacccacgttctcccttcctagcaaaaggtgtggggtatccggttctttgaaggtcgtagaggcagttggggtgtttaggactacatcctgaccctgtttttgagtctaaaaggcccctcctggctgtgccgaagggccctggggctggactgattgcgggcctggctcactgtgggcttttcccctgtagttcgcatttcacccctcccagaaggaaacccaccactgactctggggacaggcagtgcccagtatggatgagatttgctccccctcaccacactcccgtctcgtctcaaagattcatactcttgtcttttttatttattttttattttgagacagggtcttgctctgttgcccaggcctgagtgcagtggcactcagcctcggcctcccaggctcaagccatcctcccacttcagcctccagagtagctgagactacaggcttgcaccaccacacctggctaatttttttgttttcttgtatttttattagagatggattcttgccatattgcccaggctggtctcgaactcctgggctcaagggatccgcccaccttggcctcccacagtgctctggatgacaggcttgagccattctgcacacgcacccagctaccctcttgcctgctctgtgtttgggtggttatgtgtttattggaggcagtcagtttgaaactaactcatggtgcagaggatggaaccatggaagactgagcagtctggattcaagtgtggaccccgctctgctgtgtgagcttgggcaagttactcaacctctttgaggcttaggtcccttttctggaagaggccataataatagtagctgcagtattgccctggggattaaatgagagtgtgaatacagagccgctcacctgtgctgggtggtgttctgtgtgcgagactctctggtccctgaagaaggggtaataggggcccaagtgggagttgactgggcccctgacaccccaaggggtgggcactacaagcactgagcagcctggaccctgggttagagcgattttcctgatcctgcagagcgtcttcactttttaatacgaggtgtgtctgtcgggcgcaggcccccgcgtgtgccccatctgcacccctgaccagctctgactcactcctcctgtctcctgcccccagcaatatgtcggacgccttggccaacgccgtgtgccagcgctgccaggcccgcttctcccccgccgagcgcattgtcaacagcaatggggagctgtaccatgagcactgcttcgtgtgtgcccagtgcttccggcccttccccgaggggctcttctatgaggtgaggacactactgagggctttctcagacccagctcggagtctgccctctatgagcgggtgggccgggctccatgcagtggtcccgactggtgacagggccaggtctggagccagcccagaaccaggcttgagctcctgcacgggcccatccttcacctgtgagatgtgaacagcaccccaggtgccctgggtgctaacagagagccacctttcaccagcctcctctgggcagatgctgggcaggccctgggggcaggaagagcctgccctggtggtgcttgccctccctggggactagacagtgagcacagcaaccgcatggcccaccagctggtgctgatgccctgggggtcagggttcccggggtggggtgcggtggtgctcagggaaggtgaggtttgggcacacctgaggggagggagacatactgggcagagggcaccgcatatgcacataccctgtggtgggagaacatggggtgtatggagagcagtaggaagactggtgtgatggaagccgagggcatgagagggagaaggccaggagctgaggaaagggaggtggatctcgcttggccccacgggcctctacggagccataggcttcccctctgcaagaggcaggagccacctcggggtgtggagcagaggagtcacactatctgctgacatttgaaaaggtgacctggccgggcgcggcggctcacgcctgtaatcccagcactttgggaggcggaggcagatggatcacctgaggtcaggagttcaagaccagcctggccaacatggtgaaaccctgtctgtactaaaaatacaaaaaatgagcctggcatggtggcaggtgcctgtaatcccagctactcgggaggctgaggcaggagaatcacttgaacctgggaggcagaggttgcagtgagccgagatcgcgccattgcactccagcctgtgggacagagcaagactccatctaaaaaaaaaaaaaaaaagaaagaaaaaaaaaaggaggcttgtggccgctgtgctgaggagaggatgtaaggcggggcaggaacagaggctgggccaggaggctggggggaccaggagctgaattagtgcaatcacccagatgaaagtgaaggggcccccaccagctcacaggagcagtcgttaaatcatcaacaatcttgggagctggttgggcaacagagttattgtttaaaaattaaattatatcagcgtacaatgggatacaattttattaaaaacaaaggtaacaaatactcaaagcataccacttgctaattattttgttccactttactatcgtctatgctgatggggttatttctgtccattgtgctggtgtggccactgcacatctcccctcaagtccacatcgatgtcatgttggcagccaggagttggccatgacgggaatattcacaccatggacactggcaaacgccccacagcagggcctgcctctgcgccccagagagctggctgttgagcatttaccagaacatcacttgtgcttgtggtggcggtggtggccaggggtcagatgctggctctgtttcaaggtagagctgatgggactggctggtggatggatgtggggcctgtggtccgcctggcagagcaagagccgctgttcctcacagtgtcttcagcctcctgaggaatgctgtctaagtgtagaggcagcgggaggggtgggcaaagctctaggaggggtggccatatgcccagaacaaagcctctctctctcacacacagcaggtgcccagaagattttcattgctgaaagagtttaagcccttcctgactctacaggtcactgggtagggctatatccagtttagtctaataagacactcattttagagaacagggaaaaaccaattaaaaaacagaaaatacaattgttagaggaaagcagaggcaggctttggccccgcttgtggccagcacaggggccctcgctggcagctgccgcctggagggtgtgcacactggctcctgctggccgcagccctgagctcttcccacttccccgtgcccaggcccttcctgcgttcccttccttctgtctcctatacccgggtcttcatggcctctgagagagctggatactcccacagagaaggtatacgaaataggaccaagtgacactacacttcagactggatctcatccctcctggcttaaaaccgcctcgcccccagcctgttctccggaccaacagggtccagatcctcagtagacaccagtggccctttgacaggtggcctcacggacctctccagcttccacgggggcacctccctttgcaccccaccatcccaaaagggccagtgtcctctctggccaggcctgggacccactgctccagcctcagcccggcatgcccctgcctcagtgcctcatcccctgctgtcaggtcctgacccaacaagggcctgggctgctcatggggatgataggtggtttgcttgtcctctctctgcgacccctttgcagtttgaaggccggaagtactgcgaacacgacttccaaatgctgtttgctccgtgctgtggatcctgcggtaaggccggtgacagtacacatcctgggctgcctgggaagtgggcagcagtggcggggggcagggggccgagggggtacacagaactggcccagctctttcctaactccccaccttgcctctctgagcggcagccgtcaggccccctacaggcatcaccatcccacgagggagcccatgggccaggcagagagcaggcggagtgctaggtggacagggcttgggagggtccgaagaggggacaggcacgtgctccccagccagcagggacctgtcttcttccaggtgagttcatcattggccgcgtcatcaaggccatgaacaacaactggcacccgggctgcttccgctgcgagctgtgtgatgtggagctggctgacctgggctttgtgaagaatgccggcaggtgaggtggccgtgttgggccagagaggactgggccacagcccttcctggcacacctgccacctctcctgtgtgctacccacttgctgagggcgcagaagggtcccggtgctgcagcctgcactgatgtagctgccctccctccaggtcaccccggggcggatagtccagctcccagtttacagggccccacgctcagcgagctcctggcagcctctcgggagccatgagaaatcctcacactctgccacccccctggccaccccatctactgaccccacctgtccaccttctcctgcctgtacctgtgcagctcagtgtggctggagggagatgcccacatttactctaaattgagggccacaaacctcatgggtactccagaagttcccaccttctgcgaacccttggtctctcatcctcccttcccaagcactgtccctatagcaggtggccttgtctcccacctcccctggccctagctctgagatcccgtgcagcccggcctctgtctgtgagccctgttcatccccacactttctccagggcttgcttctccacgccactctctcgtcctttctgaaggactgggctggggagctgggttaaaaacactgctgggccttcctccccggcttctcccagcacacccgctgcccctcgcgtgtgctaccctggcctcatctgcccagggacccacacctcctcttgacccctcagcagccctcaccacagctgctgaggtgcagaaacgccccccttctggcacccgggaccctgagttcctgtggttctgcccgcccccacagctgcacctgctcactcccctcctctgagtcacctttctccctgtctctccatggggagtcgtctggggctccgtgcccggccctcatggctgcccttgcagacagaatcctagagccctaaatggcacatgtgtctggagaattccaggctccacttcaggcctctctctcgctgtcctcagctgcccacatgtcacctccacttggtgtccaccaggcatcccaaacgcaatgaggcacaagcagtttgggattctcctccactgaccaccaaggctgcctctgcatgcgtcccctgtatcagtgagaggcagcgccgacccccagaggccccagccatgcttcccctgccacactctctctgtccgggcactctgctccctcccgcagctcctccgagatgcttccccgacactaccgagctcttgtccgtgtgctgcccgtgagagaggcacgtggcctggggcctggcgtccggcccactgtcctcggagctgggcggtgcctggcattgagcagcttgtctaaatgaagggctgaggggcagacggtgcagtgcaggggccgagggacagcaccaggagctcgtgctgaccagcaacgtcgccgacagggtgtgtggagcgagcccaatctccttcctgagccaaggtttgcacagggccactgccccaagggctggttggggaaatctgaaagatgctggaaacgttttggaaagtcaaacatgctacaaaagcatgttgccgtaaggacggtgcagggtggcagctagagtgaggaatgagggcccctacttggccctcccagccccacagtgcagaacctcagaatctgggcagatgtgctgtgagctgccagagccccagcaagagagcccacgaggctgcctctgccactgtaccaccacttcaccattcttgggtcagagaagttctgggaaacgcttcatgttgaccaaacataacaacctgtgtagtcttaaagctacagttatatttatggtccgtacaaacaaatacaaaaaaggacatgttagggaaatatctgcacactagcaagggaaatagctcaggcggagagaggcctctctggaggaagtgggtctgggtcagtgggaggcaggtgcacagcccagccctggcctgagctgagctcccgtgactgcacatgcttgtccaggactgggaggcctgggagcctgtcaaagagctctgggggttgcaggcttgtgcgtggggttacagcaggagagatccagaatccagagctgtgctgagtccctgcaggccgtgagtgctgacgtccgctggcaaccagcctgaaatgtgtggcctgtgtctcttcaactcaggcagtgtgtgtctggcagaggcactacagaggggactcagagtaccttgcactgcaaaggagtattgagactccctccccgtccccaccaggactcccaggtccctcttctgggtcatttgcagcctgccttcagggtctttctgctgagcctcgccgatgagcgattctgtagcgggaaggaggctgggagcctagcgggaaagaaaggcctccattgttcaggggttgttcttccggcctcctctctccctgccacagatgaagtcgttgagtgtctaggagccattgtagccatcacaagcccctgcagaggggtggccgatggatcccctttgtcagttcttcctttttatgggttgagactaggcgatctagagaaatggtgggcatctgctgagatttcaggttgcttgctggggaggtggctggggaaagggcagatgcctcttgctgggtctgctgagtcctaaacagtctgcgctcggcctggacggcgccccccgctcacagctctgacttggcactcagcgagctctcgttggttttcccttcgaagctggggggcgggcccttgagccttttgccacagagcaagttgcacagggcgtggcggaacttctcagccacgaagaaatacatgatggggtcgagtgccccgttgaggctggtgaggcaggaggtgatgcggtttgccagggccaggatgcgctgggtggcgcaggaggccccatggctgcggtagtgcagcacgtagacggagcggttgacgtggtagggcacgaagcagaccaggaagatggccagcactatggcgatcatgcgcactgccttggtcttgaggcgcttctccacacgcaggccctgccgcaggctgcggatgatcagcaggtagcaggtgaccgtggtgatgaacgggaaggtgaaggccactgccagggacaccagggcatggtgggaggccttctcccggtacagctgcaggcagaccaccgtgtggttggtctgcacggtctgtgggctcaccagcagcggggccatggccacagccaccaccacccacaggaaggcacaggccaggtgtgcgtagaggggcctgcggagcttgagggacttgaccgggtgcacaatggccaggaaacggtcggcgctgatgcaggtgaggaagtagatgctggcgtacatgttgaggtagaagaggaagccggtgagacggcatgcgatttccccaaatggccagtggttcccagagaagtggtagaccaggcgggtgggcaggaccagcacgcacgacaagtcggccacggccagatgcatcaggaacacgttggccggggtcccggacttgtggtctcggatgaaaagccacagagccagggtattgccaactaaagccaggataaaatccagaaggtagaaggaggcgaacagcatgttctccagtggcgtctcctggccacattgctctgccgtggccagggagaagttggtgatcagacctgggggagccacttcaaggccattcatgctttggctggagtcagagcctggagggaacaagcaaacagttcacaatgagcttgcgatctaggcagcttcacgctctctgaagtccagaagtcaggcctccaatgccttcagaacctcccactttcaagctcagcaccgcccacggggctgctgaggggacctccttgtccatttggtgtgcgtgagcgtcagaggcattctgaacttcagcacaaggcaaacgcagaaccagggcttggaatttcgccgctatgcagctgcacccctgccacccaggagatctgaggctcctcagagctgggaggaccgggtcagtgccatggcggggaatgggacgtgagccttgcctgggtgaggctctgggttttctgttctgcctctgaggtgtgctgtctgagtgacaggggtggtgaggggcgggggcagtgtgtctccgggattccagctcctcctcagcccaagccttggcaggtgagttctgttcatcctgagtgcctggaccctccctgacccacctgcccacaggtgcagtggccggggtgtcaccgctttctgcttcccctgaccatggcttgcccctggcacttaggagggtgcccccaggatggcagcaagggctgtaccctgggacgtcagaggtctactctttttacccacctgagagtttcagcatctctcttgggggctttctggatccagcccaccaactccgtttggacatcctgacaggtggggagacctgtgtttaggagaagcctgtgcctgggtatcaggccagctgggagtattttctctcccagagtagatccaccaccagggggcagcatctcttccaggaggggaagacccattttacccagcgtcagagacactggccagcgctgttgaggacggatctgcagccccagagaggcctggaggcctcgtggcttgcccacgtttgaaggccaagtgcagagccctgtgacagtcctgggtaacaagtcatgtccgtctggtgaaccctgggtctggatagggtgctccccaccctcagcagagaaacccactcttgttttgattttagtcaactcagaagattgaagaaggagagtgagggtcccaaacactctgcctccccaacccaggcctgcgagtggcagtgtgggcaggcggtggggccagagcagcccgcagcccggaaccagggcaggacagcgcacctggcctgcctttgaattggggtcaccagcgggcttcggccaggtgggtgctgatgatggcacagcttctggggctcctctgggcacctggcttcccagtatccaccatccccaccctgcacagccaggctgaagcagaggctggagagaggtttgcataagagaagctggcatcctgcctgtgcccattgtggcagcaggaggggaggaggcacgggccacagccctggcagggtcctcatcctgggcgagcctggctctgcaccgaacagccggggtcctgcctgcagcaaattcactctgcacatttctccctgcccttccttccttccttccttccttccttccttccttccttccttcctaccttcctctctctctcacttcgctttgcttgtttgcttgcttttctttattttccttttttcttttcttttttctttttttcttttctttttccttccttccttcctttcttcttttctctttctttctttttctttctttcctccctccctccccttcctcccctcccctccctcccctcccctccctcccctccccccctcccctcccctcccctccctctcttttttctttttttctttctctttttcaaggtctccctctgtcacccaggctggagtgcagtggtgcaatcagctcactgcagcctcaacctccagggctcaagtgatcctcccacctcaacctcctgaatagctgggactacaggcgcacaccaccacacccggctaatttttgtattttttggtagagacggttttgccatgttgcccaggctggtctcaaactcctgggctcaagtgatcctctctccttggcctcccaaagtgctccttggcctcccaaagtgctgggattacaggcatgagtcactgcgcccagcccctctcctcttactgattccacagggctgtctcaggatgctggtggcacggggcagagagggcatggtgactgttcatggacacagcagcccctcgaggaggaggctggagccatcctcatatggaggagaagcaggcatggtggtggccctagccctagggaagggtgggccgcacccttccttcaggagagcgagtggccagctgctgtggccctcacatggagggtgagggctggcccgagcacctggccatcaatgtcctcaagcaaaggggagggcaactacctaataatattaccttttagctatttctctaggcaggttcccctacctgaaaagattgcccccggcttcagagtgtttcaagatgcctgaagttctaacaccagagatggtttcctgctgcttccaggaacagggtctgttcttagtccaatgtggagttcctcatggggaccccattccccaggaatccaggttccacagtactctgacttggtctggctggtctcggctggcactttccctaggactgctaaaaccacggtgagggcggagagctgagggccgaagaaggcggggtgagtgatgcttgggagagggagacaggcttggctgaagccctggggaagggctgagggctgtgaagggggctgtggaggagaggtaaaaggagggaggaacacagcccttgacagggcctgtgaggcaggggagaacagggagcaggtaccggtgggacggtggcaggggaggggggcccatgactttgagggtgtcgtgttgcatgtgctgggggtgaggacccggagactggaggaacagggctccagggcagacgcatgggcaagcagagaggacagcccatggtagatgggaggggcacacaggtgtgctgttttcaggttggcaggagaggaggaaggtgtgtgcggggaggccctggagactggaagaggagagggggcccagtgagtgaggggcccttgttagaacctgggggtgggaaggggccaaggtgggtgccctccaccccaggctgtccctcaggcctgtgctgtgccccacagtgcaggcatcacctggccccacgagagagcagctcataggtacgactgaccactctgcctggcatggtgggggcctgcctgtgctggctcaaaccagttttagccccatgttgcaggttagggagtcaaggctgagtgtctgctaacttgtcttaggtcacttgaccaggggacattggccctggagctggaagtgagaccggggaaacggtctcactccctggaagaccgccagggtggggagtgtgactcagtctcagagtttgccatggagttgtctcccaggctcagcaccccctcctggccctggggccactccctcattttaggggcccatgtatgaaatgagaatgtgcagccccttgctcaaaaaggaagagtttcaggacagtgacggcagagtgttactgggctcagggccctgagtgacggcaggggtggcatatctcatggcaccaggtgggcctgtggtgcctcctgcctccagcccgggggcctcagcctgggcactgccctccacttcctgcccgggccgaagggcgtgcccctcgctctctctgggactgagactccattttaaacagctttctggttggtttcaggtttgctgaggtttcttctccctttctgtcccccgtttgaggagttctgatactgattgttgcagtttggtctgagatgggccccgcttcactctctgttgccctttagaaacacaaacttcagtctagactcgctggttcctcacgactcactggtcagacggccaccgagccggtgtccgtaagaggaaagggcgtggcatgggccggggcctgggcagtgttgggtcccgtggctgtgggtgagtcgagcatctaggacaggtcataggcctctgtggaggtggcaggtgggcatgtgtggcctcggggagggcctgtggtggcagcgccatggccaggtggtggcagtttcctttgcattagcgccactccatccctggcccgagccctctcccaggcatctggctcctctatgggtcaaggctgcctaatggttaggggcagcggtgctgtcattgcagcctggactgccggcaagccacttcccctctgcaagcccccatcagagggacgaaacaccgctttgtgggctgctgtgaattcagactgtggtcagccttcgatgcacaggtcagaccatcaccaaagagatgggacgagacaggctgctgcctgtctccctgggcagggctccccgctgagtgtttcctctgcttagccctgggctcccagtccaccccacccagcctgccccttacctctagctgctggtccgggaggaagggacaggggtctgcggggcagcaggtgatctccgcccgtgggtgtcggtggtggcagggggctccttgccgctgtgggtggaacgctggctatttaaggagaggaagggagaccacagcccctctggccctgaaaggctgcttcattcctgaggggtcccttgttgtgtcgggctgctcctctggctgctgctgctgctgccaccggagcgtgaatattctagtgtgtccctagcccatgccccccgcccccagcttggccacatagtctgagtgtgtgactgtctcagagactcagagcaggcgggggctgggtggggggcttgggctggagctgagggacacaacaggacgtttcagaaggggatgatttcctactgatggggggcagggaggggccggctgtcatggcaacaggcggcgctcccaggcctgcgcccgcagacggcggagggggcctgtgaacggagggtgggaggccgaggagtcttgctcacggagtgagaggcgactctttgaggacacttgctgtagggtccttgtgtcctgccctgtataatgaggccccatttgggcacacagaataaatcatggcctttatctggagcgaggaacagctgcaggagcctcataatggggcgctgtcctgtccgtgaggatgcggctcagctcagaggccgggtgctcgccggtgcagctccccttctgcacggaagcccatgaatctgaccgctggcctggggctcctccctggggtggctccgggctggggtgcctttgaatgctgccggcggccgcctctgagactgagtgaacaaagttcatttctctctgtctttctgaaaatgatacatccagcaacatgggaaaccaaatcacccttcctggtttcaaaagactttacattttgttgtttaaacattgaaaactgtatgtatgtggctagcatttaaggggcagtgtcttaaatttgtctcttcacatcaccctgtgcagctgggattattgccccattttacagacaaggaaactgaggctcaggcaaatgaagaaactcacccatcaacaaacagtaggaagcaacagagccaggatttgaacccaagcacatgtcactccagaacttaggctccgtgtgtgtgtgtgttttgtttttctgctgcattttgaatttagaattcttagatttgatcctaattcaacctgaaaaagaattctgaaggccacctttagatctgatgctgtgatctggtctgttgagaagctgtttcccatctggacttccttcaagagagatgggcttcccagtttgtctggcctgagagccagctgggtgtgaggtgtctgagccggggcgcaggtctctttcctgttgtgcccgcaggcggctgtctggaagaactggcccaggctggttggaaaggtggtggcttgaagctaaccaccctgagcagggcatttctgggctcacagaccttctgttattggggtgatcactgtcgatggcttcaagggcattgaccgtggtgatggagttttgaggcgttgagctgattcctgcatctttgagacagaaataattcctcgtgggttgagtgttgtcctgacgctcaggaggagtcaccagaatgtggagtggggtcatggggcctacatgctgagtctgggacagaggcaccgcagggggcatgggctggccgccataggcgccaggtggggcagctcagccccagacctgctgaggaggtggcctggggttggggctggggcacaggtgtctgggcaagggtgggcttcagggattgtggtgatgaagactgaagccacaggccacaactgcttcccgtcgctggggtgtaagagccagggctctggccagtagtcgaggggagatgatgcccaccgaggctcccttcctctcttgtagagtcattcattcaccgaggcattcggtcagctgaccctgagctgttgccccctgctgggcacatagggtcttggggaggcacagagagccagtcggcagcttagccagtgactgctgggcctttgtttgggccccttgccctgcacacagctgatgatgagacaccccagggcagatggagcacagtgctgtgcaggatggagtccagacacccagcagtagcaggtcctggggtccagggagggatgctgaatgggtggccctggcatctggggtctgcccaccataacctgggtggggatcttgggtctgcgattggatctcttccgtatcctccctgaccagcctgtcagaggggccaacactgggcgtcgggcagccgtggaggctcgtgaggagtggagagggcccctggggctggggggcctgggaagggaggcctggatgcagcaggagcaccagagagagattcgggtggcaggtggagacgggggccagggaggttggattggggcctttgtgtatctttgcctggggactctgaatctagattcctgccacctttgaggtccaaggaaacagaaaccatgttgatttgtctctccgttgagaacacagctgtcgtccaacacagcgagtagcatcagaaattattctgaggtcttcacaaaaagactctgtagtgacagttcctgggtttgggggcctccatctgacatagcagtgcttgtctttggagacagaaatcgcctgtacgtgtttgggcccttcttcatctggcaaaccccgaaggaagggggtgagtgggcctcccgggacactcactggccactctgctgggcacagtgacactcattataactcgtgtgtgttaaatacattgggaaaataatgctttcagcagatatcaattaaatgtctactgtattctgcagcatgccccaggcttagagaaagtagaaagaggaaaataccatccagagacagtaacctcgagcattctggcatctttcctgctgagcatgcgtcccattcccaggacacacttgtgaccttctgggccttgtgacagggcagtctgctttcccataccctgggctgagcccctttgaagcccccagctgctcagtgaagttgcaggggtctggcctctcttctcctggaggtggccaggctgtgtgggagtgggggctctgcccctaatgcccccgcctcccgcaggcatctctgccggccttgccacaaccgtgagaaggccaagggcctgggcaagtacatctgccagcggtgccacctggtcatcgacgagcagcccctcatgttcaggagcgacgcctaccaccctgaccacttcaactgcacccactgtgggtaggtgcgcagcccggccctgcagttgtgggggcggggagccagggctggcccagggtaagggcggtggggcctccacctggggaagtgttgaggagggagaggggagcagggtgggcagacagaggggtcccgagagcaaggctgcagggcagaggtgggctgggggctgggaagcagccatggcaggaagcttctctctccagggctctgtttggggggcacttgagactcaggaggcgggtgggctggacccctagactgcagacgagggttgagatggagcagtggaagggacctgagggggcagggcaagagaccgggagtgggcttggtgctggtgttggagagaggagttgcataggcagcccctcagcccccgtcctcgcccacccccaccgtcccctccagtcctctccgtgcctatccagacaccccctctggtttggaggaggaggggggcccaagaacagacctgcttctcagaggcctgggtgcagaacacagcccactcttctgggctgtgcaggaagtctgtgctccagggcctgtctggggcacaggaagtcttcaaagtgcccagagatcagaaggcgctgccgcctcggctctgcagggacagaatgggcccctcggggagccgtgccctggggtggaggcgctgctggcatgaccctgcagaagggcaggggtggcacctgggggctgcacgctgtcttccaggaaggagctgacagccgaggcccgcgagctgaagggtgagctctactgcctgccctgccatgacaagatgggcgtccccatctgcggggcctgccgccggcccatcgagggccgagtggtcaacgcgctgggcaagcagtggcacgtggaggtgagccaggctggtggacacgtggcctcaggttggggggtgccccagctcagggtcatggtaagagccctaaagctcctccacactcccagcccagggcgggtggctggctcccaacgaggcccttcctcaggggtactgcccctccctgtgctcagccagggaccccagcctgcccacgggagccaggagacccgagtgcacacacacggttgggtagctgtgcccacctctcctcttccccctgctggcattctaagagactccaaggtcaggagaaaaccttgggggcagtctgtccagagtgcctgggggttgtggatgacagaacccgctgcatggacagccctgtgcagacacggagctgaagagttcctcaggtgtgagcactgggtcacctggagtgcccccaccgggtggtgggctctcatgttctcatgggtacactgggaacagtgagcccaccacctcccctgatgacctggccagcgctgtgtccggaagctgtgccttgggtggcggcttgggtgggaggccatgcggtcctgccctgatgcaggccccagcccccagccctcatcctcacatgcagatccctgggggaatgcaaggtgctgctcagtgatcccaggcttgcagggggtgcctgcaggaggccccacgtggacaggcagggccgcctctgcctatgagggcccaccatgccgcagcaccaggctggcacctgactcctggggctgaggctgccgagggggaggccagactgggaggggatggtgactcacaaggttaccatcagtgccttagaggaggggtagggtctgctgaccccagggcattcacagaggtgtcagtcccctctgcccagtgtgaatcctgaaaggcctgcacctgcccagactctgctttctgtccccttctgtcactgctgcctcctggggccactgtggtcccctggagtcactggctcctggggtcactgttgtccccgggtcaccactgtccctcggggtcaccgctctagccctgatgccacccggcccgccctttgtccttgcagcactttgtctgtgccaagtgtgagaagccattcctggggcaccggcactatgagaagaagggcctggcctactgcgagactcactacaaccaggtgagcccggtgcagaaccttcagggatgcgggtctggaggggtggccaggagagctgccgtgagcaagggaggctgtgggcaccccctcaggagctctgccaggtgctgagcccaggcctgcaccctcagccctggctcctggcctggggtctcgagacctgggcagctctcttcagtctcagtgtcttcctttgaagaatgttctggggctggtgtgaggtcccgggcacatggggctgacagtgccagcaaccccctccctcccttgctctggtacagaaggcagggggcgctggtgggatgcagtcaccacctgggcccacctccttgcaggacagcagtggccagagcagaggggccttctggggagcaacgccccagcctgttgtccttcccggaagggtggttctcatgggttgccgtgccctcaacccagccttgcagctgggccctgggaggcagggcctgggagatgcctgagaggggccgtgttggagggccaggctggctgcatgatggccctgggctggggtgtgactgcctgcagctactctgacagcctgctcggcccacagctcttcggggacgtctgctacaactgcagccatgtgattgaaggcgatggtgaggccctgtgttccctcccccaccccacctgctctcctggggcctgggtgctgcagctgtgagcccagccgggcctgcggcagcctagccaggcctgctgagtcccacgcttccctcacagtggtgtcggccctcaacaaggcctggtgtgtgagctgcttctcctgctccacctgcaacagcaagctcaccctgaagtgagtccctgtgatcgtgggatggggctcagggtggagggggctcctgcaggtccttcctctcagcagccctcctgcacaccagctgagtctggcctggggatatggtggggacaaggggcagcccggccttataccacccagggagatgggggcaggttcagggggtctaggggatccagggaccccagggaccccaggcacagtgagaggaggaggaacactcatgcctccaacacacctgccagaaccctgggctctggggagggaagggcattccagctcagggaacagcatatgcaaaagcagcagtgtcagctgctcatccaggaagcctcgaggggtgtgggatggctggagctgggagaggagagatggcgtccaggtttccaagggctgtggggaggcatagagggttctggggtttcagaacctgagagaagcctctgggaggcaagggaagcctcaaggcccttctcatccctatgctctctggccatctcaccctagggcctggcctgctggctaggagaggctggtgtggggaggctgggggctgagggaagcccactccacagtcacctgtctggggttaaaggggtgggcgtggggctctgctgacagctcagcttcctcctcaggaacaagtttgtggagttcgacatgaagcccgtgtgtaagaggtgctacgagaagttcccgctggagctgaagaagcggctgaagaagctgtcggagctgacctcccgcaaggcccagcccaaggccacagacctcaactctgcctgaaggccctcttgcgcagctgcctctcggcccctccgccttctcccctcctgctgtccatgcttggccccctcgtccccatccacctgtgccctccgcatcttaccctccctttctctttcctcattgccttctcccttcctgttccctcatctctgccttccccatgtctctcctctccttggccgtggcttctgtctgtgaggaggcaggagctggggagtgggagcctatgaccccacgtctgacagccatgtccacctgtgcccacagcttccgcccacagacctccagggacaggagcaaattgcaccacagctccccgcctggcctggccctccccaggcggctcagtggctcatgctgtcctgtgagagcccctgccccagagcggccccactaagcgcatgtggctcctgggctacccacagccagggcagcctgctggagccacagggccagggccatgcagatggaggcctctgggagccacctccaatccctcaccactcactcaaccagtggcacagtgtccttgtgcccacactgagccagcaagtcctgctgtccacacccacaagctacctggagggacaggacccacctccatccttcggaaggccttcctggaatcccaccttggcctccgccctcggttccgccccgcccctctccccccgaccttggggcttgtgtcgagcccttgggtggggccaggaggaggtgatggcgtcagaggaggtgtggtcagaggtgacttgttcccacctccagggaggacgcttcgtcttcggccagcgcagacctggtgtttgtttgttgggctcacgcttgcacaatgaaggcttgttcacacaaccacagcagcctgcgtggtttgtggcgggggtcgggggtggaggg

SEQ ID NO: 1212 - DNA, 83013 bp, Homo sapiens
aaacctgtctaattggggcggggagcggagcttcctcctctgagggccgtgccgcgctgccagatttgttcttccgcccctgcctccgcggctcggaggcgagcggaaggtgccccggggccgaggcccgtgacggggcgggcgggagccccggcagtccggggtcgccggcgagggccatgtcgctgttgggggacccgctacaggccctgccgccctcggccgcccccacggggccgctgctcgcccctccggccggcgcgaccctcaaccgcctgcgggagccgctgctgcggaggctcagcgagctcctggatcaggcgcccgagggccggggctggaggagactggcggagctggcggggagtcgcgggcgcctccgcctcaggtgagctcagggccgcggcaggccgggcgcgcgggtcgagcggggtgggctgcggtggggaggtgggggcgctgtcggtggggctgagcgcggcgggggccgccggcgtgagtgagcggaggtggggaggacttcggtcattgaggcggagcggaactcagcagctccccggaacgcctggggtttgagagcggggcccagggctctggagggtggaggcaaaagtggcccagcggctgcctcgctccctgttcccacccccgcccctggtgaaagggagaagtcgaggttgaccccggaggatagtgagagaaggaaagctgtcaggggacccctaggatggggcagtcatccagaggacttaaaatgcaaaagaaagggatgtggacactgctctgggagacctaaggaaggctgggaagaagcgcaggcgaggtgatgaatgcagagggtggggtgcaggaattcatgaacattttgcaaggtattgggaaagactgacgccgaactcatcatctccctccatcaaaccaggttaccacgttctcttcttgacttcaccatgaacatgaaactcgaagtaaaactattttccttgttaggtttggaatggctgtattagggttcctgaagttttggtctcgagactcctttaccctcttaagaattattgaggaccccagagagctcttatgtgggttagagataatacatacatgtaatacatactgatatttaccacctttgaaattaaagctaagacatttaaaaaatattaatttatttaaaaagaataacccattatatggtaacagaaataatactttcgtggaaaaacaaattttccaaaacaaaaaagtctattagagaagtggcattggttttcattttgaagatctctttaatgtcttggcttaatcacagagctggattcgtttatgtgcttctgcattcagtctgtcgcactattacaggtcacagaacgctggaaactgcagtgtccactcctgaaagaatgaatgaaaaagctaaataaagtcttaatattgttatgaaaaatctttatgaccttgtggaccccgcgaaagggtctcaggaactgcactaggggttcccagaccccacttagaaccattactttataccattgttgtaactttggcctgcctttgaaccccttagcagttttttgaacttctcaaatgacaaagatttgtcttacagtataattatttgtacacatctttataaatgccttaagaacaaaaactgtctcttaatattctgttatgtatagaggttagtaaatacttgatgagaggaaagtcattcattcaaaatggtatttattaagtgcttattatttgctagaaattttagaagataaaaaactaacaaatattcaattcctaatcataagggtttatccaggaatggactattatttggggacctttacaataacatattaaatgctgtgttgggtatgaatgataatggatttttatcttttattgaggacatggtatgtaccacaaaatatactaaatgtttacatgctgctgctgctgcttcattcttctttattcttcttatttttgcattatcttttttttttccgagatggagtcttgctctttcgcccaggctggagtgcagtggtgtgatcgtggctcactacaacctccgcctcccaggttcaagcaattctcctgcctcagcctcctgagtagctgggattacaggcgtgcgccactacagcccgctaatttttttgtatttttagtaaagacggggttttgctgtgttagccaggctggtcttgacctaaggtgatccagccgcctcagtcttccaaagtactgggattacaggcatgagctaccctgcctggccacattattttcttaaaccctcctgacaactcttgtttcagagtttgggattgaggcaaaggataatagtgacttgggattattgcttgtgcaaaggagtaatgatgtgaggagggaataactagcaaggcctagcagagaagtggcataatttttttctgttctaggaaaaacacgttgggcttttggatatgcaaaaaaaacaaatacaaaatattgttatgctaggtacataaaattttgaatttctggacttaccataatgtaaaaaattgtctttgggggcagatctccagagtattacggtgctaacgagtactctggttagggaaggttctgggcttcctgaagaaagccaggtatggaggactcctacatggccatgaaggagagagaagaaagtcagcaaggccctgccagggaagaagcgtggctgctggaatccaaaagcagcggatacttgatgttgggtgttgtgttttcctcgcctgccttcagtcagtttttgttaaaggctacaaaatggtcttagctttgtttgggggaactaaaggaaatatttgaggccacttttctgtggagtcacacagagagaaggggacagttgcctaacaagaggtggcaagcacaaagggcatgcagttgtggaatctgagaatttggggtgggaagtctgatgagaggcagatgagtttcacctgtctttcaagatggtaaagattagttttgaggaggttggctggggtgagaagggttggagaatttgggaacgttaagctcatccctatggagatcagaagaattaaacggactttttttcaaaaaacagcactgggagcttgggggctggacagtgaagcaaggtcagctggggatgcttactctatttaagacaaaaaagttattgtaaagtgatttcatgctgttgggagaagatctgtgatactagaaggtcctaaaggtattttttctctggtgccaaagacaggaattatagtgtgagtgtctagtccgtgtgggtgacaagtcccacgaggctgtgaagtgctttcttcagtcactggatctgcagccctagaatctcgaaatgttgcccattctgtttctttttcttctcttcacttttttttctgacactttacatctttcctcaaactgggtgaaaatttaataatacaaataagtaaaccacaagaaaagagcccgttcaaactgtctacaagagattagaaataattgtaaatgttttcattgctgatgactcagagtaaatccttgttgatagcttagttccccacaaccatgtacatttgggaatgtgctatagtcagacccggccctgattccattcaagactgacctggacaccctttgctgttagtgtagatagacacagactctgagggtcttgcccaagctatgtaaattctttggtggcatggaacatctgagccctaaggatggcagaccttccaggaggttctaaatgctgcctaaaattctgttaagtagggagcttagaaatggggctgtggaacctggaccatggaaaaacagtcattgcatacctgctgagtagaaggtgcacttttagctgcagaaatcctgctttcatgcagtttattataggaatgagaacgtgtaaaaggctctaacagaaggtttcctcccagcctgggaaacatactgagaccctgtttctacaaaaaaacaaaaaattagccaggcatagtggcacaggcctgtagtcccagctactctgcaggctgaggtgggattgcttgagcccaggagttcgaggctgcagtgagcctcaacaattattattgaaattcattcagtaatcattcatttatgaataattaatatggacaagacagaattttattgatttaggtattgtcaacctccagcatggtcgacagagaagaccttgtctctaaaacaaataaactaaaaaaggtttccttctcgccctcttggtcttatccttcagtcccatgactttacatttatttgggttgattactcctaatttctatttccagcccatttctctgctttgaactcctagattcacgtatgtaaacacttgtttgccatcttctcttgaatgactaagacacgtcttaaatataacatgtccaaaatttaacacgtcttcccttataaacctctttctttcagtttctgcaccctctggttgttcagtccaaaaacttcgaattcattcctgactccacttttacacacaaatcgtttttgtcagcccatccttcctgctgtaccttcactatatatatgtagaatccaatgtccactgctggcacgctgggccaagccacgttgtctctcaactagattattccagtagccacttaacttctccctgttttgctttgctcccaccccagtctgttaccaatatagcagtaagaattattcttttaaaacatcacatcaggtcttattcctcctctgctcaaaactctcctattgtggccaggcgtggtagcctcacacctgtaatcccagcactttgggaggccagggtgggaggattacttatgcctaggacttcaaaaccagcctgagcaacatagatagaccccattaaaaaaaaatgccaactctcctattgtttttccatctcagagtaaaaacaccattagctaccagttcactcttcaacctgatatcttcttgtctccatccctctctactctggtcacatgtgctttcttgccttcctttggacacagtagtctttgtacttgctgcctactcaggctgagatggtctccacaggtaaccacatgacttgttcacctcactgagctcttctctgatcataatatttaaaattaccctctacatctgctcagtgttacctgtctacttgcgttacctccacaacacttaagaccattggttagttggatacatacacaaaaagatatctctgtgtttatttaaatttatgtctgtacttctctagaatgaaagatccaggaagatacagaattttgttttgtttgctgctgtatcctcaacacctagaaaaaacagtggcctattttaggtgatggagaaatagatcaaattaatgaataaagattccaaatagtaaatgtaccaagaggagaagcagaagaacctaaaaacagcattatggtttgtcccctaaagggtgtataatacattctatttgattatatatttttttaaagataaaaatagagatatttttaaaaagtaaagtacatttgtttcagtcataaagcagtttttaaattaaatcaaaaattctaaattaggactttcagaaactacttcaaagcacactcttacaggaatgtaacttaaaaaggaaagaaagaaaagttaggtatgtataagcatcatcttagctgaaagccagtgcccatacggaaaatcagtaaaaacaaaaagagatacagagtcttctttttctcctgtgcctcttgtaatggaagagaaatcatctgtacttcaatttgatctttgttcttttgggggggaaggaaagccaagtgtttttaattttctctatatcaatatagacattaattaaagcatcacttggttgcatttgatgagatggcttcttaatttcatttatcagatcctggtaaacttctgaatcataaaaattatatttagcatacagcatccctatttttacaaatctcattctaattatttacaaaattagtaatccttgtattgtttctaatacaggttctttcacttgggtatttcagaaactagtaaaataaaatttcacaaaataagagcactaacaggcagcttcacctttttatgttttctgtcatcatagtcaccattgtttcttaaaagaaagaacactttaacacctaaaaatggaaaagacaattttagaataaaagacagctttattgtccttatttttatcattttaccttggactgcagattgtgctgccactggtctacagtccagaatttgagactggttgacttgtgatatgatgattcacatttaacaagaatggcatattgaatataataaaattgaactaggatgcttagaaaagaatacctagtaaatatagtgatcacaggaggccttagaggacattttcaggttaccaaaataatagttactcaaaaaaatgtttaaggaaaagctaaaattgtttcagaaataagcatagttaagaagttagctttaatattcttttaatatccccatattcttattgcataataagagctaacctttattgaatgtctgttacttgccaagcactgtgttaagcacttcttacatggattagctatttaattctaacaaccctatgaggtagataatattactaatgaaattaatttgatcgtatacattttttccatatgaaataatcaacattatcactgaattttaaatcttgggtaacagtataaatgctatgacagcatcttcataagactactcaaaatgaatgaggattaatatttcaagcaataaaatagtttgctaaccttgattctgtcacaccctggcactattatgtttcacctcttgcatctgttcaggctttcagccttgacaattatgattgaaattcattcagtaatcattcattaatgcataattaatatggacaagacagaattttaggtattgagggattttatgtctgcgtgtgtgtgtgtatacacacacatatatgtttaatatgatggggtttctgttttcaaggagtttactataatctagttggataaggcagcttttcttcatgctcatgaagaaaagctcaccgttctaaggtgaaattatgtgagataaaacatgaaacaagtctgcacatgactgcttaaggcccaaatccaggctgctacccgtttcatatagcccatgatctaagactggtttttgtattttacgaattgtaaaacaaaaaacaacaaagaagaatgtgtgatagagactctatggcccagaatatctaaaatatatccttgctggccacttagaaaaacagttgtctataaaataagtgcagttaggagactgtgtctataaagtgtgtttggtggactggtgtggtctaggaggaccttgtagagaagctagagttaatatgggactgtaattcaaattggcaggaaaaggagcaggatctgcaaagatggatgaggtgtgaattctacagtatatcatgcagattatctaaacactttggttggctgttgttggttatgtttctttgggaaagtttttctgtcgttgattgctcggttttttcttgattcttttgtctccccttgaatgtttaatacttgtactttccccttctataaaatgattacaattcatatcattgttccattcttcatggccttctatgatctgatcttaacctgtctttctaatctggtataccactactgcacacaataacatggaaaaggaaattgtatatgtatgttaaatactggtatttttaaaagaatagttttaataaaaggacaataagacattctttaaaggaagggttagcaaactatttccatagagggcccaatggtaaatatttttggctttgcagccaggtattcagctctgcagttgtatcaggagagctgccatagacatttgtgaatatgtgaatgaatgagtgtagctgtgctccagtgaaactttatttacagaaatcaggtagctgaacacatttggcccacaggccatggtccctgcaataggatatttctaggtacttagaagtactttggtttttttctttcttttttttaagaccgagtctcgatctgtcgcccaagctggagtgcagtggcatgatctcagctcactgcaatctccgcctcctgggttcaagcgattcttgtgcctcctgagtagctgggactacaggcgtgcaccaccacacaccggctaacttttgtatttttagtagagatggggcttcaccatgttggccaggctggtctcaaactcctggcttgatgagatccgcgtgccttggcctcccacagtgctgggattacgggtgtgagccaccgtgcccagcctaagtactttgaatgtcaatagtactggttctctttctaaatatactttttaaaaattatcaaaagagccaggagtggtggctccagctctttgggaggcagaggcaggattattgcttgagcccaggagtttgaaaccagcctgggcaacatagcaagacagcatctctattaaaaaaaaattatcaaaaaataaatgcacataaaaaaatcaacagtacaaaaggggttatagtgaaaagtagatcatccagccatgagctctactgtcttaccctctgtgaggcaactatggctacgagtttcttagataccttttcagagtttactctccatgtataagaacacacacaaatgatcttggtaataacaaacgctgttctgtatcttccttttttcatatgaatacacacatagacatactaccttgttaatacaaatagtagtgtattatacacagttttttatgttaattccttcatttctcagtatgtcttaaagacctatgcctttacctcaggctcagtttttttaatgaattaacagtatttcatttgatatacatgccataatttatttaaactagtaattaaggatatttttagtatttttcaattgctaaccttgtaacactgattgttctatccgcttcatttggggtcattttgtatttcatcatctttgaagaaggagtaaggaaatttttctggccttcctattccccattcctaaattaaaggcaaaaaaacctttgtcagtatcaaggctcaatttctctcacatcctgtttctgggtttctcattctcctgatttaataatcatgggacacttggggaggccgaggcaggtggatcatgaggtcaggagatcgagaccatcctggctaacaaggtgaaaccccgtctctactaaaaatacaaaaaattagccgggcgcggtggcgggcgcctgtagtcccagctactcgggaggctgaggcaggagaatggcgtgaacccgggaagcggagcttgcagtgagccgagattgcgccactgcagtccgcagtccggcctgggcgacagagcgagactccgtctcaaaaaaaaaaaaaaaaaaaaaaaaaataatcatgggagctgagtgggagaagggaataaagaggaattccccgtgatgaaagaggaggaaaggatactcgcattcattatgtgaatagtttgtcaccacccacccactcacttgtgatttattccatacagcaccaccgtggtccagatatatagcaggtgtatcatgtggaagaaagctgttgacttgaattctttctgttgctttcagttgcctagacctggagcagtgttctcttaaggtactggagcctgaaggaagccccagcctgtgtctgctgaagttaatgggtgaaaaaggttgcacagtcacagaattgagtgatttcctgcaggctatggaacacactgaagttcttcagcttctcagccccccaggtaggttttgttcttaggattattctccaggagttcatggagccaaacttagaagaaattatctcttttgaccaggtgaactgtgttaagtatttttggaaaatgtaaatgtgtagtgccttgtttgctttcccaggttgaagcaaatgcaatgcatgaatattggttggattgtggttgaagaaaccagctacatgagacatttttgagatagttggaaaaatttgaatgtaactacatatttgatatattaagtaattatcatatgataatgatactataggagaatgtcctttttttaaaaggagatgcattttaaagtatttagggagaagattcctatgacatacattggaatagtgcagccaaaaaaatgaacatatatttattcctatgtatttatatagatgaagtaaagcaagtatgacaaatgtttaagtttttttttgccgcagtgaggcttttgaatgttgattaactcaaccttgtactcttatgagtttttcctgaattaccgatattggatgaggctttgtacttcccacatcaggcgaggcttaggaaacagtccctcttctccattcagctgctctcctctcagctgcagatagagttggtctacagcagtggtggagggcaggagggacatgccattgaagttgcctggttgtggcagcactgcagacctccttctttacctggggatccagtgggccattatttgtcccacaggaagcaaagaggctggttgagcttggaaaggcaggttgagcttggaaagacaaaggacctgatgcactctattttacgtggttttgatgtataccatttcaatatataaccagcttggttatgatatatttttaagttaacatgaggaacttaaaaccataaatgagatgttattttttattgttagttgtgggatagggaattaggaacacatggtatagtggtatgctgtcagttacatgtaccagaaaccccaacccaaataggcataataaagagaatacatttctccttctaattgaaaagcttagagcaggtttggcttcaagagaatcaaggaacaatcctgttctcaacgcattggttggtttttgtctttgctcttcctttcttggcattggcttccttccatgactgactctccacatagcgcaagacgtctgctggctttttctgggctccttcattcttgccccagcaaaacccagagggttcatctagttaactagcttcggtcaaatgcctagctcttaacctgtcactgtgccaaggagatggaatgtgctgactcgcctggcttgaagccaggagtggagttgggttgagtctgctttcctggaaccacatggatcaccaaacaaaattgaaactattagaaggaaaaaggaagtagcagatactggggaggtaaccaaaaagtttactacaaatggaaagggccctggattataaataaggagacttggactcccaatcatcccctgctttacaaggccctctgtagatggtaaaataggcctctgataaatgccctatgaatttgatacacactgtattggatgcttgctttctatttcccagcgcctcttcctaccaacagggctggggtgggaataactagctgctaatgccaccctcccaaatgcaactgttgtttggcaccaaacagtaaactttcttttttaaacctggcccattactgatagaaacagtagagttcctaaagtggtatttattaatttttatattgctggtgcttgaagtagcacccaagagttgtgacatttgaaatctactagtctaggtttcatactgttaaagtccaagttctcatacctagtaaagtctcatacctagtaaagtctacttttgcttactttactaagttctcatactttattgaataccagggcctctgaaagcttaggaaacctttctgggaagtaaatataacatgtatttcattctctttttcaataattatgcttaattactctaaccgttatttgccaagtctataatatgaacataagtattctctacctcacagagttataggagctgcatgagataatgttgtgttgaatttcatctatacaatgacaggggcctcatatctcttttgatttgtgttgtgatcactggcctgagagctagggtttcggaatttttaagtttcccatatgtgaaaccgggcttgactgaaattgagtcatatatttacttaggtgtaacaatttgcctgaattttaaaaataacacaatattttatatttttatttttgacaggccagcaactaataaagtgccaccctaataaacattagtaatcttcctttgaaaaatccatttttgctctttgtgtttttctccaaataggattagcacttttctatcagtgttccccagtgaagattatcctgatgatatttggcttacagactttctcaagattatctcatagggcttttttgcatttgaggagagaataggaaaggaaagcagtttatttttttctttttgtttttaattttctcttcagtacatttgtgagctgtagggaaatattatttgttttattttgttttttaaattttttgtgataaagggtcttgctctgtctcccaggctggaatgcagtgatatgatctcggctcactgcaacttctgcctccggagcctcaagcaatcctcccgcctcagcctcctgagtagctgggactacaagcacgcaccaccatacccagctaatttttgtatttttggtagatacggggttttgccatgttgcccaggctggtcttgaactcctgggctctaagcagtccacctgccctggcctcccaaagtgctgggattacaggcgggagccaccgccctgtttctgtgttaccacttgtgcactgtttctgtgaagttttatgtcatgttagccgtataatatccttaggaattggttgttgcttgaatgttagttattgatttaacagcaaacattttgagatctaataaagctcagtaattttaggaagaagtaattaatttgttagcttactatctgcatctaatatgcataatctaagatttactcttttttttttttttttttttttttgagatggagttttgctcttcttgcccaggctggagtgcaatgtcatgattttggctcaccgcaacctctgcctcccaggttcaagcgattctcctgcctcagcctcccgagtatctgggattacaggcatgtgccaccacgcccagctaattttgtatttttagtagagatggggtttctccatgttgatcaggctggttttgaacttccgacctcaggtcatccacccacctcggcctcccaaagtgctgggattacaggcgtgagccactgcgcccagccaacttactctatttatagatagtagaataaagaaatataagaattacagagaagaattttaatattttaataaagatattgagaataaaaactattttaattatattaagaagataagctctgatagaatcaacttaattggtggtttgcctcgtgtattcaataaagtttactgtattgcaatgcccttgctgtgctaggcattatgctaggtactgtgagtttagagatgaataaaacaatcgtttccacctgctgataggtcatagtttagtaggggagacaaacatataaaagatcatatccaagacagttgtaaaaaatatatatatatagtaagtttatctgatctccagttttctctctttgctatattcttgagtcttagtgaaaatacaaaatagaaatattctaatgttttctctcttttttgcattggtactatttcataggaggacattacttcttattccacaggaagtctgatgattttcctctgtccttacagagagaagcctggtttgggttatgctgtgaactggcctttgaggtctaaatgcagggagatggggaaactttagatttattttgattaaacgagaaactatagtcttacgttgccatattctgttccaagtgacggtggaacaacagtcagaggtagctctgaaaggtaactgtaactgtcatgtggagtttctctgtcttttgagaaactgaccaagtttcttttctggatttgttttggtgcccagaaatagctagagcagtatccatgcatctctaactagagcagtttctgtgatgaggacccagcttcagcagtcactcagcatgtagtctgagtgtaaactcactctggaattataattttatatattttgtgaaggagcctcagaggatcgaggtttttactctctgttgctttctttcttgtcgagcatttccactgcacatgggttggccaacttgcccctcagtgtggtcttacttgaattatatgatagagaaatcgcttctagtttttatttgtggatggtgttcatcccattttccagcgctagtaaattgtttccctacttttattcctttgctcatctcagtgggaattgtagaagggggttaaatggatgtgttgaaagggttttgaaccaaaggtctgtaatgatttttttttttagatcttatttaagtttcaaagactgattccaaagcaaccaatattgacatctgtatagatagacttagatgtgtagttcaaggtgcttttgtttcttttgttgttgttgttgtttgtttgctttttgagtctcactctgtcacccaggctggagtgcagtggcgcgatcttggctcactgcaacctcatctcccaggttcaagcgattcttctgcctcagtctcctgagtagctgggattacaggcacgcgccaccacacccagctaatttttatatttttagtagcgacgaggtttcaccatgttggccaggctggtctgaaactcctgacctcaggtaatccgtccgcctcggcctcccaaagtactgggattgcaggcatgagccaccacacacagcctatttgtttcttttgttttaagtgaaaacattgtgagtgtagaattataggcttcatcagtcctagttacatacatcacgaaatggttgcctggagaagtgatgcccttaacctggaatgggcagagcagaggctgaacgatgggagctgtttagagagaactagcattgttgatgtggatctcattaagatgaatcccaagttgcttttcagctccagtgctgcaatattgccattttatttcactcttcatatgaaaggtgcctcactgagggtacctatgagatgtctgtggcagggtcatgtgccatcttttcagtggcaccttttccatttgcctctactccttttttatttcatacctttttttctcagatccgttgtaacatacgcattgttatgttttggctatttttattactttatctctaaaataagtgcaaaggttgtttaatgttattctttagtttctaaaatacctttacttcacattttatcttcacaattctgtgaagcgacagaacagtgctattgtgaacatttaaattttaaccaacaaacatttacatggaaaatgagatttccaaaagtgatcatttggccaaagtcacaattattgacaaaggtaggattaaaaaccaggtctgctgaccctgacctgaactcaataccatttccataatgctaggaaatttctgaattaagaaacttagttctgtattattacctcagttgcctctttgacccatggacttcaatttttttcttcttgccaacttaaaaagtgctcaaagactggatcttatttgtaagggacttttcttatttcatgaatatgaggaaattggcaattattcctaaaagaaaaatatcaagaagtgaaaagagaaaaagatggtatggatgtgcatgaggataaggaataagtagagggagagaaagggctggtgagcaaggcctgaaggaatgtctttctggatgtggagtgtggaggggagtctcaggcaatgtaacagaataagggatgtgatgtgggaaactagatttagctataatctatacagatttcaattgacatgtaagagaaacatatgtggacatactttgtgtaatgccgtaggagggacacacatggacctactttggttatatactgggggaaattgttagaggaagaggaatgatatttatttgggcacactgtagggcatgtgggtactcttctgtgatagcatagaagattgcagagtaactttgaggacaagttttagatggaagttgataaaaatctttttttgtttcatggcctctgaaagtagatggacttcagtgtatggaatagatctgtttttggaaaaagtatttattgataaactacatcaacatttaaatgcgtcgtgagagagaataacttcaagggaagctatgtgtccttttgtcaaaaattatcctaatttatctttcttataatttcagcagggttttaaatttttgttttattgcttaatagcatgtacttgtttatcggcatatgtgtgtgtagttgaaagcacgatccttggttccatcgtacctagtcacattctcccaggcttacaggaaatcaagtaacttctctgacttctttgtagatgttatctgaaaaatatgcttgtttaccaggaagctgtgtgttcaccgtttaaaatagaactttcatttgtatgccttcgtacagcctacgtagcactataccatattctttttttacctttgttcagcaccttctcactagtgggtgctgcattggggtggctaagggttgaccatgggtccctgtcgcacaaggctttgtgggaggaaggaaatttgtgtggttaaaacatgggaggtattgcaactcattttcttgactattcaccaggggtggtttccaaatcacattttgcctttcaattctcagtctttgaagcaataaattgtatatatatgttacacacacacacacacacacacacacacgcttattaataaagttgttggtgcaggacaggcttataaactgttaatttagatgtacattaaaagctactttgtcttggccaggcacagtggctcacacgtgtaatcccaacactttgggaggctaatgtaggaggatctcttgaggccagcagttccaggcaacatatgaggccaacctgggcaacataatgaggccctgtttctacaaaaaaaaaaaaaaaaaaaaaaaaaaatactaattttaaaaatcacttagtcttgtgtcccatacaaaggaaggataacttttagaacctggccatatgatccctttccagtagtcacctgcttctttgtaagatactctagaggaaaaaccctttccatccttcttgtctcttatctccttgtataatggcagagaatatttgccatggtatattcatgagccgtgtcctggtgtgggattgctctttgtgtgatacactttctcagtaaggtaggctcactgtggcagaaagcgggattaccgtgggagatatattgagaatcaccaagaggccggtcatggtggctcactcctataatcccagtgctttgggaagctgaggtgaggtggattgcttgagcccaggagctcaagaccagcctgggcaacatggcaaaaccctgcctctacaaaaaatgcaaaaattagccgggtatggtgatgcacacccgtagacccagctattgggggtgctgaggtgggaggatggcttcagcccaggaggttgacactgcagtgagccctgatcatgccactgcactccagcctgggtgacagagtgagaccctgtctcaaaaaaacaaaaagacagaatcactgagaaagcaaaacataaggtttaaaacctttaaaaggcaagaaaacctaggtttgcatcctggttctgccattttacaatgtaaaaaaaaaaaaaaagtctcagagagtttaatttaccccaggtaatttgggtgaccttctgcaaattacgtacctttttttcattgtaacatagatgtaattagtatctaccttgtgtggttatttcaaaggttagtgataaaaatgcctggtgcatgtaaagcagtcagtaacttgctgctgtagtaatttctgttattattatatatattcaacaaacacgtgttgaacacccactaacacccactgcagtgccatatgtgggcacaattctaggtgctgaatgaactggtgactaagaccatcaaggtccttggccttgccctcatggagcttctattttaatacctaagacggacagtaagaaacagggattttagagagtgaaggacactgaactgggtgaatgtaatagataactggggggtgggagggtacctaatttagagacatttcccagagaagctggtgatattttagtaagaaacctggatgatgaggaaagagcctgccatgaaacagtagaatagtggaagccagtggggtggcggttgcgggggatggcaaagcggagcttgtggggagaacccagcagaggactggtaagtggaaaggcagaaaagagcttggcttatagaaggaaggaggcccagtatggctggagcttggtgagcctggagaagagcggaggggccaaaggagcagttcgtggaggactttgtagccatggtaaggaatctggattttttattctaagtacaggcacactttgttttattatgcttcactttattgcactttgcagatacttcactttctgcaagttgaaagcttgcggcacccatgtgtctagcaagtctgtcagtgccatttttccaatagcatgtgcctacttcatatctctgtgtcacaccttggtaactcttacaatatttcgaactttttcattatatctgtcgtggtgatctgtgatcggtgatctttggtgttactactgtgattgttggtgcctggtaagatggtggcatccaggtggcggtcttaagaccagatcagtatggtgttggtggtcttaagaccagatcagtatggtgttggcagatcagtatggtgccgctaggcaggcactgactagctccaggcagctcaaccttgggagcttcggggccccgagaggtggagcctgtgagtggggcatgcactccatgtggaagccagagcctcctcccctggatggagtgtacgagatccctggaccggagcccatcccctctgtgagagagatgtacttcacgcccgggctgccaccgctgatcttcctgccctgggaccctgggtagaaacacccaaaattctgttcaccccgttcacgaccctgggaccctggctcgaagcacccaaagttctgctgctcaagctccattcacgagcagccaccatacaaagaccaggcctgctatgtctttcaccagcgttgccgccttctcaggggtgtcaagcaggccctctggcttaccgaggccaagttaataaaatgccttcctgagaaagtacttggccttgttgatgatacaaggaaccacatagagaaccaagatgagcgtcttctgaatttgatctctcatgcctgtctctggcactgtactgagtacggccccaggagagaggcctgctgtctggtcattgtggacagtctgataaagttgtgtaagtctcagattctcaggcatccttctctggccaggcagatttgtgcccaaaactccacgttatccaccacctggaattgtgtctgttcttcagggtcatggttctagtggagccggctgagtgccaaggatcctctgcccccgccatctcctccagagaagaggttgaagctactaaaaatcatgttctcgaggccttctgtcccctctccccactactgatcttcaggaatgcaatgtttctgatgtgaaagatgacacaggattctgggagggctatccttacccctatctccatatcctgcacttcctggagaaagccgatttgcaaccacatagccttcaaccagatcagctgtgggccaagatgatcctgtttgcttttggcattgccctggctcaggcccagctcctctgtggcaatgacaccaagatctcggagcagcccgtggttgtgcagagtacatgcacagacggacgtgcattccatttcctggtgttacagtagaacaccacagacctggcctcttaacaagtgtggcaagagtttggtctgggtggaatcatgccagctactctctcagcatttttggtgtctcccagtgataaaaaagaaggtgggaccgggcccagtggctcgcacctgtaatcccaacactgggagtctgaggtgggtggatcacgaggtcaggagatcgagaccatcctggctaacgtggtgaaaccccgtctttactaaaaatacaaaaaattagctgggcgtagtggcgggcgcctgtagtcccagctactctactcaggaggctgaggcaggagaatggcatgaacccgggaggcggagcttgccgtgagccgagattgcgccactgcactccagcctgggtgacagagcgagactccgtctcaaaaaaaaaaaacaacaaaaaattagccaggcatggtggcacgtgcctgtaatcccagctactcaggagatggaggcaggagaattgcttgaacctgggagatagaggttgcagtgagccaagatcgcgccactgcactccagtctgggcgacggagcgagactccgtctcaaaaaaaaaaaaaaaaaaaaaaaaagagggtggttgtggaatgcgttgggctgactggtttccagtgggagacatccaggaagtttttagctctgtatttacatggtgctacgtgagccaaggaccattctgaggcccgaaacccacctttgccttctcccactgaagagggcctggggtccccctggagcctcagtgctcatctagcctggtggtctcactgacaataaagagcccttgcattgcaaaggaaaaaaaaactattataattgttttggggtgccacaaattatgccactataagaagttgagcttaattgataaatgtcatgtgtattccaactgctccaccgactggccattcctctctctctctctctctctctctctctcactctctccctccctccctccctccctccctgtccctcttcctctcccacctccccactccctctttgggcctccctattccctgagacacaacaatattgaaattaagctgattaataaccctacaatcgtctctaagtgttcaagtgaaagaacagtgacacacaacaatattgaaattaggctgattaataaccctacagtgatctctaagtgttcaggtgaaaggaagagtcacatgtctctcactttaaatcaaaagctagaattgattttacttaatgaggaaggcatatcaaaagctgagataggctgaaaagctaggcctcttgtgccagttaaccaagttgcgaatgcagaagaaaagttcttgaaggtaattaaaaatgctacttcagtgaacacacgaatgataagaaagcaaaacagccttattgctgagatggagaaagttatagtagtctggatagatcaaaccagccacagcatgcccctaagccaaagcctaatccagagtgaggccctaactcgcctcatttctgtgaagacagagaggtgaggaagctgcggaagaaaagttggttcatgaggtttaaggaaataagctgtctctgtaacataaaagtgcaaagtgaagcagcaagtactagtggagaagctgcagcaagtcatccagaagatctagctaatgccaggcatggtggctcgtaattgatcatggtgtctataatcccaccactctgggaggccagggcaggaggattgcttgagcttaggagtttgataccagcctgggcaacatggtgaaaccccgtctttgcaaaaaatacaaaaaattagccaggcacagtggcacctgcctgtagtcccagccactcgggaggctgaggtgggagaattgcttacacctggaaggcggaggttgcagtgagcgagatcatgacactgcactccagcctaggtaacagagacagaccttgtctcaaaacaaaaaagcaataaaagatctagctaagataattaaagaaaatggctataataaacagatttttcagtgtagatgaaacagccttctattggaagaagatgtcatctagaactttgatagctagagagaagtcagtgcctggctgactcttgttaggggccaatgcagctgacaactttacgttgaagccagtgcccatttaccattctgaaaatcctagggcccttaagaatgatgctaagaaactgcaaagtttttgtcctgagtaaccagatggatggtggtaggcagtaagactggtttaccatctttgagatggggaaactgtggggactggcagaggagtagattttgtgtcagaagggatttgggacatataaaattggtggtggctataggacattcaaatttaaagccaggatagccaaaactcctatattttttagatttattacttgttctcttttgtcattgttgcaactttttcctgtcacatcgaaacttgggaaatcagaatctttgtattttaaagttgtgatgtaaaactctcctggcagatgaatggtaaatgtggggacattaaaatacagtgttatgaatttgctggcttcagcaagagtgcttatcccattttccacctttcctaccaacatgtatcacagatttcagaaaaattctgaacttcatccgtcctgtactaacttggcctcgacataaaggattaatgaatatgaatgtcctcccttggcaagagtttaaaattctgagaggctctactatatttactaaagattttctagggcttctcgaggccctcaaatgtgctaggtatacaataaatatttactcatttttaattttgcttttatttagtatctttgtgctgtgactttcatgaacattattttttttcctagaaagtttagtacctttgatgtattaagattactgttatttacactgtttcctttttacttgtaatcttgttttgtttctttgcattggtgggtggtagaagaaaaagacactgttatgaggtcacattcagtatagacaaggaaagaaaataaaagtaggtgcaggaaattaagttttataagttttaattatctttttctttacttcctaaaagccagctaacccagttttattaattacaacttttgcaaatgtaagcttttctagctttggtttcttttatgtcagttatctattgctgcattaataaattacccccaagtcagaagtgaaaaacaacaactgtttattatctcacacagtttctgaggctagtagtccagaagtggcttagctgggtagtcctggctgagggtctctcgtgaggcagcagtcagactgtcagccaggtctgcagtcatctgaaggtttccccagggttggaggatcttctcagatggctctctcacaggtgttgtcaagagacctcatttcctcactggctgtggcgggagatctgtttctttctgtagagatatggtttggctgtattcccacccaaatcttatcttgaattcccatgtgttgtgggagggacctggtgggaggtaattgaatcatgggggcaggtctttctctgctgttcttgtgatagtgaataagtcttatgagatctgatggttttataaaggggaggttccctgcccgcaccttcttctcgtttgtctgccgccatgtgagacatgcctttcaccttccaccatgattgtgagtcctccctagccacgtagaactgtaagtctattaaacctctttcttttgtaaattgcccagtcgtgggtatgcctttatcaggagtgtgaaacagactaatactcttaccacttgagcctctctgcagggctacctgaatggcctcctgccacagtcatgtgcttccctggggcgagtgagtgagagagaggcaagagaaggagttgggggtgttccattattgactaggattttcttccaaattcctgtcaaaagtcttccaagcttagatgttggcagttattcctcaaatgaggaatgtttgtgtcacaggtatatcaaatatatatctcactgctctgtttctgtgtctttctcttccaaaatcattttcatttcaatactaaataataatgcagtcatttgaagacgttttcaatggtgttgtctttgtccattgcatgcttccataatacagtaccacagactgggtaatttttaaagaacagacatttatttctcacagttttggagcctgggaagtccgtgatcaaagaaccagcttctgatgaaggttttcttgctgtgtcctcacatggcaaaagagagagaacctacctgcaaaccccgttattacagcggcattaattcattcgtgagggtagagcctcccgctaggccctacctcccaacattgttacattggggattcagtttccagcacatgaatttgggggcacatattcagacaatagcagacattgcaacttaacacgtctgttactaacagtgcacgtaacttgactgaagtggcagccatatgagcatttatgaccaaacatttccatgagctaacactgagaactaccctgtggctgtgcctgacaggcatctgttataaggtgcatcctgatttcagaagtgttagaatatgggggaaaaaagcttctagaaattgaagaaatatggtaaataattttctcccccacccaatcatggggaagtacaatagatcaaagtcttctgcaagtaagtttctttcctctgattttacaaaagctgcaactcacaaagtgtaaattgattgagaaggagatgtgaatgagtgatttatgacaaagataaatatgcaagttatttctaaaatgtttcaatttttggtttcagatgtataaacaaggaaaatccctcttgtgactttaattttttttttttttttttttttttttaggaataaagattactgtaaacccagagtcaaaggcagtcttggctggacagtttgtgaaactgtgttgccgggcaactggacatccttttgttcaatatcagtggttcaaaatgaataaagaggtaattttttaaatatatcttttaattcttccaaggagagagaatgatagagaattaattaacattatcgtcctaaatgtagttttaacagtttggtaaaagagtctgatagacattgctaggttattactgaagtagtcaatagtcattattttggtaagacagttccagaattgtctcatgaaaacattgtaaacaataatgaaattagttctccactctaaaaattgtggaaaatagggattacttagggcagcagtgttagcgagtataaaacatcaccagtacattcttgtgtatacaaactcttcacaacagattatgttccaaccaaaatctttaaaagattttcaaggctatatggaaagttaatgtgctattctttttaagaattccacatcactgttttatctgtatcagaagatttaggaccttgtggtagattctgaagtaaaattcagatgggcagaatgggccatttattccttttgtgaaatgattggatccctgcagcacccaacaaataatttaaattcacattttagaattctcttttcttcagagttccttgagccatcttgcactggggatttctcagtgggctggctgcctgcattgtgtcccacttctgtgggcttttatcttcgatccccccatccctctctatcctcctcccacttccacagtaccttgaaagtccatattcttttcactctgttagtcccagtaattcagctttcttccaaacttgatgtcacgtctccctttgcaaatctgaaactaaataaaagctgttctgagaatgacttttcctttaattggattgcctcatactgtaggtgaattctgtggttttatacgattttgtttccgtctgttacacagaggtaagacagagcaactgtggaatgtagtaaaaagattgcatgtagctttggcactagataggtctgtgttggaactctgactgccattattagccatgtgaattcctatcatcagaggttgtgagaattaagtagacaggatgttttacgtgcctaggctcttgaaagattgcacctaaaggtatttttttatcatattttctcaattgcaaagttactttcattttattaaatgccctttgaggagaaatagtggaaaaaccctactacattaagtatatcatttgtaagctatgtcctgattggaaaaaggtagaaatgtaggggatggaaaatgcatcttagagttgaagagttgtaatggattttaaaactcttaagttttgtaaaaccacatgatcataggagtattgtaggagatgtttacttaacaagtgcttgttgagcacctgttttgtgccgggccatgttctaggtgtgatgatacagcactgaccagaaggtctctgccctcaaagagcttacacgccagtggggacagagcaagtactgttaattcctgtgagttaagagctatgaggaaaatcaacagggtggcaacataatatgagaagctactaaggttttaagcaagggaagtaacatggtaggattcgtggggttttttgttgttgttgttgttgttttgttttgtttttttgttttttttttgagatggagtctcgctctgtcgccaggctggagtgcagtggcgcgatcttggctcactgcaacctccacctccccggttcaaacgattaccctgcctcagccttctgagtagctgggattacaggcgcgcatcaccacgcccagctcattttttgtgttttaggagagacggggtttcaccatgttggccagggtggtttcaatctcctgatctcgtgatccgcctgcctcagcctcccaaagtgctgggattacaggcgtgagctgtcgcacccgactaggattcatgtttttaaaacataaacttgcggcttgaaggaagcagagaacagcaaggtgagcagttgtcttaatacctgtgcttgactggaagtagcagtagcgtggagaagagaaggtggatcacagtgcataattcagtgtatattttagagagagtcaactaagctgacagattagatgtagagcatggggagaaggaagagaaatcaaggatgaccccttaggctttccacctgagcatctgagatgtgttatatactgaggtgttgaagattggaaaattaattgacagaagacagattaacggagaaaaagcttatttgtgtgcatgcaagagctttcagaaggagtagcttgctaactggttaagttatgtagctaatttagtagggaaaggcaggggccctgtgagcataatggatgggtttcttcaggaaagacaaaggggagaagaacaagggaagatagcaaagtttgtggtaatgttgttcatgcaggcaccagtggtatctcctcttcattgtgaccgtaaagtccccaaagagagatttatggtacttttactcttggtctgttgcctgggggtaaaagctgccccacgagggaatttatggcagcctcatttcccagaactttctgttttgggtcagataaaggaagactgagaagacttctttctgtatctgttgagtcccagatgtcttcagtttaatataatcttcataccaactcaggggttctgagtgggtctccacagatcttcagcccaagtagcctttgttaagaggatacatcttccattttaacaggagggaacagagcagttataaataagtacagacatggataggtttgtgatttgttggcagaaaaaggaggtaatttctgtctgaagtcagtgcctaagagaactaggattacaggaagtttgaggaaagagtatacatcaatagtctagaaggaaaacacacttaggacgatatagtaggattgtcaggcagttgtaagtgcagcctgtcatcccagttgtcacatcctgagcaaaatactcttgctttggtgtaggtactgaaaggggagagagtagagttcagtaacttggggtttggagagggaggaggtgagcttgttaaagtacaggttgaatatcccttgtctgaaatgcttgagaccagaagtatttcagattttggattttttttaggtgctgaaatatttgcattgtatacttaaaagttcagcatcccaaatctgaaatgttccagtgagcatgatggaggtgctcaaagagttttgaatttgggagtatttcagattttaaatcatcagattaacctgttctttgcaagggagttattgtaatgaggcacttgagtaagccccttggcaatgtgccaaagttgggtgtagctgatcaattgctgggagcagaaaaagcattaataaaagaaaccttactattggaggtggggactgtggatggccatcccgtcttactgtctcattgatatgctttccatagctcttctctgtctagaccttgaaggagattggatattgtttggttaaggagtttatcctcttacagaattttgcagatcagaaggtccggggtctcaaggtgaaataacttgcccacgtcttcccagctaatgtggtcagagctgaaagcaatagccaagcccaattctctgtgttttctctatgccgctgtggtgtttgtatgttgtatggctgctaaactcataaatgttgcagttgtagattctttcaatactcagtgattgatctcttaaatgccagagcaaatagttttctgttagtgagcctttggaagatgtttgggggccagcttaactctctggtttatggatttgtaaaagactggatttttaatacttcagtcctaaataactcaaagcgttactgtttttaactcagaaatgttttagaacttgggggaaaaatgttgcactttcaaagcttcatactgaaatcatagattttgtacagcatattttataaggtgtgtttttgatgagtcatccacttctcttattgattctttcacagattccaaatggaaatacatcagagcttatttttaatgcagtgcatgtaaaagatgcaggcttttatgtctgtcgagttaataacaatttcacctttgaattcagccagtggtcacagctggatgtttgcgacatcccagagagcttccagagtaagtaacgaaagaagctgaatgttgggatggggattccccatattttattttattttaaatgtttacttttaaacaatttcaaagtatcaaaaaacatagcaaaatttcacataggtacttcatccattataatgtcaaccattgttaagatttgatccatgtgttttgtctttcttttttttttaatttagtttttggttttgttgttttttaagacaaagtctttttgttgcccaggctggagtgcagtggtgccatctgatctcagctcactgcaacttccgcctcccaggttcaagtgattcctcttgccttatcctcctgagtagctgggattacaggcacatgctatcacacctgggtaatttttgtatttttagtagaagtggggtttcaccatgttggccaggctggtcttgaactcccgacctcaggtgacccacccgcctcagcctcctgaagtgctgggattacaggtgtgagccagcatgcccggcctgctttaattgtccttctgtgtgtgtgcgcgcacgttcacacatgcacacacacatatatgtgtgtgtgcagatactttaggatgacatagacaggcctcagtctggtcgctgccactgacctcttcaagtttgccttccttcatgttccattactctgccctcacacacggcacctatattcaacttcgtttctccctgctgcttccatggtctcgaaatgtcttgcatattcacactccacatctttgcgtcacttcttccttccatcttgaataccttttctgtctgtcatacttttatgactctttcaagcctcagctccctctgctgccttggcattctgattttacctctattatagaactcgttgcattgattttgaaattatttgtttgctagctgtctgagcagtgtagggataaggagttcccttttctctttctagttcttagaacaaagcctggcaggtagtagtcgcttaccagttatgcaattcattgaccaccctcatgaggcacagccttgggcttcgatgttacagctattttaaactaagcatgagagagagcccctgaccccaaactacttacacaactatcaggaaagattatctgctacaacagaaagcaggaagactttcttgctaccacctctttctcccaaaagttaatcttttgaacgtatttctatattttggttgtttgtgttgtcaggcttgtctccctatctaactgaactcctgaagggaaagtctcggtcttaataatctttcgtaaaaacaaacactcaataaccaatagcactcagtagatgtttgttgacagaatgaagaaccagggtgaattctgtttaacaaagtagagacggaaatatttccatcaaaaacatttaatattcttacatttaaagcacaaattcaaagctacctaaaaatctctgaaggattcttgatatctagaacacttccttatttaagaaacagattgtggatctggcatggtagctcacacctgtaatcccagtactttgggaagctggggtgctggggcgggtgaatcacttgaggccaggggttcaagaccatgctgggcaacatggcaaaaccctatctctacaaaaaaaatgcaaaaaaaaaaaaaaaaaatggggcctgatggtgcacacctgtagtcgcagcaactcaggaggctgaggtgtgaggatcactcaagcccgggaggcggaggttgcagtgagctgggatcacaccagtgcactccagcctaggtgacatagcaagaccctatctcaaaaaataagaaaaagaaacattgtgaaactaacatcatggaaaaatgctatttcctgaagttactcttactcatgaatactaaatatgatcattataaaaagtagatcagtagataagcacatagcatttgagacctgatagtcttgagttctataattaggatatgaatcaagaagaggtcagtttgttatgaatttgaatgttgtggtcttcagttttgtaggagaaaaaactctcatatagtagtcttgctgctcacttttcaattcttttccataatgcgtatttttctcccaaactattgtattgctcctaaaaaatgatcttgtggaaaaaaactctagcgttgatgtcagcactaaaggccatgtagtgagtgtatcattcactgcaaggaaacattcatcagactgctttgctactcactctgctccatctttttagtgcaataactagcattgatcaagacaaaaaaccagtctcctctaaagagtagttgtcagatattattttgtttatttggtgcacagtcaagaaccatgttctttgttgtatttgctggacaaaaagaaggatagggaggaaaacactttttgttaaaagagttaaaatgctgctgtctcattcttttctctcactttagtcttccgtaaactcaaatgacgttaaggttgttgagaaataaaatatcggtcaggcgcaatggctcacaccagtactcccagcactttgggaggccgaggcaggcagatcacgaggtcgggagtttgagaccagcctgaccaacatggtgaaaccctgtctctactaaaaatacaaaaattagctgggtgtggtggcccgtgactgtaatcccagctactcaggaggctgaggcagtagaatcgcttgaacccagggggcggaggttgcagtgagccaagattgcaccatggcactccagcctgggtgacagagtgagactccatctcaaaaaaaaagaaaatatcaccattttctttaaataaaaaatacctcatgcacctctgcattagcccattctcacactgctatagaggtactatctgagactgggtaatttataaacagaagagttttaattgactcacagttctgcatggctggggaggcctcaggaaacttacaatcatggtggaaggtgaaaggaaagcaaggcatgtcttacatggtggcaggagggagagagagcaaacaggggaaatgccagacatgtaaataaccagatctgtgagaactcactgtcacgagaacagcatgggggaaactgcccccatgatccaatcgcttcccaccaggtccctccctcaacatgtggggattacagttcgagatgaaatttgggtggggacacagccaactcatatcaacctttctcaattttatttaacttttttatcccattttttattaaggggtaatttatatacagtacaatgtacagatacgtgtacagtccagtgagttttaacatatatataacatgggtatatgtacccatttaacatatatatagtcattgaccagtctagatattttatattcagcttcttccactcagcataatgtttttaaaatttactcatgttgttcagtgtatcattaggcagtcccatctttttgctgagtaacattccattgtatggattgactagtttgtttattcattctcctgttgatagacatttagtttgtgtccagttttggaatattatgaataaagctacgatgaatattctcatacaagaccttttctggacatatgttttatttcttctggatagttacatagaagtggaattgctgaatcctagagtagatatatgtttaatttttcttaactgccaaagtttccaaaatagtttaccattttgcattaccaccaacagcgtataagatttcaggttactcgccccatatcttggccaacattggttgttagctcttattgatgaattaagcttttggtcattatgaaatgctcctttatctctggtaatcctctttgtcttgaagtttactttgtgtgatactaatatagccatggaagctttcttttttgttttgttttgagaaggggtctcactctgtcaccgaggttggagtgcagtggcacgatcatggctcactgcaacctctgcctcccaggctcaaatcatcctcctacctcagcctcctgagtaactgggaccacacacatgcaccactgcacctggctaattttttgtatttttggtagagatgggatttcatcatgttgcccaggctggtctcaagcgatccgcccacctcggcctcccaaagtgctgggattactggcatgagccaccgcgcctggccagaaccatggcatttctttcataagcttttttgtatagtatatgtttttcattcttttagtttggaatgtctttgtttaaagtttcattttagatgacagaatacaggtaagtgttgctttttgctctagtctagaaaaaagtctctttcaaggtgtttagtccatttacatataatgtgattatgtttaagtctgacatcttgatgttcgttttcagttagtctcatctgttctcttttgatcctcctttcctgacctcttttggactgggattacaggtgtgagccaccgcgcccggccaaaaaagcattttttaatattccattttatctcctttattgactttagctgtgtcttagtgttattttttagtggctgttttagagattacagtatgcctctaacttattgtagtaaaccttctacatattctaccttaaaatataagaaccttatatagtatactttcattgtgccccccattgtatatttgttgtcatatattttacttcgacatttacttttgagcaatcttgtaaaagtacgtgtgtgtgtgtgtgtgtgtgtgtgtgtgtgtgtatttatttttattattatactttaagttttagggtacatgtgcacattgcgcaggttagttacatatgtatacatgtgccatgctggtgcactgcacccactatctcgtcatctagcattaggtatatctcccaatgctatccctcccccctccccccaccccacaacagtccccagagtgtgatattccccttcctgtgtccatgtgatctcattgttcaattcccacctatgagtgagaatatgcggtgtttggttttttgttcttgcgatagtttactgagaatgatgatttccaatttcatccatgtccctacaaaggacatgaactcatcattttttatggctgcatagtattccatggtgtatatgtgccacattttcttaatccagtctatcattgttggacatttgggttggttccaagtctttgttatcatgaataatgccgcagtaaacatacgtgtgcatgtgtcttcatagcagcatgatttatagtcctttgggtatatacccagtaatgggatggctgggtcaaatggtatttccagttctagatcactgaggaatcgccacactgacttccacaatggttgaactagtttacagtcccaccaacagtgtaaaagtgttcctatttctccacatcctctccagcacctgttgtttcctgactttttgagatggagtctctctctgtcgcccaggctggagtgcagtggcacgatctcggctcactgcaagctctgcctcctgagttcacgccattctcctgcctcaggctcccgagtaggtgggactacaggcgcccgccaccacgcctggctaattttttgtattttttagtagagacggggtgagtcactcttatcacccacgctggagtgcagtggcgtgatctcggctcactgaaacctctgccgcccagattcaactgattctcctgcctcagcctcctgagtagctgggataacaggctcttaccactgtgcccgggtaatttttgtatttttagtagagatggcttttcaccatcttggccaggctggtcttgaactcctgacctaatgatccacctgcctcggcctcccaaacttctgggattacaggcgtgagccaccgcgcccagcccacgtgtgtataatttttaaagattttgtttaaaatattcactgacatagttacctgttgtggcactcttgagtctttccttctgacccaggttgctatcaagtaaaatttcccttctggctgaagaattcctcttaatacttcttatggttacagtctgctgtttttctgtaataatttgtaaaaattatttgtgtaataatttgtagacaaattatctcagcatttgaattctgttaatctgttgtcttcatttttgaaggatattttcgtcgtgtatagaattttagaggtgtgttggtttgttttcaccactttaaagatgccattccattgtcttttggcctccattgtttatcatggaaatttatttattccttttataattgctcccttgaatttttcctgcttggaattctctgattcttggacctgtaagttatctttcatcgattttgaatcatttttagccataatctccaaatatttttcttctactttctttctgggactcttaattatatgtatgttagactatttgatattgtcccacagatcttgtaagctctttttttttctttccttcactttatctcttttgtttccagttagatttcttctaacctgttttcaagattactgattttttggtgtgaccagtttgctggtaagcccatcgaatgcactgatgagtggaaatcttgatattttaaatttctgttatttccatttggctcttttttttttcttcaatttctcactgctgaaattgtaagttggccaccatcttctgtgcaagttgattaactgcctttttctccagatcctttaagatgtttatcttcgaattaatgtgagtctctatctgataattccagaatgtaggtcagctctgcttttctttttctttttttttttttaacaagtaaacatggtttattttagaaatgtgaggctatttcaacattagaaaatttttttttaattatactctaagttttgggatacgtgtacagaacgtgcaggtttgttacataggtatacacatgccatggtggtttgctgcacccgttaacctgtcatctacattaggtatttctcctaatgctgtccctaccctaactccccagcccctgacagggttacattttctttcttcttcgtaagtctcataattatttattcaatgctgaacattgagtataaaagaaaaatagcattaacatatgagattaacatattacacattaacatatagagattgaaattaatatttttatgctcaggaactagacacacccctcgtaatggctactagaataggggtatgagtccatccagtttgtagttgttaggtctgtgctttagatgtattcagtttactactgacggaattgagggtagaatgaggatttccctttggcaggactgaaattgacatatcgagaagactagaaatctctgttttacagctctagtgccaaactgcaagagatctctctccactttacatccagagtctcagcttattggaccactgaagcatttttgttcaccaaccccacccttgtctcttctatgtctcagggggtctgagacccccctgcctagctgccttgcccccagccagccttggaaagcaaaggcactgcattcactgagggcctcgtgggcctccaagggtttccctcaggcctctgttgtgccgtcagccttcaacaggccctgtggacctgcacttcacaggtgatcttttagctctcctctcctccttcgccttctgcaagagcacttgagaagggccgaagacagggagttggtgagtgaggcagaatcttttgcagctggggttccttgaggatctaattggtcatgcccactaggggtgaccagccatctggttttcccaggactttcctagtcttagcacttttaagtgctgcattctgggaaacctttctgtcctaggcaaactgagaccactggttaccctaatgccagctcacagtctgcctttaaaattttgtaaaacattcagctggcttacccttccttgtcaactcagttctaaaggcattaggtggcaccaaacatggtagacatttgtgtggggtgggaggcagtgggaagggactgggatgacccagagcaggatatcaaagccccggtaaggtgtccatgtgggagtggagcagtctccagaaataatcctgatgaattaagagagcaatgcatatctttctagactatttttgtgcatgtaataatatatctataagtggaatcatattcattcaatgaatattactgatcacctgtaatgtgttagacactgagtttcataatggagacttgttgcataaaattgacaagctctttgccttcaggaaacttaaagagtattaaatgagtgttaagtaaatgatgtctaatatctgcctggggtagaaatgttagtgataactcaccaatatttattcagtgcgggttacaaaacttatttcagtatgtcaaagaacggaacttagagctttccatgttaaatgccaatatcgttcaagatgttaataagttgtttgcctcgatcaaaaagattctgcagccaaacacatttagaagacacttgaactatattcctctccttaattgacaattcatactaacacttttaaagctttgagaagtcctgcaatcgagaaatgtgtttaacccagaattttctaagtttatttgtccacagcattcttttggccacagaatatctcgtaatatttctatgagtgctatagtttttttaaacagtttgggaaatgttattaaaaattgtaacaaatgaagggggaacttgacacatctctttaattatagggaaattttatttttatttttaacctagagattttattttttcttttaatttaaggaagtgttgatggcgtctctgaatccaagttgcaaatctgtgttgaaccaacttcccaaaagctgatgccaggcagcacattggttttacagtgtgttgctgttggaagccctattcctcactaccagtggttcaaaaatgaattaccattaacacatgagaccaaaaagctatacatggtaggaagttgattttggggtcttttgggggagttaacatgtaaaacaaatggtacaattgaaatataaggtgaacattaaaactcatatcctttcagatgttttaatgttttcagtatttttatttaaagtcccttatgatttcatattaactagctcttatatttgctaaagtgctagaattcaactcaggcttatatgtaaaatgtcaaatagtattgcatgaaactcagcactgttggaatcattacaacatttacttgctggtatttaacctgatgaatggagctaatgtaacaaatgtctaaagccttctaagatgttatgttttggagcgtatttttaaaacacaaaatgattttttctccaagccattaaaatagaagaggaagcatttacatgttctaatattgatataggtgccttatgtggatttggaacaccaaggaacctactggtgtcatgtatataatgatcgagacagtcaagatagcaagaaggtagaaatcatcataggtaagaagtatttccccagtgttctgacaagtggactataatataagctatataaactgcaacgtttaattaagcaaaggaaattatactttttaccccatactatttaatgatgtgttaagcattagaagttatattgtttatattgaaatttgaaagaatgcatactaaaatcataatctaggttcacagaaagcaaaaagaatcaggaaaaaaagccattttgtttaaattattttagttacagtttattttcaacacttatgataaaatatgtattctttaaagctttagctacaaaaaacttgattcagtgggaaaagatttttggccaggtgcagtggctcacacctgtaatcccatcacttttggaggccaaaggttggtggttcagttgagcccaggagtttgagaccagcccgggcaacatagtgagattccatctctaatacaaataaataaataaattagctaggcatggtggcatgcacttggtcccagctacttgggaggctaaggtgggaggattgcttcaggctgggaggttgaattaaaaataataataataaaagaaaaagatttttaataaaacatttttaaaaacaaacattatacacatataaaggaaagaaaggttattaacaatcccattcttaactgcgtaatttgggaatttgttatatttcagcttaatatatttatagttatattgttcatagttggaggtattgatgcatgtgttggtttgccaacattatctctatgatattgatctctatttgcttgacggctgcccttcttaagatcatgaattacaatatattcaaatttgttttttctgaaacaaggaagaacagatgaggcagtggagtgcactgaaggtagtgtaagtctttggtttgaaaccaaatctcctgcatgctagttactcttgggattggtggagtgcttttagcctactgagtgcagtgatggaaaaaatactagctgtaagaaatgattttgattgaagaatattgtattttaatctttgaagttttataaatggacagacatgattaaattgacacagtattacaataactaatcttcagttgactttcttttaatattacatataagaacaaagttcctgcattgtatcttttgagtagtgaacatttgcaattaattcttaatgttaatttttatctacataaaatttgtaagaaagataggtggctacgtgatcatggatatttgttttagattattttgtctgtcctttagccatgattagatgctctcaaatgaaatttagtttttataaaagtttcaggagaggagatttattgtttaacatatgttctatgaaatattaaatattctgtattaatataaaattgatcaggattttttgaagctacaggactctagataatctaccatgtcacctttaccataatatgtaaagggaactgaaaatctatttcaacataaacttctaatttgttttaattagccaaagcattgtacttaaattgtaatgagtaaatattaaaatttggatcatctttccttagtgtgatgtcacattgttttgcaaaattagatttgtggatggcaaagtatttttttcaatttctgcctctattacataagcttaggctctacttgggtaaagtaaggaaataatgttaaattttatattttctgattttcctgtccttcatgtctctatagtatcactctgaaatactataattactgttttcatcctaatatgtagttgcaaacaagaattctctcttgtaagagagttctaatcccatgatctgttaaccctgtttgagggaagccatgtgaagaaatcctaatcgaactcctcttcctctcctaatcctttttgcctaattgcatggtttttaagtcttcctaatgttggaaacctcttaagaataaatataagctagccccgctgtttggctccaaggtgatgcatgtgaattatcaccttgctgtgctgcttctgtacctgcagtattctctataatttttgcagtagcaagcacactattaaataataattttcaaataactctatttagaacatatagagatgaaaatccagttacgaagtttctccagaagtctcagatgaaaaaattagatccaaatttttttcaatgaaagtccacaaaattgagaattgcatatgaacagtgtcctttattatatatatatttttacctatttagcatggtgtcctctatttcattttgtgtattttattcaagagacttgatcagactattcagccataaaaaaggaatgaaatgatgtcacttgcagccacatggatggaacagtcattatgttaagtgaaataagccaggcacagaaagacaaatatcatatgttcttacttatctatgggagctaaaaaagttgatctcatggaggtagagagtagattgagactggcaagaggcttgggggtggatgaagagaggttggttgataagtacagacctgcagttagaaggaatcagttctagtgtttgatagcacagtagggtgacaataggtaacagctatttaccatgtctctcaaaatagctagaagtgaaatgttccccacacaaagaaataagtgtctgagatgatggatatcctaaataccctgatttgatcattatatatcatatgcatgtgtcaaaatatcatatgtatcccataaatatgtacgattattatgtatgaatgaaaaaaagatacttgatcaggatgaggggtgcgggttgaataggtggatttttttagggcagtggaactattctgtatgattaatgatgaatacatgtatacaaattttaatcatttaggaggtcagaggagggggattccaagatggaatacagactataagaaaagaacctaactgtattgcaaatgtatggtacagcctcactgaagaggggtgaaagagtacagtgctactgacctaaataactaagtaactgggaatgagttgagcctaatactgaaggcaaaaaaaattgcacataacacatgtgctgactcagaccttcttcaattgattttatgtaacatataagaataaagtttctacattaaaaaagtatgaatagtatataacatttgtaatttattgttaatgttaatttttatcttcataaaacttgaaaaaatagatagctataatgtcattacttattttacctatccattggccatgataagatgtcccatggggtacaggttaattctgaaaccactatttctcccaaaaacaccttacaccttgagaaactatgaatctaaccatgagaaaaacatcaaatctcagttgagtgacattctgcaaaatacctgacagttactcctcaaaaccgtcagtgtcatcacagacaaggaacacctgagcaggtgtcagaaccaagaagatacaagcctgaggagacacaagcagttgtaatgtgagatcctgaatggagtccctgagcaaaaaagaccattaatggttcattagttgtgacaaatatactattctagcataagacgtgacaaatacactaggctaacataagatgttaataatagagaaattaggtatggggtatataggaactctctctgcactaccttcacagtagttctgtaaaccttaaaatgttctaaaattaaaagttgacttaaaaagatcatttgagattactgtttttaattagccagaatatctaaaactatgaataaattatgaaagagcctagtttttgtcacttaatgaaaacagtgatggcttagaagtcctaaatgataagcacagcaatattcactattctttgctattcagtatttgcatggcttcttcatttaatttgaaaagttgtaaactgataaaacactataacatgattcactggctcaaaactacttggattagtcttactatttgtgctaaattggtgtttagattacttaatctattttctcttactttgttttagatgaattaaataatcttggtcatcctggtgagtaatacaaacataaaactttagttttagatttttaagttgttgaatgcagcaaagttaccgtaggtactcttttgctacagtaatactagtaacttttttctctttattgaaataatataatttaaggttgaaattaactacatgaagtacaattttatacaagtgatacattaaaaatattttaggttataaaactgtaagggtagaaaagaagtgtttgaggtaacataaaacctcaaggtattatcattgtgtattactccttatatcataacaaggaagttaatgggggaagtacgtgacctttaatctgaaagcaggaagcagtgtttgacagagtgacaggggtaacatttctgaactgatcagacccctgggacctttttcttggtgcctcagtcatacagcatatctgaactagttgggtgggtgcctatatctggagtaagaagtgtgtttgtggggatcattggcatcgtacaggtcggttggtcagtgaccatttcttaatgagtgacagttgtcaagagtatgtagaactctgtaggctaattttaattagaacagatttctaataagttaagccttcacctgagataaaaggcatatcaacagtgagaactacatgaagacacaggatatcaacctcgtgtaggctttctgaaagacaatgatggaacctgtggatagatctgaaaataaaacctttcaggaatagtttaagaaggtggttatgtcatttaatatttgtagaaaaccctattacttctccacttatttctcattattttagcatcattactagtttgcttagtgtcatactcatattgcattagcaaacatctattattgtgaatgccattgggctgtgctgactgtatataagcaaactagacacagcagaaagtccccattacctgtgcgtcattctccttgctgtagtgtcctcaaattcacataaagcctcaatgagacctgcctcaagtaggtcttgaactgtcaaaaaccatcctagtaattgtttctcttactgggggagaatagggggtctggatagaatcccctttcctaaattagtctgttaattcttgcttttctttaatgaacattatgaaaagttatttcagaaaaacttttgtaaatagccaccactaagattctaaaattttcctggccctttgagtttttcctcatttcccacaattcagggagtaccaaaaatttaggtttaaaagaagaatgttgtatagggaaagcttttaataggcttcagtggcatgtatttgaccagtagtacaaagttatctcccgacagtagtggacacacaactgatgaactacatctttccctacatggtgcttcaggtgcggggcgggattttattttatgtatactagagggtgaaagcatagaatccagaaggagactccctaagttagtatccagatttgctacttactagcttcataactttgggcaagtgactttaatctctctctgccttaatttccttatctatataatggggttaataatagtaggcacctcatagggtagagtgaggtttcattagatctgttatatataaagcatatagaacggtgccagctgaggcatcaggaaatggtaactactgctacttcctattgtgaacaccaccatcgtttttttccattcaagagtgtttttattaaaaatctgaagagtagaaactatattctgtaagtgatgctgctgatgttatatacttttcatgtatctttaactctggaaatataccatggatcttacatgttttgcttttttatctttgtatagataataaagagcaaacaactgaccagcctttgggtgagtagaactttaaaatgcattatcaaagtataattattgtgtataactccagaaggaatttaagacattttaatttggttttttaaagaaatgtgaataacattgggaccaaatgttttatttttttgtatctgtaaaagaaggtttagaagaggaggcttaaaaatgattacaaattcagtttctagggtcaagtcaacttctgtggagtgatttgtgtgtttctcacgatatgcaaacagacatgcgtacaaaaagaaacatgtacatgctgcatagttagcatagaggaggaagtggttagtgctgtctcttggtgagggatagaaatcacaaaggctgcagtagctttagcgtttgctcccctgtcttctccaatggaaagagaaaagaatttaggataaaatgtaaacgaacagttgcatttgaagaatgcctgggacaagaaaatgtaagggagaaaactttagcagataaaagtttagcagattaacatttaaagatggtaaaaatagctaacagcttgatgctggcagaagccagataaaatatgtctaaaatttgtccattggattcagctactgaagatgtgattggtggctttgagtggaatgttgaaagtgcctaatatgtgtcagttactgagttatgctgggaatttaaacatggatacaatgtataaaatagtggaaaaagaaagattcagaagtgaacaaatgaagacagtacatattaatttgttggaaagaaagagtggtttgaaattaactagatagggcatatattcaaagtgttttggtaggaggggaaaatgtgaggatatttacatttggaaaggaagtatctgttgagactgtgtagattagagtgatccatcaaagagaggacaatttatagagcaagttcctagaagagatgatagggatttgggccaaggtgaaaacaagagaaattggctttaatcagaatgttgaaacctcttttgagattaaaaagaaggagagattggtgaacagatagatttattgggaagctgaggacatttttagtttatgttttttgtttctaagtaattaggcgtagtaatatgcttaaaagattgaggaaaaggctgggcatggtggctcacacctgtagtcccagcactttgtgaggccgaggcaggcaggatcacctggggtcagaagattgagatcagcctaaccaacatggagaaaccccgtctctactaaaaatacaaaaattagctgggcattgtggtgcatgcctgtaatcccagctacgtaggaggctgaggcagaagaatctcttgaacccgagaggtggaggttgtggtgagctgagatcgtgccattgcacttcagctgggcaacgagagtgaaactctgtctcaaaaaaaaaaaaaaagattgagggaaaaagagtaaagtaaggctgaatatagatcttattctatggcagaggcttagaggctaaagaaaatggaagcaaggtcttacaagtctgatctacaagtgaatgtgtattgagagtccaactaagacttttaaagagtaagaatttataatggttcagatcagttgtgtgctttttctgtagcagatctcagctttaaaatagagaagataggctgggtgtggtggtacacgcctgtaatcccagctactcgggaagctgaggcacgagaatcacttgaacccaggaggcggaggttgcagtgagtggagattgtgccactgcactccagcctgggcgacagagtaagactcttgtctcaaaaaaaaaaaaaaaaaaaaagaaacctgctatgtttcattcatagtggtaagttttcatgtattccagctccatgatcttttctttagatcctccagacagacctcactgattaagaaatacctattaaaatagtgttctgaacaaaggcatagccatcatattctgtagagaggagcatacatatgtcttaggtacacaaaatgacaagatccaaatgtaactgggttagttgctgaagatggtttaatcacaaatatgcatttaatagtaatgctaataaactaagtgttttcacctagtgaaatgtttaatttaaccctgagatgtaggtatttttcctcatttttagtagatgaaaatttaaaactgtaagtgtttaataaaacttgctcaggattatacaatgtagtagttgagacaggattgaaacccatctatctctcattccatagcctccgttagctccattatgccaggtattctttctcaaacatgtcccaattgaaagaataacaagataaatggaatatcaggtcaacttctatcattgaagttcactaaacatttatctaatgtttcatctgtgctttatgacaggcatcccccacccccaggctgtggaccagaactggtctgtggcctgttaggaactgagacacacagcaggaggcgagtgagcgagcattaccacctgagctctgcctcctgtcagatcagcagcggcatttgattctcataggagtgtgaaccctattgtgcactccttaggagaatctaactaatgcctgatgatctgagatggaacaatttcatctcaaaaccacccctcccctgacaccgtccatggaaaaattgtcttccacaaaactggtccctggtgccagaaaggttggggaccgctgcttaatgaaacaagagaacaagccttggtttgtgaattcaaggctttggatactaataggaggcagacattaaatgaataatatagtacatgctacatgcctagtagaaatatgtaaagaatctagaaattgttcatagaagatggtgatcagattagtcgaggagagttagagagggctttacctaagaggcaaagccaaggtgaggattttcaaggacgaattgggagctctcaaggggataaaatgaaaatatatgggatgagagttcattcagaaatgaaggagagggaaaaaagggtgaagacatggtaagaatggaggcatgaaatagatggtgtgggtgaggaacaaagttcagtattgctagaaggtagaaaactagggaaggagtggctggaggctatactggtaatgtagttatttattgctgaataacactgcaaaatttactagcttaagaacagcatcagttttattatctctcattgttctgtgggttggactgggtttagcaggtggttctgctggtctttcttggggtctctcatgcaactgcagtcagatgaggctgggactgccacattcaagatggctttgcttacatacctggcaccttagtgggggttggtgaaagactgtgaagactgaaaaaatctccctccctctctctctctctttctcttcctcttactctgtctctctgtctctccctctccttgtctgtctctctctgtcctcccctcctcttcccgcccccaacttctttctcttcgtttccctctccctctttcctttggttccttctccctccctgagtggtctctccatgtagctgttttctttatgtcgggctggatctccaaagtggaaactgtcagagcttttaagggcttagaccctgaactggcagaggggtcacacatattatgttgctcaaagaaagtcgtgatacagcccagattcacaggtgggggtgactgtactacacaagggcaaggatactgtggtttgctgggggctacctgctaccacatctggaaagataggcatggactagaatgcaaatggccttgaatgccaaactacatcaccagtctaacccccagccactccttccctagtcctctaccttccagcaatactgagctgcctgttcctcacccacaccatcaaactgggactttattttgtaggacatggagagtcattaaaagatttaatacatgtgatttttaaataaatacttaatagcatttactatatgccagctccttttctaggtgcttctgaatattaactctatttagaaaagtaacataataatcagaattattagacatgggattaatgatataacaccagtttttgaagaatatattacattaaactttggaagacgtttaggatcatgagttaaaatgtctttctgaagtggcttcattattcttttgctgaatccactggcatttttgtttcacttttccaataaattgtttgtgttcaagaagttgtgggtagctcttacagtaaatatttttctacagaaaaactctttcatttatgttatcacttgaaaaccattataaattgctttatatttgccgtcttgaagttttctttattcctcactcttacctcctcaaattcaagttttattgttcgtttctctgtcgtgtcctttttcctctccctttctactacttctcgatcttccatccaccccagttcacctgtcacccaggaactgttttacaagtagattggacaggtaagatttacttacccaccatctttttcaccagtaaagtcaaggaaatgctgtaagacatcttaggaactagctattaaaaattatcattggaggaaaattttagaagtgttatagacaattatcgatacatatgttttaagacctgtagttctcacactgttgaacccgtgcattctgtaaactgtaccaagtattctttcccaaatagagaacaaaaccagtgaataatgatttgatatcagcaaaaacatcccatgatgcttagtttgacagttaattttatttccccaaagacccagtgatttttttattatatacttataattgttttctaccaataaaaatctatgatgtgtataattaaatgatggtattccatggaaaaatggaattatttacaagcattttactaccccagtaactttttaacctcttgctgtaaacctatgatttggactataatgatgtaaagcagagacaatgcattctcacatttcccctcaccttagaagaagactgatttgagtctgtcactctgttgaggttggatccttattctaatagcattgatggactcaaaaaaatgtgctgtggatcagccagctaagagtcttgctgtagcaggtactttagtgtaagaatactagtttattttaaaagaaattttaaaaaggccaggcgtggtggctcacacctgtaatcccagcactttggaaggccgaggtgggcagatcacctgaggtcaggagttcgagaccaccccgacctaagtggagaaaccccatctctactaaaaatacaaaattagctgggcgtggtggcgcatgcctgtaatcccagctactcgggaggctgaggtgggagaatcgcttgaacccgggaggcagaaggttgcagtgagctgagatcatgccattgcactccagcctgggcaacaagagcgaaactccgtctcaaaaaaaaggaaatacaagtgatgttaagttttatgctgcctcctattgaaatccatgctgagtattctccgctttttcattgaattaataatgcggcttaagtatcatttcactgttatgtatattcataacactgggcagttggctagaaatctctgaacatgtacatatagaatagagatgacatgatataaaattactgaggcttttcacaaagtagagttttttttatcctttgagagagtcacagtcttttaaattgatgctagttttaacactaggtttaagtgttccatggaaagaaaagcaatttcaccagagagatttttggtgaaataatcatctcaattatttgaaacatctgaaattacatattgtagacgtcgagtcagcaatgtgattattcatgcctgtttcaacttcataagagtagtattcataataacttacaaataaactacttagcagcactttgtggcaggggttggttaccaagtcctggcctgcgtcagagggggtggcctgcagttctacccaggcggctcttcagccagttggctggggctgcaggtgctcttgtcaccctgtctctctgctccctggcatttctgtcactgctgctactattacgggtgctgcacacgccccactgtcagccctcaagaagaaagccgtcagaggctattattgtcacgggatggtcttgaggttttggtgtgttctttatttttttttttttatttttttcttccctttgataccagtgggtcttgagtttttaaccattgaccccattccaggctatcaaagaaaggtaccgtgttgaagacctcataagcactaagctaggtctggctttccacactgttttagatgggctgcacacctggttaagctagctgctactttttaaggcatagatacagatctttttttctcttatgaacaaaaaaactgtttctatcagaatacattatctttgagcaaagtctcagtgcactaagttcaaaaaatgaacttttaaggtactcatacacaaaatcttcacatacccctgaaatagcctcatctgagtcaaatgggggagtatttttaaaagatgctaagaggagacggtagtacatccacatggctactgcagaaaccaagaatacagtacccgtgaagttctctctctctttgatatttcccctcattcactctgatgggattcttcctgtcccttttttagttatcttgtttttagcctcttccattctcagcaaaacagaacctaatttgatgggaacccaatttcaaatattccttgtttaaattttctccaaaagtctagttgaatattatatcccttttgttataatttaataaaagtaaactttaatattaattactgttatgtttcatatacagctaataaatatcctttgcctggctctcaaaagtgtgaatatgcttaatttcagtttgatgattttagcatctgtgttcctcagagaatattgatctgcttacataaatagttctaaaatgaaattaaataatgaaatcttatttgaaatgaaataatgcaatcttaaagcatactttttattataataccatctccataggttttgttttaatctttatatcttctttaaacaccccctttctttttttttcaaagcgaaggacaaggttgcccttttgataggaaatatgaattaccgggagcaccccaagctcaaagctcctttggtggatgtgtacgaattgactaacttactgagacagctggacttcaaagtggtttcactgttggatcttactgaatatgagatgcgtaatgctgtggatgagtttttactccttttagacaagggagtatatggtaagatatttataatgtttgtttttacaattatccattattcttttcattatacaagttaggttaagaattgaaaatcagataaagataaggtaaacatgttgttgaatggaagagttttatttttcttattaagatgatacatttgatcttcattccatctgaataactaattagcttcatgtctttacttttatgtttcctgttttgtcaaaacatatttttcttactagaattcttacctgtcttttgtgatttttttttaattgatagagccacagtataataaaacttgataaccacacagcaaaatttacattcatatgcgtaaaatattacagtatgtggggttttctttgaggggggtagcataaaaggttctagtagaatgtatattttgtatgtttccttttcctaactattgcatggtcttttctagtcttttagtgagaactagattttaacaaggaaatgttggtggatggggcatataatagtaatttgtaaattaaagttctatacagatatgcttagaaatgtacctctacaaaaattcttacagtaaatatttaatgttttttccccattctttcacctaaatatattaacactgcatatatggtaaagaatttcaaaggagacagaatgtgctgtcactagctaatcatttatttggtgatttatttctttcaatatgggaaggccagctgttgagctcatctgaaccgtgttttgcaggattgtgcttccatgacattgtgcaataacatcagattgccagggaagtgacatttccaggcctgttgttaggcatgcaatgataaacaaaaagtaccggtttggctcctgtatctttccagttattttattttaataatttctgaatttactcttgttatttataattagattgatatgataaggcaagtttggtcagaatttttaatggtgctcaaagtagaatttttaatggaacaaaagctttttttttccccccaagatttaccacactgttgtgtaagggatggggaaaagtctcaaaatcttacttaaatgagtttccctctctaaatagtgaggatttagagaaagacaaatgaagttaacaaggtaaacacctcaaatgtgagatttcagctattatgctgatgtgttaataaaactttatttataactcttatggactgatgactaatgggtgaatccatccatttttttcttatgaaaatatgaaagaatatacaatgcaaatatgccaccttggtaattggcttatacaggttgagcattcctaatctgaaaatccaaagtctaaaacttcgtgagtgccaacatgatgccacaagtggaaaattttacaccttacgtcatgaggggtcgcagttaaaactttgtatcatgcacaaaattatttaaaatattgtataaaattaccttcaggctatgtgtataatatgtatatgaaacataaatgaggctgggcatggtggctcatgcctgtaatctcagcactttgggaggccgaggtgggtggatcacttgagcccaggagtttgagaccagcctgggcaacatggcgaaaccccatctctactaaaaatacaaaaattgggccggacgcagtggcttacgtctgtaatcccagcactttgggaggccaaggcaggcagatcacctgaggtcaggagttcgagaccctcctgtccaacatggtgaaatcccatctctactaaaaatgtatggtggcagtcatctgtaatcccagctactcaagaggctgaggcaggagaatggtttaaacccgggaggtgaaggttgcagtaagccgagatcacaccactgcacttcagcctgggtgacagagcaagactccgtctcaaaaaaaaaaaaaatagaataaaataaaataaaaacacgaaaattagctgggcgtggtggtgcatgcctgtaatcccagctactcaagaggctgagacacaagaatcgcttgaacccaggaggcagaggttgcagtgaaccaagatcacaccactgtactgcagcctaggcgacagaatgagacttggaatcttggtctcaaaaaagaaaagaaaaacataaatgagtttcatgtttagacttgggtggcatccccaagataacctcattatgtatacgtaaatattccaaaatctggaaaaaaaaaatctgaaacacttctggtcccaagtctttcggataaaggatactcaacctgtattttcaatctggcatcaggggtgttgtttgtttttatattatacaattgatctcagcttttaaggtgcctacgtgacataaaaaggaaaaggcttccaaaacttcactagaagtgatgaggtgtaaggaaaaaatattgatcagtttaggtttctgtattggtgaagtatttaaagattgagggaatcatatgaagaattactaccttggttgtttattctcatttcttattgatattttcaccttggcttttaagccctttgtttgacttttaaaaccaaatcctgtggccagggcatggcggctcacacctgtaatcccagcactttgggaggccaaggcgggcagatcacctaaggtcaggagttcgagaccagcctggccaacatggtgaaaccccgtctctactaaaagtacaaaaattagcccagcgtgatggtgggcacctgtaatcccagctacttgggaagctgaggcaggagaatcacttgaacttgggagggggaggttgcagtgagccaagatcatgccactgcactccagcctgggcaacaaagcgagactccatctcaaaataacaaaaacagatcctttagttgcccctgtgaagtagagaaccagaaatattaaaaattgtgacaagactgcagtttaggctgaagctttgccccaatataaaaacgtcatcttggagtacaaaataaagaggcatgttaaagcaaaatgtcagcttaagaaagctagaaaacttttaaatcctactgattcgtgtcttaacagggtggctgcattatattttgaagtattgtgaatattccaaacatcagacacatctacactaaatgtaagtgtggtagaggcttgagggtttagggcatatcataaagaaacctttagtttttcttttggactatgcctttaccgctagttgatattaccaggggactcagtgcttgagggctgtgggggaagatggaaggcagagtcacaggaatttcagcatgaacagctagatacggagaacagaggaactcgagttcatgcccttttatattatattgcacgcaggtttgtagaagaaataaaagttgcaacagaacagacaataattcagttttaaacatatgtaaacataaaaaacagaaaccaaaaccagaaataactgtccttaaaaatacaaaaatacatgtccttaaagataaataaggagaaagatttctagttatgttgtatagatggccaggataaaaagtaaccctttggcctgagatctatccctgcatagcctttctgtgttcatcgcttgctgcagcttagttgtgctttcgtgtagaagaacggtaaaggagtcttgtcggaatatggcaaaagtgttattcggcctgcagcggagcagctgttcagttcacatagctcagtggttaagcagtgggccttagcatagctagcctgggttcaaagctttggctttctgctgacttagctgtgtgactgtggttctttaacttttctaagccaaaaggaatctacaaaatggatagaactaaattaatgaggtttacaggataagataaaataattatccctgtgcctggcacactaaaaatgctcaaaatattgtacctattattgttgtcgtttcctgtcaatttattaaagacattcaagcactttttcatctttagattggggatttggactaggtagcattctatttcaggcctcaatgagagaaacccagctttaatcagtttctgtgtattaagggtctacctaaggttttttgggttttttttttggttttgggtttttgtttgttttgttttttgatacggatggagtcttgctctgtcgcccaggctggagtgcggtggcgcaatctcggctcacggcaacctctgcctcctgggttcaagcagttctcctgcctgagcccccagagtagctgggattacaggcacatgccaccaacgcctggctaattttttgtatttttagtagagacaggcttcactgtgttagccaggatggtctcgctctatctcctgaccttgtgatccacccaccttggcctcccaaaaggccaggcgtgagccactgcacccagcctgccaaaggttttttgtgtttttttttttgttttttttttttttgaggaaaaaaagtcagggggtttaaagctgtagtgtagtaaaacagtgaaaagccagtgcactgacattttacgttgtctgagagtcgagttacctaaaaagccagcagtagattatagagacagtatcatatagcacagtagcgaggctggcctgcatctgtattttggttctgtcacttactaggcatttcagtttgggtgagcttttaaacctcttcatgtctcagttttcccatctgtaaaagagggatgttaatattacctactttgttgtgaggattgtgtgaggcaatgtaactagtgacctttcttggaaccgtgcctggcacatagtaagtgccgtgtaagcctgctggggtggcgggtgttgtgctcatcagccactcactgtgctaagtggagtgcatattcagttgagtggaaaagtttttcatttaaatgattattttctctgtagacaaaaataaatatctgtgactatattcttgaatcatcctcccaagaaataaaactccctaaagatctaatttgcagaattgtatttctaagtacagtaagttctttgacatttgtttaaaaaatacctattttcttctctatccttgagtaatgggatggttaactaaataaataagcagtactagagatggaatttaaaaacaacaacaacaacgatttgggccacacacggtggctcacacctataatcctaacagtgggaagctaaggtgggagggttgcttgagcccaggagtttgagaccagccttggacaatatagtgagacctcatctctacaaaaaatttaaaaattagccaggcatggtggcacatgcctgtggtcccagctacttgggaggctaaggtgggaggatagcttgagcctgtgaggtcgaagctgcagtgagctgtgatcacactgctgcactccagtatgggcaacagagcaagaccctgtctcaaataaataaataaataaattttttaaaaaaatgatttggactagttcattttacacaaaagtacttaattcccctcaatataatttggttgcagactttgatacagaatagttacacttttcgtaagacattttgggaaagagaaaaaatattttggtgttaagtgccttaattccattcagcagttgcagggctgggcatgtggcattaatgtaacagaacaacattcagcttttccctggatgaatggaagctaagccttccctcagagttgtatcttcaccccaatcaagtcttgctggagccagacgtattacctgacatgagggaggcagcacccaggcctgctgtcagtcgtctctgagtaataccagttgttgaaatggtaccatttctactaaaagtcagacccttgaaaagagacctccagatctgaccctgtcttgattggtttgcattgttaatttaatgcaattcagtaagtatttactgagttatttttgttacatctatagtccagatgaaggagtatgctatgtgctgagagaaataatagtgaataaagatcatgatctgtcctcctaagaaaattacagtcctgggccgggcacggtggctcaacgcctgtaatcccagcactttgggaggccgaggcaggcagatcacctgaggtctggagtttgagaccagcctgaccaacatggagaaaccctgtctctactaaaaatacaaaattggctgggcatggtggcgtatgcctgtaatcccagctacccgggaggctgaggcaggagaatcacttgaacccgggaggcggaggttgcagtgagctgagatcacaccattgcactccagcctgggcaacaagagtgaaactccgtctcaaaaaaaaaaaaaaaagaaaaaaaaaattatagtcctttaatacaaggagaaaaaaacactatggagtcaaaacatcaactctgtgattttaagcaaatcatttaatctttgtaatttaattttctcatctataaaataagggcagaaatcacttaaagttgttatatggattaaaattagattgtgtatatgaaagtcctttgaaaaccaagaaaatgttatacaggttgaatatctctaatctgaaaatcccaaatccaaaacactcctggtcccaaacatttcagataagagctactcagagtgtgtaaatgtaaaagattagtgtcattatgatttcttatcagaaaaactaagtagacataggactatagaatgtcaggaaaagccagtatgtgattgtcagaaagtgctgctacagcatttcaaagtagggagaatttgaagtgtgttagaaagccacaaaccagttaccaggtagtagttaccaggtgagtaacttgctaaggattctgaactttggaaataacccttgaggactggttatggtttgggtagatagaacggagatagagtaacttgagcaaagttgtggacgttaaaaataagtttatcttgctcttgaagcagtaaagagactgatggaaaataaagttatattttgaatacttgatggaggtgtataagttgtaccctttttaaagtgtataatttggtgatttcagtatcttcacaaagtgggcatcagtcaccactacctaacttcagaacatttccatcaccccaaaaagaaaccccatatccattaacagtcactcccattcctccttaccccagcccctggcaaccaccaatctattttctgtttctgtggatttgcctattctggacatttcatataaatggaatcacccaatatgtggccttttatgtctgccttctttcacttcacatgttttcaaagttcattcatattgtagcatgtactagaacttcattattttagggctagataatattctattatatgattatattttgtttatccatttatcatctcatggacatttttggacatgattaataatactgctgtgagcatttgtgtacacattcttgtgtggacgtagtttccatttctcttcggtatgtacctggaagtgaaattcctgggtcatatggtaatctatatttaactttttgaggaactgcaaaactctttccaaagttcttacaccattttacatttgtgccaccagaaatgaatgagggttccaatttctctgcatccttgccaacacttgttcttgtctgtcttttttattgtagccatcctggtgagtttaaaatgacttggaactagtggctaatgatgttgagcatcttttcatgtgcatatttgccactcatatatcctctttggagaagcatcagatcctttgcctatttttaaatcaagtcattagtcttttttttttgagatggagtcttgccctgttgcccaggctggagtgctagtggcacgatctcagcttactgcaacctctgcctcccaggttcaagcgattctcctgccttagcctcccaagtagctgggattacaggctcccaccaccacacttagctggatttttgtatttttagtagaaacggggtttcaccatgttggccaggctggtcttgaactcctgacctcaggtgatccacccaccttggcctcccaaagtgctgggattacaggcttgagcctccgcgcctggccgtcattagtctttttattgatgagtggaagagttctttattctggatacaagctgtccttatcagataaatgatttgcaaatattttctcccattgtgtgggttgtcttttcactttacctgatcttcgtggtttattgaattaaatccattcttttggtcattatttttaaaaccctatctgtgcactcctttttaaaattccctgtgtgtgcagtcttattttcattcacaacagtaatttagttttttgctaggctagtctcttttctgttagctttcattccaggtccaatccgtgtttatttctgttctcctgcccataatctacctcgctctctctctgcctttgcaaatttctagccattccctctcttaagaccatcccctgttgtttcacttcatactgatattcctctctactttactcatttcatacgtacatggtggttgtcccactaacatgatttatggcatttaattatgtgatgactttcattgttgcttgataacataaacgtgtgaatcgtgtgaattcatgtatggagatacatgaatctcctgatctcctgcttagaggtcaggaactttgtccttcttttttgtttctctcagtgcctacatgataacttccagtgcacacatgagctgtaatataaacccacacttgaaaatgggtatatccattttctcattttagctgaaacgtatttgaaagaaccatttttctcattttaatcgaaattcagaaaaagcagacgacctggattttgtcctgtaggaccacatgaagcaaattgtctttaattctcaaagccgcattctctgctaggagtcggggccataattacaatggattagctacttttggttccctgtctaaatggcttttactatttgctttaaaataccctgtaaagaaatcattaaatccagaatattgagagagcaaaatcagtgggctccagatattgcaagcagaggggaggatatcttcaaaagtgttttgtccagtacttttatgaagaagttcagactgatatttttgttgttttttacagccaaaacaaatttcaagaaaacattgagttgtttgggttagtttttatagtatcacttctcagtaaggaaatatgattcatctgttgagtcctaaaactatcccaaattttagattattgagtcaaaagactctagatggaagattgatatttatatctcatagcaaaaagaaaaaatagcaatctgcgaagtcagatttcccatctctgattataaaactatatattttaataacccttaactgtttatggtaatacctgcagtttcttgacttcatattgcagttgctattcatctgaattgtgtttgttcatccgttaaatacttactaagctcctgctctctatgccaggaacacacaaataaataaatgtaagactatctctgccctaacagaactcctagcttcatggaggagacaaatgagtcaggagagaaatcctagctgcattcttttttatatatcataacataaaattgtattttatattatactattggttacaaatatattttataaattaggatatacttcagacagcattttgatattgtcttgaaatgcaaattttaagtgcagactgttggtaatttatttatttatttatttattttgagacagagttttgctctgtcgcccagggtggagtacagtggcatgatctcagcttacagcaatctccacctccaaggttcaagtgattctcctgcctcagtctcccaagtagctgggattacaggtgcccaccaccacgcccagccaatttttgtatttttaggagagatggggtttcaccacgttggccaggctggtttcgaacccctgacctcaagtgatctgcctgcctcggcctcccaaagtgctgggattataggtgtgagccgtcatgcctggcctgttgccaataattttaaatgcaaaataacattgtctatatttataattgggtatttcttacatatgctcacatcaacctgaagaaaattaaagtcaaggtttttctacaaaaagttatgcagtctgtatgttcagagtgcatttagaattgacatctatctctctcttatttttcctcttttcagggttattatattatgcaggacatggttatgaaaattttgggaacagcttcatggtccccgttgatgctccaaatccatataggtctgaaaattgtctgtgtgtacaaaatatactgaaattgatgcaagaaaaagaaactggacttaatgtgttcttattggatatgtgtaggaaaaggtaagttttctaatctttattaaagaattgttggagttaaatatcgaccatgacaaactagagaaacctgtgaaatgctaaaagccatttgcgtttgtgaattttagtttatacattgaaactggaagaacaaaactagaggaaaatacatttactccatgtatatctaattattttaactcttcatatttgctatagaacacaaatgaagaactaaagggcatgggcatttactcacactacaggggattcaactctccagaatgcctttagatgactttaataatcactatagttattccctcaggaattaacaaaaccaacacccatggagttgggatctctgctcactagtcagtcctggtcttccagacatggaatgagtagccgaagcagatgtttggaggtttggatcccatttgtctgccattgcctttctaaggagtagaaccaatgactgttcctctagatttactatttttttgcttgctcagcatttaccaatcaaaatccaatgccagagttcaaatgcaactctagttttaaagctaacaaggagttagtgggttattttgggtagatatgtagctacctagatgaaaaattttgaatctataattttaaattatgtattctaaaaaactgttgtattttctcattatttatacccttttaagaatgctctttaacttttcatatttctatctgccctcctccgcctcccttaaatagaaatgactacgatgataccattccaatcttggatgcactaaaagtcaccgccaatattgtgtttggatatgccacgtaagaacatttgatgtttacgttgaagtttcctttattgtttgatgtctttttgtttttgctttttaggagcaggggtcttaactctgtcacccaggctggagtgcagaggcgccatcatagctcactgctcctgggctcaagcgatcctcctgcctcagccttctgagtcgctgggattacaggcatgtgccactgtgcctggcccctgagggttttttgattatagattagaggcctagaaaatacctatagacatgtaggcataaatttacctccttgatattctgcgtagaaaattttaaatgatcgactttagcattccatatcatggtatcttaattattaagcccaaattgggcatgtaattcctgcttaaagattaactctttaattatcaatgtcatgtgagaggcagaagagaaaatgaagcttattggtgtatacagaagtcccatgtggcaagtgtttgcttttctaacattttctttttaaaaaattatttttattggatattgacaagttataattgtatgtatttatgggatacaaagatatgctatgatgtacgtattcaatgtggaatgattgaatcaagataattcacatatcacctcaaatacttatcttttttcctaactgaaacattgtaccctgtgactaacagtccccacgctgtccccacccccccccagcctctggtaaccaccattctgctgggtgcttctctgagttcatttttattagcatccacatataagtgagaacatacagtatttgcctttctgtgcctggcttaacttctttttctatttttaaggtgtcaaggagcagaagcttttgaaatccagcattctggattggcaaatggaatctttatgaaatttttaaaagacagattattagaagataagaaaatcactgtgttactggatgaagttgcagaaggtaaaataaaaaataaagagaaaagtactcagaaaaaggagagcaggggagacacacctattcagggttccctctctggtgattgttttattcttattatgtgggtttggaattagtacctactttataaaacaatttttatattaatataacgttcagcaacacttctgctatttaatgtcatctttccttcccttttgacctagctctccaccatctgtgcagcattactcagactacaaggctaagcctcggcacagtcattaataaagttgaattctcagagctctactttgcttctatgcccagtgccttggtactggcaaatctccctatttgagggtgggtgggtggcatggaggggtggtggggaattgtccagtgagcagtctctcccaggatgggagagagaaaactttacagaaatttttagacactgctgggaaaagctgagttcatttttttccctgatgaacttagtagtttttaaatcctgatttaaggatgtgatcctagggggtctaatgccacatcttccatttctatctgttctccctgcctgctggtataatgctgtgcatatgtcagatgctgaacaagtacctattatttcagtagattgcactgtgttttttgaaaaaacattttataagccatagcaaaaagaaggtaacttggccaggtatggtggctcaagcctgtaatcccagcactttgggaagctgaggcaggaggatcacttaaggccaagagttcaagaccagcctaggcaacatagcgagaccctgtcttcaaaataaaaaataaaaataaaaaagaagaaattattttacaaactagcaccactagaaaatggagtttcatggatgttccagtgatggcagtttgggtataaggtgtttgaccaactgtcagccatatttattttcatgtttttatctgtgtagctattttagatcacttgacttagccacttttccatttaacataaccagccagggctttggacttcctgccaccctcccgcttcatccagagaagttccacttttatttgttttctacattaggcttcttctgaagcttacatttgaaggaaaggctctgctgctttaaaaaaaaaaaaagaaagaaagaaaacctttggattatgtcagttatattcaaactgagatccagtaaggtgctccagaaactctacagtgttttatttcaatttcgtttttaagtccattttaactattttaaaacttaataaaaagcaccatgctcactcacatatgatatttaccaaattgtcatagcaatgaatggcatcccgatatgtgctgtgaggatatttgaacttcttataaacatcttagacagttttgcttttcgctgatctttttcagtcctaccatgtctgcttaaccagaattgcccaggcaggaagaccctgtagtgtacatggagcacactcagctcagtgccgtgcacattgtgcccttcgtgggtaacggcccactcattgtacaaaataagtaaaggcctaatagtatcatgataaataatacagttaaatctagcccttattttgagttttggatgctttgtgtctgacccctgtcttagtagtaaagagcaaaagtagttgtatgaaatttttcacaagtcatccaattttgaaacaaaactttgctgtttctccctttggatcttccagattacttaattgaaactcattccatggctgggcatggtggctcacacctgtaatcccagcactttgggaggctgaggtaggaggattgcttgagcccaggaattcaagaccagtctgggcaacacagcaagaccccatctcaatttaaaaaaaaaattatttggggccaggtacagtggctcatgcctgtaatcccagcatttggggaggctgaggcaggagaatcacttgaacacagaagtttgagaccaacctaggcaacattgtcagaccccccatctctataaaaatttaaaaaattagccaggcattatggtgtgcacctgcagtgccagctactcgcgagacttaggtgggaggattgctcgagcctggcagtttgagactgtagtaagtatgaccacaccactgctctccagcatgtgtgacagagcaagccccatctcaaaaaaaaaaaaaaagaaaattccagagggagaaaagtattcacagattataagccaagcagttgaaggggaaaataaacatgttaccaatttctttttttaattttttggtttctttgtgtgagactacagagtctctgtcgcgcaggctagagtgcagtggcatgatcttggcttactgcaacgtccacctcccaggttcaagtgatcctcttgccgcagcctcccaagtagctgggactaaaggcacacaccaccacgtccggctaatttttgtatttttggtagagatagggtttcgccatgttggccaggcctgtctcgaactcctggcctcaagtgatccaccggcctcagcctcccaaagttctgggattacagacgtgagccaccacgcccggcccaccttaccaatttcaactgtgtgcaaggaaaacaaaatatgaggtaaattggttgttataatgctacagccatcaatctgtaacgtgacttttatttttgtactattcaggacagcattattattagaagtgttgaacatactactgaaggttttcattgtgagtagatgttcgatatgaatataggaccttgaagtaacctacatctaattataggacccctcttctcccttcccccactccatgataactaccattctaaacttattcctttttcgttttacatagttttattgagtttatatatacccaaaaaagtatgcgtagttttgtttttaacttcataaaaaggtattatgctctatgtagtcttttgggactagatttttttggttaatattatgttgctaagattgatccctattgttgcatgactgtagtttttaactgctacgtaatattctgttatgcaaacatactacagtttttttcaactactctcctgtgttggtgagcatttgagttagttgtaggtttttgctatgttaacagtgctatcattaacagtcttgtgtatgtctcctggaatatgtatgcatgaatttctttgcagtataattctacaacttggaattgctgggtcatagggtgtgacagtattccattttgagagagaatgccagacagttttgtaaagtggttgccgagtctacacttaaccctactccccacggccagcaagggataatgtgaatctgtactctctccatcacttgatagtcagacttttttatttttgccaaatgttaaatagtatctcatgtgatattgaacattgttcatatttttaatagctatatgtatatcttatgtgaaacatctttttatgtcatttgtgcattcttctgtgtgtgtgtgtgtgtgtgtgttttggcttattgatttagaggaatgttgtatgtgttcttgatataatactagcgaggaccgctaagacacaattgaataggtagttgtgggcatccttgtcttgtttctgactttaaaggaaatactgctaatgtcttcacatttagaataatattgtaagtttttttattaacactttatcaggttaaggaagttctcttaatttttttgaaaatttttattatgaataaatgaacaagattaaatggtttttctgcagctatgaagaagaaaataggatgtttcttttctttcaatttcttaatatggtgagttaaatttatagatagtctaacattaatccaacttgagataaatcactttcattgggatgtatatttttaatacactactagatttaatttgccatcattctgtttagaattttcatatctatattcatatgggaaatgggcctgtaattttactttcttatagtatttggtttaattttatgagaaaataaaattagtatttagtggtatcagtgttatcagtatcagtggcatacagagtatcagtgttatctgatagaatgtagcgtaggccttgtggaatgagatggaggacaaccaagatggttgattttatgtcaacttttgccaggcctcagtgccaagatatttagtccagcattattcaagatgtttctaggtgatggatccaacattattctggataagattaaagtttaaattgatggactttcagtaaagtagattgctctccataatgtgaatgggcctcattcagttagctgaaggccttaatggagcaaagactgacctcccacaagcatggagtttgctagcagcccgcctctggggctcaaactacaactctcctctgcatccccagcctgcctgcctgcaggtttcagacttgcaccgccacaattcataaaccaataccttaagtcagtcccttcttctcactgtccctctatgtacacacatacacacacacacacacacacacgtgtacgtgtacacatgcgcccatcttgttggtactgcttctctggagaactctaatacagaagaagtacaccctgttgtttactgggaacttttgtataaattatgatctgttccctaatgtttatggtagaacttgcctataaaccaacctgggattggtatttttttggtagaagatttttaaccactggttcagtatcttgaatatttcttgtaccatataggcttttcatttcttgagtcaattttgataagttatattttcctaggaatttgggcagttttcaaattcgttgtcatttagttgctcatatttctaatagtattctttaatctctgccttatccatagttatatatccgttttcatcagtattacttgtacttactttccttttttatttattgccagcttttgccaattgtgctatttcattttgaagaaccaatctttgactctgttgatttcttctactttttcattgttttctacatcattaacttctgctgtttatttatgtcttgccttgcatttattatttctttttctaacatcatcgtagttattcacttttagcctattttttccaatttaagtttctaaggctttacatttctcttaaaacatcactttcatcacacatcctataagtttagggattttttttagttgactttttttttctttgacctttaagttatataatattatctttaattttcaaatatggcaggaattttcatttcactttttgctttttatttctaccttaattgctttgtgatcgaataatagtctgtctaattgctatgctttgaaatttgtggaggttttcattatggccaagtaaaagatgaaattttgtaaattttgcatgtgtacttgagaaaaatggatatttttgtagtaactggttgcagaactctatgtatgcccattaggtttggcgtattaatttttattgttttgttcagttctatatttctgctgattgtctctttgatcaataattgagatgttgaaatctctcaatttaccaaattttcttgtagttctagcactttttacttcatatatagtgactattttcgtgttttaaatgtttatattttcttattgaacctttatcattatgtagtgatgcctccatttcaaatgcttcttctctttttgtatcatactaacagagccacaccaacttcctttttgttgacctaatatgctattttttacacttttactttcctactcttaacccctaggctagcctgcttctctacacttttactttcaaacatttcatgtcattctgctttgctgtagcttttggaggcaccatataacagattgtttaaaatccaatctgataatcttggtcttttaatgagaaaatttagttaatttacatttgttattttttgtacctgttttaaccatctaattttttgatttggctcattttcttatcttttttaaaaaaattgtatttatatcttttcttctctaacaaataataattttaatgtactcctacaatacttggtatctccttttaactcccaacatgttgatttaacttagacttagttctggatcactatataattttgtctctttttttaaaaaaaagaaccttactattgttaatttataacatagtagacagaagtaggataaactataacttaaataatatacttctaaatttaaattgatgtgtatccatatacattagtctatctaaaacatgttgaatgaaaatggtacattacaaagacatacatagaacatttttgttgaattcaaaaacctaaaacattggcatatactatttatgaacacttacacacatgagtaaaaattaaaacatgcctgatatgtctggcacataataggtgctcaggaaatatttgttgagtgaataaatgatactgagaatataacctgataatgtaggatagttcttagcctaaatatttaaaacataagaattggtggtcttaaaaataatatttattttcatatcttttagatatgggtaagtgtcaccttaccaaaggcaaacaggctctagagattcgaagtagtttatctgagaagagagcacttactgatccaatacagggaacagaatattctgctgaatctcttgtgcggaatctacagtgggccaaggctcatggtacggtaaagcccattttttgttagatctacaatatacttaacgttaaatcataaagtttcttctgaataaataactttcctcccagttttacagtgaaaatattttggcctactaggcaaatctcaaaccaaacaaatatttcaattatggatattacactggcttatttgatttagaaatatcaaattatttagcccattattgtcactattggtaaaatttaaatgaccatttaaaaatttttctatttttaaaataggttaagtttccatttgtctaatacacaatcctttagattctcctatattgtgacctgtcgaaaatcatggattgggttctgatccagtctctaccactctatgaacatgttatctataacatgtaaataagaaatggtacctgcttcaggctgggtgtggtcgctcacgcctgtaatcctagcactttgggaggccaaggcaggtggatcacctgaggtcaggagttagacaccagcctggacaacatggcaaaacctcgtctctactaaaaatacaaaaagttagcggggtgtggtggcacgtgcctgtaatcccaactactagggtggctgaggcaagagaatctcttgaacctgagaggtggaggttgcagtgcagtgagcagagattgtcccactgcactccagtctgggcgacagagcgagactctgtctcgaaaagaaaaagaaatagtacctgcctcataggttattgggattgaatgagtgcataggtagaaatgagcatggcactcgacaagtcctctgtacttttgattattcgtataactgagcatcctctcttggacacttgatcagtaagttgagtgatcagcagagaagatgacgtgaaaatcaatctgtagcttaattaccttttggtaattgtgtatggtttaatgaaaaaataagtttaaattaccaattgaaataattttggattttctgagtccaagtatctagtctgtgagtctcttatagataattgaaaaataattgtatttaatgaacttctataaaatatctttattttcataaataataatttttgttcttggccaggtgtggtggctcacacctgtaatcccagcactttgggaggccaaggtgggtagatcacctgaggtcaggggttcaagaccagcctggccaacatggtgaaactccatctctactaaaaatacaaaaaattagctggtcatggtggcaggtgcctgtaatcccagctactctggaggctgagccaggagaatcacttgaacctgggagtcggagtttgcagtaagctgaggtcacgccattgcactccagcctgggcaacaagagcaaaactcagtctcaaaaaaagaatttattctctaatacatatttttagtaaattaacatattaaagcacattaaaatgtaaaatgctataaatatctcaccattccagataactggataagtaattgaatgtcttttctctaaaaaagatctaaacaacaaatagcaaaattacggtggtaaagatcaacaataaacgaaacttcataaaacaaaatgaaaaggtcatatagaaaatatttgtaacaaataagagaaaaaaaattaagaccctcctcagtaaacaagcaaatgatacaaattcaacaatccacactgctggaagtatagagaaaaattttttaaatggctaatgtaagtaattaaggaataattaaaactgatggtatctttctgctttttaataccatcaagtagacaaatgttttaaaaattaatactctgttttggacatgttatgctgaaactttatattccatgcaaattgaaaataatttgtcccatatgtaaaggaacaatcacatagctttatctatcttaaagcattacgtatatataaatattaactatgatagaaaaacaataaaacccagaggtattataaatattcaagagttaacagaatggttaaaggtaacaaactataatgtggctgttcagtgacattgtgctttattaaaaattctggtcatataaattgaggcaacagtgaaaatttatctacaattgtatgcatatttttgattgccacaataaaaattatatatacagttggataagaactataaacaaatggtaaatgaaagactttgtttggccagcagaatagtgagcattattttttaaattgtatgtgtttaaacaatgtaaatcatgtttttaagcaaaagaaatgctaactatattctcctccataaatatttgcctcttatcatcagaaaacctaccaaagttgttcttattgttctttttcagaacttccagaaagtatgtgtcttaagtttgactgtggtgttcagattcaattaggatttgcagctgagttttccaatgtcatgatcatctatacaagtatagtttacaaaccaccggagataataatgtgtgatgcctacgttactgattttccacttgtgagtctcttcttttatttaaaatacagtgatatattctcacttattaaagactaaattttttaaaacttaaagttgatggtaaatataaaggaaatatatatatttatatatgtgtatatatttatagtttagtaacactgatcataatatttactaattgccaaaataccttaagtttatgagatttagaaatgtctaaagttcactcaggaaggatgcctctaatttcttatatcctaaacacgagagccaatgtgaaggaataaaatgtgctataaatatgtcaagaataatttccttttaaacagttataacttatattggaaacagtagtttttaagtcttgttaaggtatggtcatatgctggaataatagaaatctagttctgctcttttcaaacatttaggtttgatagttattttacgttggtctaaagaagccagtaaatagtacccctctttcctacatgagtgtgacaaactgagaagcaagcaaggagtaagacaagcagaaacccaaaatatcactttgattactgatagaggctttgtggaggatattgcttcatgtcagagtaaatggtctagcaccaaaccccagaattgagtggccaccccacacctccagtctcagcagtacggagcccagataggcttcctgaggtactgagcaagctgggggcctgtgggcttctcactggagcagcagaacccttactcttggccattgggttggctctaaaagaagaaaaaggaaaaggctgtttatttatccttcttaaatattctaatcatataaatttccctgcaccttcccaaaagtgatgattaagaggagagaatccaggagtcaaacactaatggggctctctctgcttaagaggaaacttgagtagctcaagaagcatttctaggaatcatttgaaaggaagctctttcagagctcactttactttttagatggcttagtacagaattgagaattcctattataaccatagattgttgttttcattgtttagtcctggataattttgggattaccaaaattcacgagaggccagaattcacgagaggatagtatcagttaagatgtcttatgtactagattatattgtggctttcattgatttcattattaacagtccctaatttttttttttacaggatctagatattgatccaaaagatgcaaataaaggcacacctgaagaaactggcagctacttggtatcaaaggatcttcccaagcattgcctctataccagactcagttcactgcaaaaattaaaggttactaccttttctgtttatagctactaatggaaaactttatgaaactggaaacttattttggcatagaccatagatatgctgccttattattaaagtagagataaccagtctacagaaggtcctatcagtgaccctttttatattctgtttccgatggtgaccagaggactttatgtgtgcttaccctccagaatgctaaaaaattagtaacattagagtatattcttttttctttttttagagacagagtcttaactctgtcacccaggctggagtgcagtggcatgaacatgacctactataacctcaaactcctcagtgcatatgatcctgccacctcagcttcccaagtatctgagtctacaggcacatgccactacacccagctaattttttaaaactttttgtggagaagggatctcactatattgcccaggccaatctcaaactcctggcctcaagaatcctcccttcttggtctcccaaagcactcggagtacaggtgtgagcttccactcccagctccatattctacttttaaatatgttcagattttcaagtaatcatttcctagttctatgactagacatatagcaaattagaattttttttccatttttttatttctagttgacttacaaatgagaagctagttctgcacattgagtgttctaatgaaagcttttaatttgttcacaactacatgaccatagaatgtatcagctaaaactcagggaatggaatgggcatgattgagaattacacacataaacctgttgtcatcctgttcggagctcatctacttaaaatcctttcttctcttaaaaagttagcccattatctgattcagttatattttccacctacgattatggattactataatattttaaaaacagcttaagctttttttataaaactggtataaaaccaggtttttttttttgttttgagatggtgtctctctctgtcgcctaggttggaatgcagtggcgcgatctcagctcactgcaacctccacctcccagactcaagtgattcttgtgcctcagcctcccgagtagccaggactacaggcgcacaccaccatgcccagttaattttttgtatttttagtagagacaggtttcaccacgttggccagactggtcttgaactcctaacttcaagtgatccatctgcgtcatcctcccaaagtgctgggattataggcgtgagccaccacgccgggcccagatcattttttaattaaaagttaataccccatctctaataatagggaagggtaagtttcctaagctgcactgcttggaaaatgttttccctgttcatctagagtgtaagaaagatctctttgactttgactactaacagtagtaagaactagaaattctaaatgggttgtaagtattgcatgaaggaaaaggaagataatgatagctggcgtttctcagtttcagggagatataaaggatgccttgaggatttggaacctgggaaaggagagtgagtggatttttgggggtgggggtgtgtatgtgtgaatattttcagattgatatatattcactgttgatgccaataataaaccagatttttttccttttcaggaacatctagtcttcacagtatgtttatcatatcagtactcaggattggaagatactgtagaggacaagcaggaagtgaatgttgggaaacctctcattgctaaattagacatgcatcgaggtttgggaaggaagacttgctttcaaacttgtcttatgtctaatggtccttaccagagttctgcagccacctcaggaggagcagggcattatcactcattgcaagacccattccatggtgtttaccattcacatcctggtaatccaagtaatgttacaccagcagatagctgtcattgcagccggactccagatgcatttatttcaagtttcgctcaccatgcttcatgtcattttagtagaagtaatgtgccagtagagacaactgatgaaataccatttagtttctctgacaggctcagaatttctgaaaaatgacctccttgtttttgaaagttagcataattttagatgcctgtgaaatagtactgcacttacataaagtgagacattgtgaaaaggcaaatttgtatatgtagagaaagaatagtagtaactgtttcatagcaaacttcaggactttgagatgttgaaattacattatttaattacagacttcctctttctaagattttgtgaattggttgaatagttctatacaaatgaagtatggaggtgtgtatgtttatatgtatataacaaaatattttcattgtgaccactctgaagtaagagcaatgggaatggcattattgtagaataagtcattgtatttttaacaccagaaagaaccttgccgatcaccaggcataacctaattttatccatggaagaaacacagaaaggcatctaagttagagctggcaccagaactgagacctccagaaatctattccagtattttttccactacacaactgccttcctgacaggttctgagataagtgttatgtttgtagatagagtgaaatatatttatatatatataaatatatacagatacatatctgtgtattatctcaaggaatgtacaaactttagtttttgattataaggacttcactgcaagttttagttaagaggtttgtatataaatctgttatagaacaggctgaaatttcttgttcataagattatgaaaccacatgagaagtgataaaatgtttgttaaagctagatagaggttaagaatcaagatataatggataattttcatagctgcctatcagaatttcccaaatatttagcatcttccttgataatatgtattttcttcttgaatttcactggcctaatgagataatactcttatctttggctctacctaaaagttggttaaaaatgcaattggcattaacaaggaaaaatactgaattagtaattttaaaagtctcacaaagaaaatcccaggcctagatggctgcattgttgaattctgccaaacattaaaattagcactaattttttgcacactgtttctaaaagtaggagaggaaagaacacttcccaacttactctaggtcagtattaccctgatactagactagacatcacaagaaaactataagccaatattccttattaatacaaacacaaaaatcattaacaaaaatattagcaaactgaatccagcaacctataaaaaggattctatatcatgaccaagtggaatttatcccaggaattcaaggttggttcaacatctaaaaatcaaataagctaatatacagtcagttctcattattcacagtaattatgttctacagaatattctcccataaacactgaattaaatatggaacaactgcttttaggagaaagtgtatttgtgtatatgtgtgtatacatatgtttatctcacacacattatgagcttgaattcttaattcatcctagcaaattctaccttattttacagaagtgaaagtgaggtatcagaagtgttaagtgacatgcctgaggcacccccctaacaggtgtcagagctgaaattcaaaccccatccagctggccccggagccagagcttcttgtactacacagaattgcccctgccatttccaccctccagtcatttctctatgagactgaagcaggaaggcagagcatcatcttgttcagcctcagctgggaacatgtgtactgggtgactcaaatttttcacccatttacacatatccacaaatgactgcaaaagtgccacggatatcaatttgagggttataaattttagcaagttggtaaattcacaaatacataaccttgaataatgaggatcaactgtaccatatttaataaagcacaaaacccacacagattgtcttattacagcatttgataaaatccaaaactctttcataaaaacactcaacaaacttaggaataaaaggaatcttcctagatatgataaatataacatctatgaaaagcccacacctaacattatacttcatggtgatagactgaaggctgaatgttttccccttaagattgggaagaaggacaaggatgttcactcggcactacttctattcagcattgtacttgaagttctagccacagcagttaggttaggaattcaaggtttgttcaacatctaaaaatcaaataagctaataaagaaaagaggtttatactgcaaaagaagtgaaactatatgtattcacagttgatacatagttgtatatagaaaatgctaaagaatccataaaaagtaataaatgagttcaacaggttgcaggatacaagatcagttttatttctctactaacagcaaacattctgaaaatgagaataaagaaatcctatatacagtagcatcaagaataaaactccaacacgtttaaagaaattaagatccagataaatggaaagacatccatgttcatggattggaagactgaatattggtaagatggcaatgctgcccaaattagtctacatattcaacaattcctatcaaaatcctagctgtattttttgcagaaattgacaaactggtaaaattggtagggaaacgcaggggacccagaatagccaaaaaaccttggaaaagaacaaagttggaagacgtaccaatttcaaaaagtgctaccaagctacaataagacagtgtaggcatatggatagacatatcgatcagaggaatggaactgaacatccagaaataaacccatacatttctggtcaacttgttttcaacaaggatgccaataccatcaatagagaaggagtggtcttttcaacaaacggtgctgggacaactaactggtagctacgtgcacagcaaaaggatccctaccttcctaccacattacaaattctaactcaaaatggatcatagacctcaatataagagtttaaactcttagaagaaaacagaagtaaatctttgtgatgttgggcttaggaatggtttcttagacataataccaaaagcacaagcaacaaaggcaaacagtagataaatgggacttcatcaaaattaactttagcgccttaaaggacaccattaagaaagtgaagttaaccctcagaatgggagaaaaatttttgaaaaatcatgtatctgataaaaaaacaaacaaacatgcaggtgctcagctgtggttaccaccgagcagcactgtccagtgaacttgctgtgatgatgggatgcttggtatccgcactcccagtgtgatagcctttagcctcatggggttgttgagcagttgaaataatagctagtgtgaggaactgaacataaaattttagttttaggatgggtgtggtggctcacgcctataatctcagcactttgggaggccaatgaaggcggatcacttgagcccaggagttcaagaccagcttgaccaagatggcaaaaccctgtctctattaaaaatacaaaaaaattagctgggcatggtggcacacacctgtaatcccagctactagggaggctgaggcaggagaatcgtacttcccctttatactcttctgtatatttgatttttttttttttaagacagagtcctggctctgtcgcccaggctggagtgcagcgacatagtctcagctcactgcagcatccgtggaggctgaaacaggagaatcgcatgaattttttaaaaaatctaaacatgtaattttaaaacgggcttaagaagaatgataacagttttggtcttcttttttatcaaccatgcttttattttacttgaatctcgtgccaattgctttgtaatattaaagtaggatttacacaagtggaatttagaaaagatgataatctatcaaatctgtcaataccaattagaatgtaataaagaaattaggatagtggaggtttgagcaagtaaaggctcacccaaattcaaagccaatacttgatgctgagaggggatattttctggaaggtaatttttaaaaattaaagtcacaattataaattgtatatttcctaataaaagaaatctcaactcatgggacaatttgaatttaaaacactattgttcctcattcagtgatgaacaagtcaaaacgtttcagaaaagaaagcctttaaagaagaatcctggcacagaaaaggtccatttagacattgccttcttcccccatctctaatgcctcttttcaaatctctgacttgcacatgaagtaacagtgaggtgtcctgtgcagcagtcgcaattttttgacttgtcaaattgaagaaattcaattatgtagccagagcttagatcactgacatgtatactggcataagcttttttttgtttgtttttaattttattagaagtgggatctcattttgttgcccatgctggtctcaaacacctgtcttcaagtgatcctcctgcctcagcagcatcagtttaatatctagataaaatctgatgtatgtaattttacttttaagggtttttttccaaacagacgtcctgacaatgttgtttcctattccttgaacattcacctgacgcttatatactgtcattacttttatctgtcaactgatgtcagctactcaatttacacattacttttgtgcatttcatcctgtttctcagtttgacattgtcattcaaattcagagtttgacactgaaaccctgggcatggtggctcacacctgtaatcccagcacttcgggagactgcggtaagcagatcatttgaacccaggagtttgagactagccttggcaacatggtgaaaccccatctctaccaaaaaaaaaaaaaaaaaaaaagcaaaaacaaaaattaactgggcatagttgcacacacctgtagtcccagctactcaggaggctgaagtgggacgatcgcttgagcccagaaggcagaggttacggtgagtagagattgtgccactgcactccagcctggacgacagggcaagacgctgtctcaaaaataaaatattagtaaagaagagtacaatcagaatatgaaaatgtgtaaatgtgcatattctctttttttctaatttggtagcattaaaaatacttaagcatcaaagtttggctttatgaagaaggagtctgagacacctcaggtttcagcccttactaatagcgtggctcaaagagcgttaacttgcctgtgcttctgtttccttatctgtaaaatggggatgatgctgtaacatcaaagagcttataatactttccagagctggcagtactaaataagaccattcctctaaagtgccagcattttgaaaagcatcaacccatcaaccttgtgctttaaatctggcattcttaaagctatacctgtaggcagtatagagtgtttttttttatttgtttttttgttgttgtcttttgagtctcactctgtctcccaggctgtagtgcagtggcacgtcttggttcgccgcaacctccgcctcccaggttcaagcgattctcgtgcctcagccccccgcatagctggcattacaggcacacaccaccacgcccagctaatttttgtagttttagtagtatctactaaaataaacagggtttcaccatgttggccaggctggtctcaaactcctgacctcaagtgatctgcctgcctcggcctcccaaagtgctgggattacaggcgtgagtcaccatgcccggccggcagtgtatatcttctaaagttgcaatttttgttcactccagaatcacttttcaaaaagcatgcagatttaatgccaccagtttgtgttatgtatctatcccgcaaaacagctctaaaggtgatttactaaaagattaacagcatttatctctggtgggataatttttctttgcttgtttacctgtgtcttgcagattttacacagtgaacaatgactgtataattttaaaatacagatatgcacaattgtgtaatgtaaatatgctcagcttcaatacatttaagaacacatttttaacttttcgtaaggagtcttcagtttaaaagtacagtgtcattacagagtgcttattctgttacaaaattagtaaagctgattctgcctctaaatctgaagtaattcccactttttttcatgcttgagtttagttgataaatagcattttagatactaaaaatgattggatgagtatttctacattaataagttgctaattaggcaccagggtagcagatagaatgcctttctgtgtgctaggtttaaacattttacacacagtcttatttaaaacagccttgcagtttatagatgaactgattgttaggctaaccagaggtgttactataccctccaggataacccagctagtaagggcagagccaggatgattcagacccagaccagagccgggtgttttgtccacagtactgctgctgcttataccgtaacgggaaaagtacacaacagtgtcttaatatttcattcttccatgaaaaacacttttaaaatattgaaacattataggagcagaagtacatctctaaatatacttttaggtcacattgaaaacatttccaaaggatttgacctgaagttaatgttgctacattatgctcaatacagcaggctgttctgctagggaaattgttaatattttaaaaatattttcctaagctttagctttacca

SEQ ID NO: 1213 - DNA, 73500 bp, Homo sapiens
ggcggaaaacgcagcggagccagagccggacacggctgtggccgctgcctctacccccgccacggatcgccgggtagtaggactgcgcggctccaggctgagggtcggtccggaggcgggtgggcgcgggtctcacccggattgtccgggtggcaccgttcccggccccaccgggcgccgcgagggatcatgtctacagcctctgccgcctcctcctcctcctcgtcttcggccggtgagatgatcgaagccccttcccaggtcctcaactttgaagagatcgactacaaggagatcgaggtggaagaggtgagcgaggcccggcatggagacgccggtcccggcctgccccgcccccgcctctgcctggtgccggctctgaaggtgcctcccggggcccctctaattcgcgggaccctgcggggtccacccgggagaccccacagccctcagtaacgtgggagtgggggttactctctgagctcaactgctcgggagtagctgccttttttcctctcttgggtactcttgattttggatttgatattccggtgataaacaggagaatgaactggtgagatagtgtggtccaccagttctcgtatctgtaagtagtagtttcagcgaagatcgtagccgttctggagtttcagtccgctggacgtaatgttcttttttttttttttttttttttgagacggagtctcgctctgtcgcccaggccggactgcggactgcagtggcgcaatctcggctcactgcaagctccgcttcccgggttcacgccattctcctgcctcagcctcccgagtagctgggactacaggcgcccgccaccgcgcctggctaattttttgtatttttagtagagacggggtttcaccttgttagccaggatggtctcgatctcctgacctcatgatccacccgcctcggcctcccaaagtgctgggattacaggcgtgagccaccgggcccggccggacgtaatgttcttaatggccaaagattgtattatattcgacttctacttcagtacctggcatgtaggggatgctcaataaatgcttgttaaattagtagatcatcaagtctaataaagtgtttcccttagcaccgaatggttctcaatttctccgataccgcacagcaatactcgtaatgtttaaatgctcggctttcagttgggctaatgtaggtgaatttcaccataagtaacatagactggtctacgatcaaaagatgtttcaagtagcatattctgaagagataacgaatgatttcggtgacaatcagaatataatattagactagaaatcgctatcagaaaacccatatcctttctttattctgcagtaatttattttagaacaagatatttcaaagtgactttaaagcgtcgtttttcaaattaacaggtaaattgggttctaatgactataaaatttagaaaagtaaaaactgcatatatattttttaaagacactttagaacttgttaaaaactttggttgaaaatactatctcttaccatttatttgccattttttaaatttattaagcactttgcgttatatagtccatgaaaaacctagtgaaatattatagattgtcaacgagttatgtctactttaaaattctaaaattatttttaagtgtcagcaagttcaaagtagtgagataacgttcaacaaataaattttttttcctgtgcatgttttggaagagtaatggattactgaattatatatgttttatcacataaagtaactttagagattattgagaatatcctcattttacaagataatatggtggaaagagcaaggtctttggagttagaggaaagttcagtgtatcagatatgccatttattagctgtgtgatttggggcaagtttcctaacccctttgaattttagtttactctaagaaagggctaataaattctgtttcattttatctgcataacagatcttagtagacattatatgcaaaacacctaccacagggcctgacacatattaggaaacctagttccagagaggaaatgtgacctgctttaaggtcatatggctaaaagaagacctgtattttgaaaagagggggaaatgtttttagtttctttttttttacattgaggctatgataaattccttttccagaagtggatagttgatgcagctttcatggctaatattcttttttaagaataaaaattcagtgagtcagtatacaagaattgcagtttttaaataagcgtttacgtctgctctgtggtgaattgctatgcttgtagactacaaattgttatataataataacttgtgctttatggtctactaaatgctttcacaaacttacttcatttggttcttacaaccttagtttttgaatgctactttctaaagctttttacattcttgattcagggaaaaacaaattactaaggaggtagttatcattttgatgttcttcccctaaagctatttcgcttctggttaggtttctgtgtttccaagacccttctctcagtttagataatgtttcaatctttgtgtgtatgtgggtgtgtgtgtgtttaggaaatttctgggagtaggtttttgtttttagatgaaaatttgtttctaatatcaggcagtcatttgggttttttgtttgttttattccctttcatgtttaatacttagttcatttttgcattaaagattgaatttggacctttctgatattgaaagcattacataatttccatcatcttcttcatttgcatacattaaaccagtgttacacaatccagggtgaaccatgaacacttattagctatttgtcaacttagattacacttccagttcaattgtaagataaacagaggaagatgaccagaaacaaaaactattttatgttgcttccaatattttatattgtatgagaatattaccttctaaattaagaaaatcatgtatttctcaatgtaattgaattgtattatatcaatataattagaaactgtaaaaaaaataataattcaactacaggccaaatatgcagccatttagtagatacatatttctaagacattagctgatcttgcatttctaatattgtaactcagtagtattagtttggcacatcttagattcaattcaattcagtcaaattaggtaaggtctcagcctcagaaatctgcctaggtactttttaaacatcatttagtgtttaccatctagaactggctgtagagaatgttggaataaaagaggggatgggttgcaagaagtgttacacagggtagtatagtggaaagtgttctggactgaaaaagaaaatttagatgctgtactgattctgccataatatatttttgtaactttgaggaagtcaccacatttttctgggcctgtggttactcatgtaaactgactgaacaagatcatttaaggtcttttccagttctaaaatgaaaacacattcatgttttccagtatttaactgttttctatagtaagcttagcagttctttaaagactgatcatggtctcctatagaattcagttggtgaccaactaatcctgggttgacagggcaaatgatatcccattgtacagatattgacaagcagtcatagagtttgacttgccagaagccgcatgcctaagtaaatggtaaagctgggaattgaatatgagacttctcacttgtgagtcagttgccctttccactggatttacagtgtcactcagtactttctgaagtactctataaccaaacctaatatgggaaaggggaaacaaaatactgatttcctttttagtgtagttggtcctgagcatttaatgaacattctcatctgtgcgtaatactctgaggtactataaaagataaatagggcttggtgcggtggctcacacctgtaatccgagcactttggagggccagtgcgggcagatcacttgaagccaggagttcaagaccaccctggccaacacggagaaaccccgtcactactgaaagtacaaaaattagctgggtgtggtggcacaggcctgtaatcccagctacttgagtggctgaggcatgagaatcgtttgaacccaggaggcagaggttgcagtgagctgagatcatgccaccgcaccctagcctggacaacagagggagactctgtctcaaaaaaaaaaaaaaaaaaaagatgatagaagaatcctaggattacctccttaaaatgtctgacttagtatgatatcagactggagtaaacacagaacagttaactatagaccacaaatttaaaactgaatatagtgtaaattaaacacttaagccataatttgaaaatagagttaatcacagaaggttccattgagtagggacaagtttaaaactaggttttgaataaagtgaccatcgtgggttgggaaagtcactaagatgaattttctttgtagttgttcctctgcctaaagcgctgttcccccataacttaagatgactgactcctcaccagtcaagtcccacctcaaatgttattaacacttccttagagaagcattccctgaacaacctagatcttttgtcatttctattatctttcatggtacttaccagtaactgaaattgtgtctctccttcagcaaaatgtaaggcgctttattcacttttgtaaccccaatgcctagaacctagaaggttctctatacatatttgttcaatgagtacatgaaagtatcacagcataatcataagaattaaatgcccatcttgttctcttatattacatgtgataaaataggagctgagttatgcgatttggctaaggcaacacgttagaaatgagatccgagtcttgttttaatgtcgactctattatagttagcagatacttttgtttagcagggataaaaaatgctgtaaagggccagatgctatgagtaagccacgtatggtaggtctttactacagagtgctaaaaagacactatttacaatggttgcttttgaaaagggagacccataatgctgacctcaactatagtgtaggaacaaagctatagtattggacacataaaattactgcagcatttgtatatattcttcagctttgttaaggagacacacaaaagttttgttttaaaagctaaaatatgctacaaagaggagatatagatagaacttaaacagttatatgtactttgtaggtttaagttataaatatatggggaattggtattagagaaaaacctaatttatagtggtctaaacaaactgagtacatagatttgttagtcactatttaattatggatacctaaaataatcaatacattctttcatgtgaaagtgaccactgatttcagtagaaatctggaattactatagttaagaggtagctacagagataatttttgcattgtacacgtgtagcttaaaagatagcatgagcatattatttgaaataaaagcctagaaaatgggtgagatgtactgtggcaggtattaaaagactgcatgaaacattcagaagaaagtttgaataatcaaagctttacttttatgttatcaaatccatcttgtcagcagatggcagttccactctgccacagtttattaatagatattgaagttctaacatagttggaggctccaagtcctaactaataaatgtatgatctatgcttgttctgtcttgttccgcatttccagccagaacaatgccagcatcaccaggggtccattcagatagttcatagaacagggccaaatgaaactgacagctgtagtcactgaactaaaaataacatgaattcagaacaattaaaagaattatttaataataaattaagagcacaaaggcatacatccttttccatttaggttaggtgtgtgtttggttgttttctttaacatgacttgtctgaaggaatggagtcatcttacatcataaagaaattaatttttaaaggaatttctttaaaaataacacacaaacacacaaaacctgatttttgtttttgtgcctttcaatagtagttgcatggaaatgttctatataccatctcatattcttctgtattttttattaagaaattaaatttaaatctacttaattgtatgagactaaagttgtagacccaaaacaaagaggtttcaaccatagggggagaaatgcttatcataaagtaattaatcaaaaacattttgatttagaaaacattcataaatttagaaggaaatatttccaaattgacctcccttttaaaaccaaagtcctttttgcattcctctgttttttacaaatgaaggattatgaagaatatctgaaatatttatttgtatgtcaccattttagttggatgtgtgtgatggggaaatacttgtaacttgatatgttctcttttttactcttgatgaaaattcatctttggggaaaaaacagtcatttaaaataatgttgggctaggtacggtggctcacacctgtaatcccaacactttgggaggccaaggtgggagattgtatgaggccaggagtttgagacgagtctgggcaacatagtgagaccctgtctctataaaaaattttaaaaaacaaaaaacctaattgttaattacagtgtgtcaaataaactgtattattcagaaaagaatacggttcagaaagcacgtttgatttgtgaacttggactagaaatttggtagtaaataaaaagtggccttctttcagtggtttacaacttgaatattaagttttttcattgtttacctcagttgccagtatgtctcaagagtggccatctatgccactttttttctgttgatctaccatatgtcaagaaaaatatcaaatttgctttctgtagtttgtaacattggctcattccttatctaataatgtacataatctccttatgtgtttttaggcttggcctttgcagtccagacatactattattctacatctgatcttctccacgattttatgttcttgattaatacaataaggaaatttgttaccaagatatttgcatttgaaacattttcttagaaatatgtgatatattttttaaaaatctatacacatgtaagattttccccagtcagtggagtgctgttttacatagcctgagaggtggagtgcagacagtaatgaactttcttaaccagcgtttcctgttggagcggtggtgtccacaattttttgtttgtctgtctcccactggtaaaacaaaacactttctattttgtatactcagttttcagtgtgtatgtatgaagtcggtatttttaaacaatgggagatgaaaggtttcatactatcatttgatcatggctcaagttgcaataagtactttctaaataaaacctttctaaaatgtgagaattgacttaattaaaatgagataatatctgtaaatctacttaactaaggtcaagtaaactacaatatacacaagtgagggactgataatggagtcagtatttgacatattgaacttaataagcctgtaggaccccttagtctcaaaggcagttttaaatatatcttgagcttgggcaaaaaacctggatgggagagatttgagagtatgaatccatgagattagagaacagattcagaaacaaaagggccaaggacagaaccctggaaagtagcaacatctaaggtttggacagaggaaggaagaatcagtgaaggaggctaaaatagaactcttaagcagagacaggcagagaagggattgttgacagccatctttggagactgccataagccctttatacacaagccttctattaacccaacttcactcttttcttaaaggagattagggctttttaaaacccccttctaaacagctaaaatctgattcgaatataatcttttgaaaagttaattgttgttagttatcatacttgctgcctttgagtagcatttttctctgtaccaggcactggaccaaatcctggcaggcctctgttttgttggcaccatgaaacatacctgaaagctgactctgatttactaattacatgatccttgaataggtaacttcagttcttggagccttggttttcttctctctaaggtaggaataaaaaatcctatatattcatgggtttatggtgacactcaaactccatcatatttgtaagaaagagctttacaagttgtaatatattgttaaatataaggttgcattatcgttatacagataataaaattgcatttctttaaaatgttatttcttgaagaaaggaatgagaagtatattggaatgccctgggaagctttttttatgctacgtagcaccttctgccacctctaattcccattcagacttctcccttagagagctaatatcagaatggggggaaggagagcaaaatataccaggaaacaactttatccattgtatatatcatctgattattctatcttctactcttatggatatatgcttatactcttttttgtttaaagcacaaaactcctgtctctggccaggtgcagtggttcacgcctgtaatcccagcactttggaaggccaacccaggcagatcgcctgagctcaggagttcaagaccagcctggacaagatggcaaaaccccgactctactaaaaatacaaaaattagctgggtgtggtggcacaagcctgtaatcccagctactttggggtggctgaggcaggagaatcacttcagccagagaggcagaggctgcagtgagctgagatcgcgccactgcactccagcatgggcaacagagtgagaccctgtctcaaaaaaacaaacaaaacaaaacaaaacaaactcctgtcctcctgccggtatttcttacttgtttttaaaagttaagaaatgtaactatttttctataaactactgtttaattatgagtcattcctcttttcaactcagtagagaaaagcatttaatcttgccacaacaaggataatttccatgtaatacttacctcttttatgtatctttgtactcagaaatttcaagattaattcggttatttcaaaattcagtcttcccccataaggattttccttttccctttctcctgcccaagatgacatatgggtgctgtggaaagcttccacaaataatataaacagcaagggagagctctctggtctgtgtgatggcttccactgaaatatcttgccttattatctgttgttaatggattagccttgaatgcagtgattttcaaacattgaaactacctggagggcttggtaaaacatggattgcttggccttaccgtcagactctataattctgggttgcaccctgagaatttatatttctaataaatatccaggtgatgttgatactgctgaaccggagaccacacttttagagccactggcatatgctttcactgtccttatatctgctttccttctggaacgtctttttcttttggcttctctgactctctcctagtttgcctgctaccatattgactgttccttcctgttccttgcccattccttctcctctcttgtgatctaaatgttgaactgcttcaaagctcagttcctctactccactatctccatattatttttggttacctcttccaactgattgactagaaaaactgactacatgctaatgactcccaagtttgtatctctttgtctgacttctccatagatcctctcactcacgtttctaccttcttacttgatatctcctcttggatatccagtaggcatcttaaacttcatatgactaaaaccaaactctgagttattaaaaaaaaatctgcatcattcttatccctcagtaaactgttgtccagtctaggtgttttccttgattcagctcttttcctctacacctgtcctgcctggatgcagagcatcagcaaaccctattgactctacttctaaaacatttcccagatctgcccagtttctgcactaccattgaccttgccctcgtagctattgttgcttgtttggactgctgtaatggcttcctaatgggtctctatttacatatcctagcttccctacaatcctttctttaagagctataatgattttgtttaatgtcacataccatccttacttccttgaattttttcagttccttcacattgcacttagactgaaattcaaactcctttttatggtaggtagagccgttcaggatccaacctctgcctgtccctccagccttaccttacaatcactcttcccttcctccactatacaccagccacaccaaacactcccaagtatttctctaaatcatcactaaaatgtcacctttctcagtgaggccttgagtgattaccttgtctaaaattggagtgaggcagagtgcatacatgtgtgtatacacacacaattatactccttttcttcttagcacacaactcccttcctttttatttgtctttttccacaagaatataaacaatgagaacaaggattttgatttggtttgttcactcttgtatcatcagtgcctaaaatagcgcatagcccttagattgggctcacatattggagtaaataaggtagtgaggtttttcttttcccttagggcaaagctttatattagttgtttcttctgtgtgtgtgtgtgtgtgtgtgtgtgtgtgtgtgtgtgtgtgtgtgtgtgtgacagagtctagctctgttgcccaggctggagttcagtggcgcgatctcggctcactgcaacctcggcctctcaggttcacgccattctcctgcctcagcctccccagtagctgggattacaggtgcctgccaccacgccccgttaattttttgtatttttagtagagatggggtttcaccgtgttagccaggatggtctcaatctcctgacctcgtgatccgcctgcctcagcctcccaaagtgctgggattggtgccttgtgtcatccaaatgtcagattcgtaacctctttatatggccttttcaaactgcccagcctggagctgccactagtctcttggtcatagcatcctattttttgttgttgtcgttgttctatgtggcatttttttaaagtctgatttttttcttactcatcttttgtttgtatatcgattttcttttctcctcccctcccttcacatacgctagaaagtacatttgtgtagatcagagcctttgtcttatttctttctgtatttctgatgtcccaaacagtagctggatgtagtacacactaaagaaatattggtttaaggagtaaacaaacgaagttcattattctttcaacatcaagcctcacttgcatcctttgaaggcagaagacctaacccagttctccctgcttgctgaccaggccttccccttggctttcattaatcctctgaaacccagctgtgttcttcattaagtatttgagctagctaccatcccacagacctctaatgtaggtcccaacactctgccctaccgcagcctccttcctgcaatcagaagactccttacttctcagttagcttgctttttgcttcacaagagcttttctttatcccttacgtgttctactggggctgagggaacccgggttagggcctcccttggtctgtcttccttgccacaatccttactcctttgaagcttctggtgtttgcagagcacatgctgtgaggatgcctgctcttagggatctaagtgagaagagaagggtatgagtcttttttgctgttgaatccctaccctaaccctatcctgaaaagggggagggaggagtttattagccttcatcattagcccttacctttggctctcttcagctggtaagtgtttaaaagtttttaagtactattatttagtcttaaatttcttctctaccgcactttcattccatgaaggcaggggtccattctttatatatattttttcttctcatccccagtgtatctacctttatgctatttttaaaaatgggaagtcatttttgatacacacaaacttaattctttaagtattgactgtgcttataatctcactcctttgaattcacagcagttattatttctatcctgtatttcaggtcagtacaaccttggacatcttcacctttctttattataactttagatcctgtcatttcactgtgcatgtgaaatatctcgtggccctaataagaatggaggcttcttaagcccatgggctcatcttacaggaatgtgcctgttttgtatttcagggtgttctagaaaattgctttcttgagcaaaaaggagaaagtttttcatgtcctcatttgaccacattttgttcccatggctttaagttgaaagctcagaatcagctctactctcatcactaggtggcacttgtgaattacaaatagtcaaatgaatttttatgacaaacatgtgattcacaaatatagataatgtttggaatccctgcatggacgttcctcaaaatggaagaaatgaaagaaggggattcctagtaagtaccagttgctgtgatgtatttataaatacatggttgaagaataaattacttcataatcatttcgtatttaatagtaatatcaataggtaaagtctggtctccatgcctgtgttcttaaactaatgttgccacaaagttgaaatttttttaggacctgcttgctattcatcttagttaattgcaagagaagtgagtactacaggtcaggtgcagtggctcacacctgtaatcccagcactttgggaggctgaggcagggcgattacttgagttcagggattcaggaccaacctgggcaacatagtgggatcccatctctacccaaaagaaaaaagaaagaaaagaaatgagtactacagccctttacactgattcatacccaattccaagcacttactgttctttgtagtatttgaggaaatacctggttttaacttacgaatcctgtagatattcatgaaggaaaatgtcagcacttctattttactgctgagaaaacagaaactcaaacttgtccaccattaagagataataggtagacagagccctacattcaaactcaagtctgttggatttcagagcctgggtgtgctctttcatttattctaatggtaccaggtagccagtaccctctattcacaataaagtaactgaatggcaagtacaaatgtctgatgagaattgtgaaggagaacaagaacctaaaccacagaacactgagtgcccagggctaggacgagtgaaatgggaagtcaacaaaacaaagactagctaccagagaagttggcctactttgaaattttgcctagaggcagccccatttcctttaagccactgatgaacagaagctgaatatagagtatgttcatcattaggtgctctaggcttcaaattctggcttctctgaatattttctgaccatccaatcttgggcaagttacaaccatgtgactccatttgcctcccttttaaatggaagaggattaaatgtgttaatgtatgagaagcacatagaatagtacctggcacatagtaaacattcaataaatgttaaccatttgagtagctttagacattgaacaacatggtaaatgttcattctgccttattgatacatgaagtggaatttaagctatggctagagtggtcatacacatcgcagtttacaactagtgtcctaatattattattattaatgccctttttttgatctccaaagtgccctcagttagataataactcatttgatcaacctagttatagtcaactttgttatagaagagttttgtgccaggaatttgttcatgtaagtctaaagtaaaagttcctccaagggaagatactaacttctacttcccgacatggggctttatatatgttacaaattaggactggtaacattcccgtgttagactacctggcatcagactgcactttaacacttgctagctatatagccttgggcaagttttacttctttaaagctaggcacttcaactgtaaaatgaggacagcattagtaccttcctctaggcctgtgtaaatgaggtaatgtatataaagcattagttaagtgcctgctgcatagaaagtacatataaatatggttaagagatgcagattttttgctaaagaaaaaggccttgatacaaagtgcttaggttcattggaagctgagagattggagtaggtggtgcttaactaaggtcctttcacaatgataaaatctaatgattttattctaacaagtatcaaaagctatttttgttttctttttttatattatgaaaaatgtcaaatatttgtaaaaataggactccatgagagagcaatgaacccatgcagtattcatcagttggcttcaacaatagtatgatacatgtctgatctttatttttatgacttttgaaaaataactgtaatgagatctattttacacatcataaaattcacccatttgaagtgtacaatttggtgggttttgcaaatttaccaggttgtcagccaccaccataaattaggtttttggttttttttttttaataatttcatcactttgtcaggataccagctactcatttactgttaattctaattttcaccctcggacccaggtatctatctatagatttgccttttctgaacattttgtataaatggaatcatacaatatgtggtctctggtgtctgacttctttgacttagcataatgtttttggagttcatatcgtaagtaacatatatcaatagtttttcttgcggaataaaattccatggaataaataatactatattttgtctgtccttcatagccggtcttttaacatctatatttatatcgtttctcctccattccctatccctgttgaattattcaaaggctatttttaatttcttaaatatgatagctgaaaatatttattatatgttcctgctttttgtttttccatatcatcttctgtcttctcattcatcttgtctgttttagtttttttttctccatttaacaaatcactttactttgttcctccatgtgtcttttttggttttacttgagaatgaaagggtgtacagatcataaactttcaaagatagagacaagcatgcatttaattatcttctcactttaacaaaaattcatacttgttcagtggcaaatccagatactgttgatttccatgttttttttttttttaatttaaagtcttaaagattgactttagttttttatattgggctgatctatttgattccgattcttgtggtgttttttgtttgttttttgtttgtttgtttaactcaggttgttggaagaggagcctttggagttgtttgcaaagctaagtggagagcaaaagatgttgctattaaacaaatagaaagtgaatctgagaggaaagcgtttattgtagaggtaagttgagatttcatttcttttgtgtagttctgcacttaagatactctgtgaatttaatattatgaaaaagattggtttctcagatgtcatttctttgtatacatgaacatcagcaattcggtttaatcaaaggtactgccataggaacattttctcgttcatactcttaattctgattaaaaattaggggaaaagcgacttaactacataaatgaattcacccctgaattaaaacagtttcatccatggaattcagatctatttcaaggcgtaatattttaattttaaaatagaaaagaaatggtatgctttcccattatctaaaattaagaaattttatacacttactttaaatggaatgtttttagaaactcagattattttaaagaaaaattatttcaaatttgatttttctcatttagcatgaaaatttgcacctattcttttagaaatagattagattgaatgatgaaagaaaatccaataatcatgaaattagcatattatcaaatttatcctttactaactttgttattttgtattttggatcacattatttagttaaatcaatgtttttatcactattaaacctcattggccaatggataagtggcctgtaccttataagccttctgaatttatatctctgttttttcatttaatcataatttcaaaatatacttcatatttttaatgtataacatggaaaaatgaggacttaattgtgatatgagaaagtgatttgtaagtggctgaatgagttgagaaatgctgataagtgatttgatgtcagcatgaagaaagatgatttctagtaatatgttctaggagtctagcctcagctttgttttatgcaatatttttattacagtttagataaagctattgatcatttcctgttacattagcagtttcacaaagctgggtgaaatagcatatgtgttaaacattaggaatcacaagtcaaaaagatcgtaatagcgtgaagaaaattttttaaatccagatgagatgtgcatgtaatgtaaaaaatcaaatggttctccaaaaattcttagtaaaaaagacttcagtctcctgtacctcctccaatctaattttctgcttcccaaagacaactactttgagctcattccttcatgtttggtgtccccagtccagatgctgtttattaccccttctctaaagaatcaacctctagtcttctgctgggatgataagagatagtcattgagctgtttgaagtcaaggaaggaatctttgagtcttttacactgtcccctgccctatcctttgattagctcatttgcataggtacctcattctgctgccactccccaaccttttggaagctttgtgagataaatctggttgtttctccatttttctcattgccagtttatgatgcagctcttctaggtctgctctatcagttattgctagtcatttgctttccagcttccaaaaatgtatgctgtttgtgcactttgcattctcttcatccttctgaggttatgccttaaaatttttcaaatctttaccatcttagtgggaattagggagagaggaggaaaaaatgcttgtataatctgctatctgaatctcagtgctgaaccttagcaagatgaaatatagtaaatatattttcatatagtaaataaatataataaatagtgatactaattctattggacgaaaaatccacacatgttggctctagatagatagagctttttattagcatacagtatgaaggtttagagacattagtgtactgaatatgagccagcagcataatgtatgtaatagagaagaggaagaagagtggaaaaagggcagaaaagagaggagaagggagaaaagaatgagcaagaagcagtttgctgtggagcgggatgcattaatagaaagaagtttgaagacagacatgatggttcacatctgtaatcccagaactttgggaatggcagatgggttgcttgagcccaggagtttgagatcagtctggacaacatggcaaaaccccatctctacaaaaaatacaaaaattaaccaggcatggtggctgtgcacctgtagtcccagctactccagaggctgaggtaggattgcatgagtccaggaggcagaggttgcagtgacccaagattgtaccactgcactgcagcatgggtaacagagcaaaacctgtctcaaaagaaagaaagaaagaaagaagtttgagatctagaataagagaagtgagtatagccaaacccctcattgacctctgtatggatcattggatcagggatgattaaaactgaaagagggaaaccagctagtaggctataatgatcactgcagcagttcaggttgggattactaaggcaatggcagtgggaatggagaggagagaattaattcaagaaatgagaaatggaatggaggcaagtatacagagggagtgcacattttaagtcagatagactaaagttcacaccccacttcttagctatagaacaggtcattcaaccctctctgagacttgaggttaaaatctcatctttaaaatggaaatgataatacctaccttgcggagttgtgataattatacaatatctataaagtgcacattagggccccacgcagagtagctagactgttcaactatagctatgaagatgataacaatgatagcatgacgtctggtttggataatgcagctcagtaccatctctgggatcatatcctaacatttcttggcagagttcatctcttcttattctatatactcatcgtgccttgttcataactcctgttatagcactttgcacattgatttaattatttgtttagatgtctatctctccagctaaactgtatgagctggagaacagggattctgtgccattctgggcagtcacttggtattttcagtgactatgattgcaatgcctgttacatagtaaatagtgattgttgaatgatttaaacaaatgttttgtacaacagtaagattttaatgatactgtgaaatcagtacttcaaaagttatcactttttaaaagaaaccttaatttcttaacagcttcggcagttatcccgtgtgaaccatcctaatattgtaaagctttatggagcctgcttgaatccagtaagtttgttactttttcatggtcacctgtgagaaatgacatggcagatgtgtgtgtgtagtttatgtagctatttttgggtttttttgttttttttaagtttttcaaaaatattatattttttcaagataaaaaggtacctccaatactttaaaatatcagcagtgatcccaatagttcaaggactatatgagtacatgtggctattatacacgcacaatatgtcaccaacacactctaaatagtgagaatacagcaccgtggcattgctcccatattattatttttttctttctctttatgtatttattgagttacttacttgtttttgatatctttttttattatactttaagttctaggttacatgtgcacaacgtgcaggtttgttacgtatgtatacatttgccatgttggtgtgctgcacccattaactcgtcatttacattaggtatttctcctaatgcttatccctcccacctctccccaccccacaacaggacccagtgtgtgatgttccccttcctgtgtccaagtgttctcattgttcagttcccatctatgagtgagaacatgtggtgtttggttttctgtccttgcaatagtttgctcagaataatggtttccagcttcatccatgtccctacaaaggacatgaactcatccttttttatggctgcatagtattccatggtgtatatgtgccacaatttcttaatccagtctatcattgatggacatttgggttggttccaagtctttgctattgtgaatagtgccacagtaaacatacgtgtccatgtgtctttatagcagcatgatttataatcctttgggtatatacccagtagtgggatggctgagtcaaatggtatttctactctagatccttgaggaattgccacactgtcttccacaatggctgaactagtttacagtcccaccaacggtgtaaaagtgttcctatttctccacatcctctccagcacctgttgtttcctgactttttaatggtcaccattctaactggtgtgagatggtatctcattgtggttttgatttacatttttctgatggccagtgatgatgagcattttttcatgtgtcttttggctgcataaacatcttcttttgagaagtgtctgttcatatcctttgcccactttttgatggggttgtttgattttttcttgtaaatttgtttaagttctttgtagattctggatattagccctttgtcagatgcgtagattgcaaaaattttctcccattctgtaggttgcgtgttcactctgatgatagtttcttttgctgtgcagaagctcgttagtttaattagatcccatttgtcaattttggcttttgttgccattgcttttggtgttttagtcctgaagtccttgcccatgcctatgtcctgaatggtattgcctaggttttcttctagggtttttatggttttaggtctaacatttaagtctttaatccatcttgaattaatttttgtataaggtataaggaagggatccagtttcagctttctacataaggctagccagttttcccagcaccatttattaaatggggaatcctttccccatttcttgtttttgtcaggtttgtcaaagatcagatggttgtagatgtatggtattatttctgagggctctgttctgttccattggtctatatctctgttttggtaccagtaccgtgctgttttggttactgtagccttgtagtatagtttgaagtcaggtagcgtgatgcctccagctttgttcttttggcttaggattgtcttggcaatgtgggctcttttttggttccatatgaactttaaagtaattttttccaattctgtgaagaaagtcattggtagcttgatggggatggcattgaatctataaattaccttgggcagtatgaccattttcacgatattgattcttcctatccatgagcatggaatgttcttccatttatttgtgtcttcttttattccaatgagcagtggtttgtagttctccttgaagaggtccttcacatcccttgtaagttggattcctaggtattttattctctttgaagcaattgtgaatgggagttcactcatgatttggctctctgtttgtctgttattagtgtataggaatgcttgtgatttttgcacattaattttgtatcctgagactttgctgaagttgcttatcagcttaaggagattttgggctgagacaatggggttttctaaatatacaatgatgtcatctgcaaacggacaatttgacttcctcttttcctaattgaataccctttatttctttctcctgtctgattgccctggccagaacttccaacactatgttgaataggagtggtgagtgagggcatccttgtcttgtgccagttttcaaagagaatgcttccagtttttgtctattcaggatgatattggctgtgggtttgtcataaatagctcttattattttgagatacgtcccatcagtacctagtttattgagagtttttagcatgaagggctgttgaattttgtcaaagcccttttctgcatctattgagataattatgtggtttttgtcattggttctgtttatatgatggattatgtctattgatatgtgtatgttgaaccagccttgcaacccagggatgaggccaacttgatcgtggtggataagctttttgatgggctgctggattcggtttgccagtattttattgaggatttttgcatcgatgttcatcagggatattggtctaaaactctctttttttgttgtttttatgccaggctttggtatcagaatgatgctggcctcataaaatgagttagggaggattccctctttttctatcgattggaatagtttcagaaggaatggtaccagctcctctttgtacctctggtagaattcggctgtgaatccatctggtcctggactttttttgtttggtaggctattcattattgcctcaatttcagagcctgttattggtctattcagggattcaacttcttcctggtttagtcttgggagggtgtatgtgtccagtaatttatccatttcttctagattttgtagtttattttcatagaggtgtttatagtattctctgatggtagtttgtatttctgtaaaattggtggtgatatccccattatcattttttatcgtgtctatttgattcttctctcttttcttctttattagtcttgctagtggtctatcagttttgctgatcttttcaaaaaaccagctcctggattcattgattttttttttgaagggtttgttgtgtctctgtctccttcagttctgctccgatcttagttatttcttgccttctgccaacttttgaatgtgtttgctcttgcttctctagttcttttaattgtgatgttagggtgtcaattttagatctttcctgctttctcttgtgggcatttagtgctataaatttccctctacacactgctttaaatgtgtcccagagattctggtatgttgtgtctttcttctcattggtttcaaagaacatctttatttctgccttcatttcgttacgtacccagtagtccattgttcagtttccatgtagttgagtggttttgagtgagtttcttaatcctgagtctagtttgattccactgtggtcagagagacagtttgttgtaatttctgttcttttacatttgctgaggagtgttttacttgcaactatgtggtcaattttggaataagtgcaatgtggtgctgagaagaatgtgtattctgttgatttgggatggagagttctatagatgtctattaggtccacttggtgcagagctgagttcaattcgtggatatccttgttaactttctgtctcgttaatttgtctaacattgacagtggggtgttaaagcctcccaatattattgtatgggagtctaagtctctttgtaggtctctaaggacttgctttatgaatctgggtgctcctgtattgggtgcatatatatttaggatagttagctcttcttgttgaattgatccctttaccattatgtaatggccttctttgtctcttttgatctttgttggtttaaagtctgttttatcagagactaggattgcaacccctgccttttttttgttttccatttgcttggtagatcttcctccatccctttattttgagcctatgtgtgtctctgcccgtgagatgagtctcctgaatacagcacacttactggtcttgactctctatccaatttgccagtctgtgtctttcatttggagcatttagcccatttacatttaaggtgaatattgttatgtgtgaatttgatcctgtcattatgatgttagctggttattttgcttgttagttgatgcagtttcttcctggcatcaatggtctttacaatttggcatgtttttgcaatggctggtaccggttgttcctttccatgtttagtgcttccttcaggagctcttgttcagcaggcctggtagtgacaaaatctgtcagcatttgtttgtctgtaaaggattttatttctccctcacctatgaagcttagtttggctggatatgaaattctgggttgaaaattcttttctttaagaatgttgactattggcccccactctcttctggcttatagagtttctgctgagagatccactgttagtctgatgggcttccctttgtgggtaacccgacctttctctctggctgcccttaacattttttccttcatttcaactttggtgaatctgacgattatgtatcttggagttgctcttctcgaggagtatctttgtggcgttctctgtatttcctgaatttgaatgttggcctgcgttgctaggttggggaagttctcctggattatcctgaagagggttttccaacttggttccattctctccatcactttcaggtacactaatgagatgtagatttggtcttttcacatagtcccatatttcttggagtctttgtttctttttactcttttttctctaaacttctcttcttgcttcatttcattcatttgatcttcaatcactgataccctttcttccacttgatcaaatcagctactgaagcttgtgcatgtgtcacgtagttcttgtgccatggttttcagctccatcaggtcatttaaggtcttctctatgctgtttattctagttagccattcagctaatctcttttcaaggtatttagcttgtttgtgatgggttcaaacatcctcctttcgcttggagaagtttgttattaccgattgtctgaagccttcttctctcaactcatcaaagtcattctccatccagctttgttccgttgctggcaaggagctttggaggagaagaggtgctctgatttttagaattttcagcttttctgctctggtttctccccatttttgtggtttttatctacctttggtctttgatgatggtgacatacagatggggttttgatgtggatgtcctttctgtttattagttttccttctaacagtcaggacctcagctgcaggtttgttggagtttgctggaggtccactccagaccgtgtttgtctgggtatcatcagcagaggctgcagaacagcaaatactgcagaacagcaaatgttgctgcttgatccttcctctggaagcttcgtctcagaggggcacctggctgtatgaggtgtcaatctgcccctactggaaggtgtctcccagttaggctactcaggggtcagggacccacttgagaaggcagtctgtccgttctcagatctcaaactccatgctgggagaatcactgctctcttcaaagctgtcagacagggatgtttaagtctgcagaagtttctgctgccttttgttcagctatgccctgcccccagaggtggagtctacagaggcgggcaggcctccttgagctgtggtgggctccacccagttcgaacttcctggctgctttgtttacctactcaagcctcagcaatggtagacgcccctctcccagcgtcgctgccgccttgcagttggatctcagactgctgtgctagcagtgagtgaggcaccgtgggcatgggaccctccgagccaggtgcaggatataatctcctggtgtggtgtttgctaagaccgttggaaaagcacagtgttagggtgggagtgttccaattttccaggtaccatctgtcacagcttcccttgtctaggaaagtgaattccccaaccccttgtgcttcccgggtgaggcgacgccctgccctgcttcgactcacactccatgggctgcacccactgtctgacaagccccagtgagatgaaccctgtacctcagttggaaatgcagaaatcacctatcttctgcgtcgcttacgctggtagctgtagactggagcttttcctatttggccatcttggaacctcctatgtagctattttgatctgctatcttagatgtatttctgaaagaacagttatagtttgttcatttgacttgtttctagtcttttagcaaaactgtatcggaagagttcttttaggtgattttgtccaataacctcatcttcttatgaggcttttgatgtcctgtggcagcacctacttactggcactggagaaagtccccagaatatcctgtgattgtattttacatacatcttcactgttagtggactcctagaagacagtcttagtcttaggtcatagataccttttccttccctagtactattcacatagtaggggccaaaagaatgatttttaatatatctataaaatcaggggagtgaattaaattctctctcaaaggccctaagatgatggagcttcttggttaatgcttctgatatatgtttcctttaggtgtgtcttgtgatggaatatgctgaagggggctctttatataatggtgagtgtcattagacctgtctttatctagtggattaaaataatttgaaaaattttaatataaaccctaagttgtttaacattcttcacaatttgccgtcagagtcccaaaagggcataatttttaaaaatctgctaagaataaaaatggaaagataagattctataacattagtatgtgaaatttagaggtctatcaattttttaagtagatggtactttgcatttcattaaaagcatttaagtaaaagtttactttttaaatagattttaaaatatcttcagatttttttctttttgccctctcataactttgagcctcctcattttagaattctttaaccatatttcgatttcactctgctttattttttcttttttttcaaaaaaaaatgtgaaaactcacttcacacaaccttttatttgtagtaatgaaaaaaaactttgtgtagttacattggagaacagagttcttttaccctaaaaataccaaccatatgcagaaatgtattgtctcttgtagcaccagttatataaaacaaattgttacattttattttttaattagtattattttatgtaaacttttacttatatttactgcccatgtgttcatcattgtgatggatatctaataccccattgtcttatttgattgaactacttctggtttttagccattacagaaaatacaggtgcaaacatcttgatatacattgttttgtttctttctgtactgttctctgcctctctcttgtagtagtgtgccataagactgctcataatttatattactttataaaagtctttatctgtttgaaaaaatgtggtaatgtatattgattttacttcaatgtaggaataacatttaatagatgtactattaaatgttaatatcatggcaattatccactcaaaattagtagatattttcatcctttttatttagaagaaaaattaaaaggccaggcatggtggctcactcctgtaatcccagcactttgggaggccaaggcaggcagatcatgaggtcaagagatcaagaccatcctggccaacatggtgataccctatctctactaaaaatacaaaaattagctgggcgtggtggcacacgcctgtagtcccagctactcgggaggctgagccaggagaatcgcttgaacccaggaggtggagtttacagtgagccaagatcgcaccactgcactccagcctggcgacaaagtgagagtccgtctcaaaaaacaaaaagaaaaaagaaagtaaaaaattaaaagcaggactgatggagcatatgtatatgtagaaaaatacccagtcatgtgttctgatagtgcttgcattcacattgtgtcttttgttatatgcaataaagttctttttagtttgtgcctttctttcgcagtgctgcatggtgctgaaccattgccatattatactgctgcccacgcaatgagttggtgtttacagtgttcccaaggagtggcttatcttcacagcatgcaacccaaagcgctaattcacagggacctgaaaccaccaaagtaagttataataatgtgacacccctcagcctcttcctccttctctctcactctcaccaccccgaacccactctctaattcaagctcattattgtacaggagtttctcttttctctatttggcttactcagtgtttacttttaactcaccttcatcatttagtcatttatctaagcttgtattttagatgttgtctttagtgggatttttatttttggtaacctctaccttagattagcatacttctagaatctgttagcctataaaaatctcattttgtgcctgcagtatataatgttgctgttagacaattccttgggggcagagataggtctgacgtttttcttgctgtgtccctaacacctagcacataaacattctacagaaatttgcagagttgttattacttgctctttcagaggaaagtaaaagggcatttcttggcatctgggtagaaattgaaaatattctggattcttcataatgtgaatacttgggactttaaaaaacttataaattccttagataagtattttaaaagactaaaactttgggggttttgtttgtataggtattcagttaaagaaaacatacacataaaacatattgtttccttttctctctttttttttcttttatgcacctgtgacacagtaaaaatagtctccacgtatcttctttaccctccccccaagctcccaccccagcacattagtctttacagaagaggtttcccttaggaaatcagtatagtcttcagttattccattctcttgatactggttaaagcattaaaacatcccttctgggtgcaacttgtcactctcaggtctaatctgatatactctacataggttccaactcttagaatcactgttcttgctatgtatcttatctctactcccaaacttaaactgatttctgtttccccaggtcactgataaaataatgtttaagcttttatttttcctgaggctattatcttagttacctgccttaactaatgaaaaaatcacttagcctttttttcttcattgtgaatattcagtcatcctttttccactatattaacagagttgaattattaaagcaaacttatgagaatcacagctcttaaccagcaacaaattgacaaatgatccaaaggatataggcaagcatcagatacagccaaagcattcttttcctaaaagagtctgaacgcatctgatgcaacacccaaaagtatcccttttctcctcgttacagtatgttttggctttggaataaatgattagttattgaacaatatatggagaaatatcttacaaaaggaagtcatttccattttctaacatcttttacattgcactaattacatggtttaaatgactatccctaatcttcatccaactacaccccatgaattttaggtttatttaatcaacctagttagaccagatatatccttctaaaatcatttgtagatagagattctccttttgctagtaaataccattaacatatttacagaaggtctggtctaggtcatttattccaggcctctccatgattggattcatcttgcaaatcgtctttggagcccctggtatacaagttggactttagaatcagaattgattctagttcagaaagtactgggtaaaagaaattctttggaatggctatgattttatatataattggacatacatgaatacctgctatatctttattttttaattatttttattattattattattttttattttgagacacagtctcgctctgtcgcccaggctggagtgcagtggcgcaatctcagctcactacaacctccacctcccgggttcaagcaattctcctgcctcagcctcccaagtagctgggactacaggcatgtgccaccatgcctggctaattttttgtatttttagtagagacagggtttcactgtgttagccaggatggtttcaatctcctgacctcgtgatctgcccgcctcagcctcccaaagtgctgggattacaggcctgagccactgcacccggccaatacctgctatatcttattgtcagtggaaaacctacagattctgtggtcaggaagagttcctcaaaatggtatctaaagaaggtacctgatgatctagggaggtgttttatacactatcaagttgtgcttgtgcttgtattttatcttttgcaagtttattcacatttacattagaaattaaaatgtgtttttaatcttaacagtgtgaaagtaagcctacaaagataatttaagttcagatttcagtgagccctgaatttcctgttcaaggctggtgaacttttgaagtcgagtaaaggagtactaacataaaactcattcaggaaaattatcttgaatcatcagaaattatcttgatatcttgaatataccagtataaaacaaggaaactagttacagagttcttataattttcttgggtaaaaagtgtaagagtttgaacaagaacattgagatgcgggaaaaaagctttgttgaagtacatatagaggtatactggatttagcattcttttcactggaatgattatgagagtctttttggtattatggaactgtgaatagtagtttatctgacttattttagtcacattggactaaaagagaagaaatttccaaatagtctctccagatgtaaaaagtttataaaacttgtaattaaaatgaattcctatgtactgctattggatattactacaatgtgatggtgcaaattatattacccatttctatttctctttgtcatgaaaagcaaaaccttgtaagtaagagtatgctacttggtgactgtagttgggtaatagtacacctaggaaagtccgaatcttaagttcagaaaattttccagaaatctctcattaggtcattttagctataatagatttgtattcctcccacacattcatagtctaagcacaaaaatggttttgggattgaacatttttagaagtatcttcaaaataaagacattaaattacagaccatttttttccttctatattggattattttctttatatagtgttactattttttaagtaatacatatttatgattaaactcccatttcaggataccgtaatgttgacctaacagaagttttttaaaccccacgttttattttggccagatagaagtatgatcaggaaagattttggagctagagatgaagacatcagaatgtgagtctagcagccttccaaagagagctaggttatggttaattaatttttgcttattatttctctgaactattaggcttttatagtgaccaagtaaattagtcatttcacagaagttgaatgataacattcattttgcttaaccttttccatttccacaaatgtctcttcttttattgtagaataaaatgttggccttgtaacttttgatgttttttgtttttttttaaacagcttactgctggttgcaggggggacagttctaaaaatttgtgattttggtacagcctgtgacattcagacacacatgaccaataacaaggggagtgctgcttggatggcacctgaagtttttgaaggtaaaatggcaaaagtatggtatgtttgataatctccctcactccttgtgaattcatatgtttttatagattttccccatttccatggttttatttctgcataatacataaagtatacaatgaaatctaaggggatattaaatatagtgttatatcctaaattttatagtaagatttaaatcttctatgcttctaagcatatgtacagttgatcctcattgttcaccaatttcttaattgcaaaattgcctatttgctaacatttatttgtaaccccaaaattaatactcatggtgctttcatggttatttgcagacagtgctttcatgtactcgcagacagtgtgcatgcgctgagcagtgcaaattttgagtcatctaacgcatgcttccagctgaggttgaacaagacaacgtttttccgtcttgtttcagctctcatgctgtaagcaggtgtccttttttgtgctgttcagagccctttttcatttttgtgatttttgttggtaattttgctacttaaaatggccctcaagcatagtactgcctaagtacaagaaggctatgatgtatcttaacagacaatatacatatgttaaattatcttcattcaggcatgagttacagaaatgttgactatgagttcaatggtaataaatcaacagtatatatgaataaggtgtctttaagcagaaatacgcatgaaacaaggctatatattgatcagttgacaaaaacatggtgaccagaggcacacaggaacctacccctgtattttccttaggagcagtgattcagtgttcactaattcagtgttctcagaaactttatagaacataaataccaggaataatgagaattaactgtgcttttgtattggtttcctagcaattaaaaattgagagccctaaagtttaaatgaggatgccttaaaaagaatgcaaatagctgggcgcggtggctcaggcctgtaatctcagcactttgggaggctgaggtgggcggatcatgaggtcaggagatcgagaccatcctgtataacacggtgaaaccccatctctactaaaactacaaaaaattcgccgggcgtggtggcgggcgcccgtagtcccagctactcgggaggctgaggcaggagaatggtgtgaacccgggaggcggagcatgcagtgagccgagatcgtgccactgcactccagcctgggtgacagagcaagactccatctcaaaaaaaaaaaagaatgcaagtaattggacagaaataagatactaagaattacaaataaatgtcaagcttatatgtttaccttcttttatacctccatatgtcactgaagttttaaaagagttgtctgtaaattatatgctaggtttctgtataaaaacatcaaattatcttttaaatgaaagaagttgaactgaaggtatgtgatttgtatgttaggaagtgtaaatgcccataaaattcagatacattcagttaatcagactctggttatagcttatttctttcagttttgatgactttaaagggttttctgtttgtttttagccaccccagaggaagagaaattgcaatgcaactagtcacctgagtggagctcttttgccctaaaattcaatttagtaataaatgaataatcaggtgttatattacacaagattaaataatgcctcctgtttcatatacagaatgtatacatttgacattgttttaaaattatttacttatttaatatacctttatgtgagttaaaatgacccaatgttactgtatgtggagagcaaaaagatttgtttatacaaaagattaattttattgctctagacaacccttaattgtctagagcaacaaaatgcagactgttaggctgtgtaagtttcttcatttctgaaagatgtcagtcaacctgtagcccaaattagactgtagcatggttgtagtgctatattacagtgtactgcttagcatgtaaagctatagctataataattgttcattcttacagtgagttgagtgtttgtttgtttttgggagattatgacgggtgcttattgtgctggctgattcaaccacctacttagtttgtaaattttgctgtgtaactcaggttatccataattttcgttacttacaacgtaatgtttaagtttataaattaagaatttcccttcaccatatattgaggaaaaaactgtaacactaaattagaaagttcttctgctttgatagcagagtagtgctgtctgtcagagtgggaagaaaatttaagattaaaatgtaacagaaaggaggccaggcacaatggctcatgcctgtgatcccagcgcctcgggaggccagagcaggaggatcagttgagcccaggagtttgagaccagcctgggcaacatggcaagaccccatctctacaaaaaatttaaaaaattaaccagttgtgccagcgcatgcctgtagccccagctactcaggaggatcacttgagcccaagagtttgaggctacactgagctccagcctggatgagagtgtgagatcctgtctcagaataaaataataataaacaacataaaggaatgtacagatgtttcatactctgccccagagaaagtatcagtctaaatacataaaagtcaagtcctgtgcctcttgatgaaaaaactgcctcttgatgaaaaaagatagaaaataactgagtttctgaagtagttttttagtgtattgttgatacttaattcatttaaaaatgtacttgttgaaaagacaaagtacttcagaaagagtagtttcttagttctacatgtgacagcctcatttttatccctgatacccattctcaaaatttaagccattgtttctgtaagtcatgtggaaaaatagtctttaggttatatactaccttttttttttctaggtagtaattacagtgaaaaatgtgacgtcttcagctggggtattattctttgggaagtgataacgcgtcggaaaccctttgatgagattggtggcccagctttccgaatcatgtgggctgttcataatggttcgtaaaaagaaatttttcttaaaagtactttttgtgttttctacttggaagactactcctgtccccttccctaaagaatatcatttatctctaacattaaaatgtacaattctttgttaagagactgctttgctattatcagactctgccctgtccctgccccagagtccagcagagcaggattgagagtagtcctggtctacacatgcggctgaggatgttcactggctccgctgattagggaaaggccatcagtacgcaacctagacagttggctctctcttagggagaagcatcaggctggatcatggaaaaaataaaaaaatacatacataaaatctctgacatggttaatataactggagagttatagcccttttctcctgaagaagcaagggcctcatcaaggagaagaagcaaagaataataatgcttcacatatttttcctgtttatattctcacccacccttagaaggtgagtactgttgcctcattttacagattaggaaactgaggcctagagaggttaaataacttgcttaaggtcacaagattagtaagtggtagagctgggattcaaatccagatgcttctgacttgaatgctcatatcttaagtcatattgacttatggactcaatgtccttgcatctgtcctgtttcttttatagttctggtaatgttgtttttaaccacatatgatgttagaatgcatcctcttcattagtaaagttactttacatttgcttgggaaaatagcttttcatgaaggaaaattacttaccttcttaattttagcgccactcttagttatttcatttctatgccttgtttataatcatgtgactaatggccattttttacattattccacaagtctaaaaacaaatgtctgcctaattatttaggtcattcatagatttatcaaacagtaccatcatctgagtaatcttagctgtttttaccagtttcctatactgcctttaatattactaccattagtatcattgtggagactgttcagcattgaccaggacagcttgcttgcttgctttctatcagttgtcagtaaataattgaacgtccgtgaagtaaagagtaaaagaactaacttgttaattgataaaattacaaagcacttttattactccaaattacagatcttaaactacaagatctataaaataaataccactttggaaatacgtacaaagagtttgcatcattctttgggtaaatacattcttccccccttcctctcattttcaattgtaggtactcgaccaccactgataaaaaatttacctaagcccattgagagcctgatgactcgttgttggtctaaagatccttcccagcgcccttcaatggaggaaattgtgaaaataatgactcacttgatgcgggtataatccttcttttgaggggctttggatttaggggaatttaatatgtgctgagttttaatggaattttaaaagggatgttattactatattctgctttatatattgctatgttttctaagtgagaatgggcatttattactcatagtcagaagaggaaacatttcgagagggaaaatctagttctttatcactggaaagatggctagactaggtttctagacttgcttttttctttttgcttacattagtggacaagtatgtttgtctctgggcctgttgcctcatttgtaatgtgggagaaactgaaatagatagtctctaaagccatcacaggacttggatatattaatattatgacttcaatacatgataaactaaattttacatttttctgataccaattttcatcaagcatttagtcatttatgcaaggcaataggttgcattctcagacacatttatttgagtgacttttactatttggcctattttcaggtttttatatcccagtaaaaagttaaactttcttctatttagaagaacccttttaaatgattatcaaattttcctagtctgtgaatcaagcgcctttagaattatttggaatattttacgcctctggtttttggtacattaacaaaaactgtgaagtggtatcttggctttaaaaagttcaaatatctatgaaagtgcctgaattttgaaacagtttgttcagtagaagaatcttacaatctccttaaatatagactaagtaatttcctaaatggtaaaacgttgtttattcaatctattgaaaatttcttacgcaaagcagcttgaactaatctactaaaagtttaccatcgtatttggataccagtcatatatagaagcctaggccttaaaggtgtgtgcataagaaaacaacttagtctctgtagtcagattacttaaaactttaggatatataagttattgcagttgtaattttgcttctctgttccttgtctaatttgaggagaatacgtttcctttttttctctaaattctaacatttttgtccagcagatactttgagtattatgcctccagtttgtagaaagacattcataatctatcctcttaatatttaaaatgttctaacaattattctatggtatactagtctcagtcttcagactaacagtcactggaagtttacatcactactgtaagaacatgagtatgttttacataattatgagaaatgatactattttatttcatatgtttctctagagaaatatttgctgttttcttcaagactatctagactccaatgtaagctagattcttaggtaggtgcatggcattgatcaaagttgaaatccaagagtacattattgtaatctttgtaaaataaaaaacttaggcacctacaaatttagtatataacttagggaaaataaaacattaatcaggatttaatttgtattaaggaaattttaagctgtggtttacttttttatatatagtactttccaggagcagatgagccattacagtatccttgtcagtattcagatgaaggacagagcaactctgccaccagtacaggtaaatggatagattggaagagtattgacttgatttttctttcatctctattcccatgaaattataatcaagaagtaatgaataatgtccccatttgcattttaattccttcatttcatatgattgactgcaatttgagtttacaggtgcgtcattcttcatgtaggtaccctgattaaagagttattgaagacctgcttccaagtcttagaattcctacataattatgaataaaaagatggcatattgtattacagtgaatgtcattcttaacttgaaaaatcacttttacatgcatactactagatcaagtagtattagaaattattgtaaatgtatttaaacatttcttcatcacgaacaccctagtttttgttctcttctacagaggctctgatttaagaagctatgttaaaagttccttagttttccgaaatgtgaagtagtagtgggacatgtaatttgtggtcatcaaaaagatagtagaaataatactgtaacttagaaatattgtacttctcaaaatatagtggcattataagcatttcattattaattgaaacttaaagatatgtgtgtgtctatatgcacatgtatttaccctgcatttattgaaaaatacttttactgatctatttctcccacctcaagaatagttttatttattttaagatggttactgcttggctagttattctcaaattccagttttactgaaaatattttgagttgctctgaattctaaaatgtacttctctaaaattctatcatttgtgtctcccacgtcctctaaactctctcttcatttccttactgtgaccttgaattttttgagcctcccaccttttcactggtcctcagtcctcttaggtccttttttctttctccctccacttaattccaatcaactattataattcttttgggaataattttcatctttctagcctctctctcaagcttgcttggctaaaccacaagcctaatgaaagctgacactcggcttactccttgcctgtaccaatgcagctgagtgtggctggagatagcacaggtttactatcctcacgtgcatgtttagtgctattggacagttgtactgtattgtagttcatctctttcctcctatatgtcttaattttatactgtagcctctcctcagacttcaaacacctcctcgccactcctcactctcagctgatcttgtttgctctttctctgagaaaattggagtaatcggaagacagcttccacaacatctgtgcccatctactctgctttcttctgttactctggctaaactatccatacttctggccaaaggtgtacctttctgcctgtgcattatatcccatctgctcctctgagcaattctcccctgtctcttgcatcatcagttttagctttctactggatcattcctaaaacatacgtagtctgtatttgcattcactagcttctcttttccccttctttcttgagctgactccattcagacgtattatgccagtacttcagaattgttcttgtcaaggtcactagttatctctacatcactacatttaaggaatcattttcatttctcatcttgactctcagtagcacttgacctaattcattactttctccttcttacagacagcactttcttcagttggcctccgagataccatactagcctagattccatcttacatctctggccgtctgttctcagttttctttgctggttattcctcatctccccaacctagaaatgttggagtgcccagggcctgctcatttggcttcttcacttatctgtctgcactcatttccttggtaacctcattcattattatggccttatataccatctgttggctcataatgttttccatcttatacctgaactctatactcatatatccaactatttcctttacatctactagaaactcaaacttaatattttccaaactgagttcctgatacttccttcaaactcactcttcctttagtctttccgcatctcaattaatagccctcagttcttctactagctcaggttaaaaaccttaagttattcttgactattagaagactatttaggcatcttggttccttttttgtgctatccttaagtttctcttaaaatgggtttgtttggatatcttcattagcttgaaaagtcttattttatttctgttcctgcctggctagtttataaaagaatgtaagttacataataccaagtgaagcatttgtattatttccagccattagtcataaatgtttctgcttttcctaggctcattcatggacattgcttctacaaatacgagtaacaaaagtgacactaatatggagcaagttcctgccacaaatgatactattaagcgcttagaatcaaaattgttgaaaaatcaggcaaagcaacaggtttgttatgttattacaagtaaaactggtaaccttaccagtagtcacaatattatactaactgaaattaattatttaccatcttctattttataaatcctgaattttcttcctgaaacatgcaaaagagcttacaaatagagacacgtaatgagattctcctaccatttattaccaaatggtttttccttctaatgattgctacctttgccaattctaaatccctatctataataatccctaaatgtaatggttgatggttaaaaatgtaaaatgggtatattttggctgcgctgcccagttagaggagttgttctaagtctatcatttcatgctgttcagatttattatatttttgccattgttgatttttaaaaatatttcaaggagtgagtttattcattttgcctgaggcatttaggttaacgaataattggggcttttagctcccagttctagtgactgccttttcataaagacagtatctgcagcttgctttcccttacccctgtagctccctctcgtacaaacttccctctcctttcagagcagaacaggatctatcagaatcccatttgccatcttcctccttttaggttgcctaagattgctaaatctaaagaacttcagtaattcagattgacctgtaattttaacagagtgaatctggacgtttaagcttgggagcctcccgtgggagcagtgtggagagcttgcccccaacctctgagggcaagaggatgagtgctgacatgtctgaaatagaagctaggatcgccgcaaccacaggtaaaaaggaactacaagtctgaagagtgaaaatgtatataagcctttttggccatggtagtttcagttgtcaaaggttttttgtgtgtgtcttatatttttttttaaataggaagtaggtttacaatatatttttctaagttactagcaatagtttatgcatttatctcaaattccaaataaggaaggtatgacttgtaaaattatttggatgagaaagtatgccttcctcatttacagattttatcaaatgtaattctttctgctcaaacatgagttgaaagtctaagtgagaaattgaaattctgccaaaaccagaatattttggggattttcagtgatactactagatttttgtgctgaactcaaataatagcaaatattttgtttcaaatttaacagaaaaatgtattccagatccatgtatgatttgaccttctatctgcttcttcattccagtgacaaaataatagctaagctggttgtggttaatttttttaattgtaaaataaaatatcataattttattagatcttgaaaaagctagcatttaaattccattgttcagttcttaaaattattaatcatggaagaactggtcagcacaaaaacaattacatgttttgttacttaagtaaactgacaacctaattctgtgaccaggtttcattttagtaatgctggtttaatttggacgtttttggttttttgctgattctttccagggatcagggggagctgattttaaaagtaaacacgtttctgttgtggaaaatgtggaaatgtaaacaagccaaaaaaacttacataattaccccactcagagataaacacttaacatttttgtgtatttaccccatcttttaactatgtatgtgtataaatgtatatattcatgtgtatttgcatcttttttaacttagctaaccaattttttaggtctttttttcacttatttggtttttttctaaatagaatattctcattgtgtgtggagctcttttcagaaagaagttgtcaagatggaccatcatactatacttgtcttcaactaatcatgatcattgattttatcagctactattagaatccattagatataacagaatatccgaaataacagtgtctataacacataagcattatttttcacatataaacaagtctggaggtagtgggctctgtgatcttgaagtaactggtctcctatttctgtgctgtaatccctactgtatagcttccattctcaaagttatcctgtgctccaaaatggctgttgaagttccatttcatcacttctacattccaggcaataggaaggaagacatgggggcagggcaaatagacatccaagttctttgaaggaacattcccagatgcctctcttaacaacatccacacatcattggtcaaagtaacatggtcgaatggctacacgtagctccaagggaagaggagatctgccctcttttatctgatgacttttctgtcctaaataaaatcagagtactattgctaaaacagaagggaagagtggaaactggcagaagatagctgtgtctgccacagatgggtcttcagaaactatcaagttgagtagaagtcaccagccactgacaagcccatgagtctccatgagtcacaagtatttctttggagcagggttgtctcactgtagtgtcagatgaaccctactcaccgggacataccctcatgctttgaggaacccttttcacttcagggatgttgttcaggatagatctgccacatactaattgctgtctcaaaactgaaaattgttataataatggtttcatgtcttcgctagtatcatatttctagtcaagcactggttttttattattatttacagaaatgactttgctagaaggataaccacacacattaaaattttgcctaagtgtagaacaaatgctattgtacatcccttgagttttacacaatttaaattttttcatgaattgtcttacttggaaagagtcatactttccagccttttgacagactttgtgtttactgtgaatgtaccctaaactttggaaaatataataaatatttggtactagaaatatgtataagtatgactacaaaagcatatacatttcacactttgattcaataattattatttaatcattggattttactttatagcacacttcaagaaacacctaacttgaacatgtattcctgtgtttgtgtaattaaaacaaatacgacaacttactttttaacgcctttcttcctctcctccttcgttcccccacccccatcacagatcagtgatttcacttaggtagactgtttctatgaatatatttgaaattttgcttcctcattaccctgcagctttgtctctgttctttttatttttttctgctaattaaaaccagtgtgtaaaacatcttgtatttggtagttgtttgctctttaatctcgccttttctgagcatggatgaaaagttaggtagttctgcatgccattctgcatgaaatgttattaacatgaactatttgaaaatgagtctatttttgtagttaatcattttccgtgttactgtttgtggttgtttgcatgtatactgtatatatgtgtttttgcagcctattccaagcctaaacggggccaccgtaaaactgcttcatttggcaacattctggatgtccctgagatcgtcatatcaggtatcatagaccacctgagttggtctaatagctgtggaaccggaataatgatccctggtacttgtaaaatgcttcttgctccaatttttacaagacatgaaaatggataccttgcatgcagtaattagggagacagattgaaaaactacatttattctgaagcagtcttgaaaagatacctctgatctacaataagtgaggataaaatagaagagaaagtaaacctttttggagaagggagaacaccaacccagaattctaccaacttcctctctacttttaagtgagcacatgagctaaacccagaccttttttgcacccaacagaaagaggaaacaactaattaaaatttgttattttccttggctcctttccttcctcagttactgctttttgggtcccctctagactttctgtcctaacctctttctgttggtagcaagtgaatgtgaagttgagagaagagagttgctaaatagcattttgccttaacctggaaaacaaaaagtaaagctaaatgagatgtgctgttttgcagggtatcttgccaaagaatcatgtaaaatagttggtcaattctgatttttgtgtattatcaggagaatctcataaattacatgtttttatacctaacttacacatggtactttagtgtctaaaattggtaaactgctttatttcttatggtgatcatttcatagaggaatatgttaccatttttaatagaaacttaaatggcatattgaccttcagtattgattaatgtattatcaaaattatcatttatttatccctttaggcttttctctacctctttacccaaaatcttgataaggaaatacatattttccacacacgttcatgagtgcgagttggatgaattcttcagcatgctgtcctttgcctgtgattgtgtttttagcagtgttgataattctagttgaatacctaatggttattttctcctctactaaactgaaaactatgtaaggatagaatccatatctttgtgcattattttgttgttgttgcttattattgattgtatcagcagttgctggctcagtgcttcacatattaagcatattaacatagtgtttaataaatacatttattaaataaatgaacagacctattgagcatctcccctggtgagaaactagcatacaaaaatatgaattatactattcttaggtgccattttgtctgtataaaactatcttatattaattttcccctggttatcaaagtggtttcttattttacaacatcattactattgctattcaaagagtagagttaacccatttttcacatggtaatttttatttattgaatctggactgcttcagaaattaacaaagagatcattttacatggagatcagtttacctccatgcggaaaggtactgtgtataagggacgtactttaaagaggtggaagcatttaaacttacataccgctgaactgtgcttcccttaaatgtttgagggaatcaggaaaatttagacagatggcagtgtaatcttatgactaagcattaagaataaatttatatatggcagcgtagcccacgctatacaagataatgggggagggaaaaataaggaaagaataatagtttataactgtcaggtactactggcatctagtgggcagagaccagggatgctgctaaacatcctgatgtgtaccaggcagtcttctccaacaaagaatgatccagcccaaaatggcagcagtgctgaggctgaaaacccctgattagatgttctttgtgccctacaaagtagcttaaagtacatcttattttacctttatacaatcttacaactaggttatcggatgaaattatagctgtttaacagacgaagaacttagatctgatgatgtttagtggtttttccagaatcatatagccaggaccccaacccagatcttctgactccaagtcacatccattttttgttcttttgtttaagtcagagaagctagagtaatttcttcttgctttctcttagtgttcacattaaggagagctcttcagccagggagatcctcttttatgacattgggcctttatggaatcaggtaaccttaattctcttaattgccagagcagcagtgctattcatatgaaaatattattcagtaataccttttattaaatattctttttaggcttttcccccctcagatatcaaacattaacttactcaggtgcactttctttaatagaagaatacaagctgtagaattgacactagtggacataaaagccaatcatgaatgtgctcataggtaatgtttttaaattaaatataaaaataccgcccatcctttgggaatatctcaaatttcctacatgacattttaattgtaaagaagggtgatacttaatttccaaaatttcttaatactttctagaaattgttttgttctaagtggatttcccacaagctttatggtattagcaaatacttcttgatatattcaaactgtttaattagcattaaaacccaattgcaaggattctttttaaatatagctttttaaagatcttatttacatggataagagtttcgttaatacttccctttggccaagtgcaatgtactgagtctaatgtacttcttggaatgaactacctctcttaataagagcaatccttcaagcatcacaaaaaaggttttgtatatatatctttaaagtcactaaaatgtctaacctagtcataggtaaagaaatgcaaagaccctaatcttgtaatcttgttttttgctcgctcttcaaaatgtgtatactatgccatcagtcaaatgtggaagaaaaagcaacttagcaaaacagcactatttatcaatttagtagtctctcagatcatacagaaattaacctttaataccttaggactccctgtgggtcagactgtacaattttttatacctcttctaccatattactggctctgaagaactgacaaacttttgtacggtaacccttccttctttccactgtccatctgcccttaaaagagtgagctttatagattagcctggctcctttttaccaaggaagacacgcagctaagagcaaattaccagtagagtgtgtgacattttgctgactcttcctttgtagagaaggtcctgccaagtagcagtgtgctacctaagcaaagtaaatgtaaatgtggaagtttcttgcccagtatttagaccatatgaactacagttttctaatgcatttgcttgctggtaagttggaagggacttcgagaaaagaaatagattttcttaaatgttttttattaaaacttgagttttaaaaaccatatcctttctcctttcagccagtacatctaatttgttacatttatatttgaagaaaagggaataggtagcagattattggattctttgaagtttttctagattttttttgttctaggactttaataagggcagtaagaacacagatcattgttttgcatggattttctttactttttcccatattttctttttgtcactatctaagcttccaagaatctatttttcacccaccttcatctcaagtacacaaatgaaatagattattgggattgtgaaactatgtaagacattctaatgcagttcatctgatgttagaagaatacctaaattttacatttcttttaaaaatccaaatgtcaaagaggaacaggtagaatgcctaaatattacaaaaaaagaggaacaacctttttcagtttaacatgtagagtaagagaataagtagttaagaaagcgaattatttttcatgcttgtagcatcagtaatggaagatgggttgttctgctctggagcctttgtgtgagtagttatagcatttaaggaaataaactgtaattataatgcattctaaaatctactggaaaaaaatactgtcatatacatatatacttaccacctataaaagatttaattaaacattagtcttctgcacttctactctgatataaaatttgttgtacatggttcataccggcttgattgcttttataaagtgaaatgagtttcccaaatgtgatatgcaaaagtaaaattttctaaattacagacatttttaatgctattatatcatcatagataaatttatttcttagttcagattagattataatgcttgatttcaagtacttgaaaaccatccattctatagatgaacattgccttgaagtgcttcaatttgagaaccttgaacagtgttgctttagtgtaccttttgttatttctaagcctaaaataatatggcataacattcgagagcaataaaatgccttgaccaaagaggattttctgtcttacatactgttcttaaggatatgcaaaagaagattgaatatacaaatgtttttgagtcagatcttactgaaatagataagatttttgcctagtttcctgaagaacctgaacttaattgatatttattgtttgttatatcattcttaaagctaaaaagaaaccttaggtgtccttatgatttcagccgcatttagatctcttaactgaataaaaaacgcgtattcgcttttaatttcagtcaaggacgtttagctctattgtatattggttttttactaacagtatgataagtagtaaattggagtaagtagaatgtagagaggcccaaacattttaactgaaaaatagatgagtagttaggcttctaatacttgtatcttgttgccctccttcagaagtttcaaatgtcaggtattggcaaataaattatctaggtggggagggctttatagaatgcttaaacaactggaagcagagatgcttttcaaggacacctgagcactattttgctttctccaccaggatgaaaatatcacttttttaatagtatatttggttcaagagccggtcggtaactaatgtttgtaaacctttctttaactggaagcatgtaagttattaaatatttcctccagactactgcagcaccaatatgaagaggcaaagagagaaagaattgagtttttctagatctggcaagttctcacctagcacagatagtgtcattagcagatgtaagcctttgatagggatcctagggctaaggggtgctatactaagatgtactgtactagtttctgtgtatagccacctcactttcaataaaattctctatttgtggcatattaaatagggaagttaatctaactttataatgaatatttaggtggcctttctgccatattgtatagtctaccaagatcactttttgtaatctaaaaaattcaactctaagctaataaagctggtttattggaaagcaaataaaccacctgacggacctttccagtgaaagagccagaatttgttaaaattagtaaagaaatacgaaactttggcagcctaaattagaacatatattttaaaattacatgttcagtttaccatgaagcagtaatgtaatgctagtgtatcatgctatgcatttttttaaatcttgggtattttacacatgaagagaatggtgtcccataatgtgtaatattcaaaactcgtgaatctcaaaatttctaacatttaggttaagagaagtctccaggaaaatgtagtgttgattcttacatgaagacagtcttcaggaagttttaaagtagaaaataagagtagtgtaagtcaaggaaaactatgagcttaactgataagaaaaattacaggagtggctgtctgggacctaagccagcagtctctggaagaaacccgggataacttttaaataccagctcaggaaatcagttgtacttaaaagagcagcttttttgaagaggggctctgttttaatgacattactgtaaaaagaatggaactgacccctaagttgctttctatttgcggtgggcaggagtgcagatttagtatgcactggcaatgtgatgtattcttagaagtcattctaaaaagtggaatttgttctctattataagacatgaacgttccagaattcattacagaatgaaatactcaggatagcatatgcaggtttcagattccttgatcaggcatctgtttacatcatgctgtcctcatttctactactttttccatttacactaccatgtataatataggtatgtacatatcaaaggaccaaaaaaggtaaaatgagtgaatgtctaaattagtattcagttgcaaaaaacttcagaatcaattcaaatttactgagaacacacccagtaattttcatttgaagtaataggaggttgatttttcttacattcatatttctaaattatgacttaaaatttaatattggagcaacaagtatttgttgattgcaatcctgttttgctttgtctgaactatctgccagatggtttctgccatggttgtgctaattaaaatgcattgcctaatactgcttgctttgattcatgcagtagcttaaagatttctcattttatggcatttgttaactgtcagctcttctttaccttacttccttaaaaggttttacttcccttttctcctatccttccacctaaatttaagttcagtttttgttgttattgcaatggtgatgtaatggtttatagacacatgtgtcgggtggttcctcagattaacaaatgttgctgtgttgctaatctgaaaagagaattccagacacttttacaagcctgtctcatcaccgctaattttagaatgaatgtgttgaatgaaatgtgcctaaaattgcttattagtcacggttgtggggatcctttttgtccttgggaaacaggggtagttgaaagtattcagaaaagtaatctagtggatctaattcaataaatgcacagttttgttgttttagtttgtaatgaaaagttgaaatttttggaataaaatgaaatttgaagtaaatgtgaattcagataatgcaaagaattataaaacgtagcttaaaatggaaaaaaactgatgatgtcttacatttgcaagaggagttacaaatttgagtttttatattcactacacatattattctattaaacattcttattccattgtaaggtccttttagtttatctgcagcataataatggggtcatgtgggttaaggtgctaaattatattgctgattggttttaaaaggatgtctctacgaaagattctggaagtctaaaattttaagaatgaattctgtctactaatcgggaaactacaattagagtgagtacatgttctaagtgttgcccactagttgagaaattacgtaatacagatttcagagtcaaaagaattttgagtattgtatcagctgttactcagtattttggtgtttccttttagacagctgatctctcacgttagaagatactgcataaacagctttattcccaaataaaagtgctgagtgaagccattgctcaattcattgttttgctgaggacttatatgtgtagaattctctcataaattgatttttaattaaattaattataaacatagaagtttctaaagcagaattaacacaatagcccatttcaacaagctgtatatttgagaacagagtgacagttattaacatccagtaggaaattaagagttgttgttcacaaataataaattactagattctgacaaagactaatggggattaagtaagcgtgactcaatataacaaatttaagcctaagcatcttctaggccctgaaatgaacaaggtattgctgccagttaaagtcagttgtgtcttacaacctgctagctgtcttgctgtaaaaactgtaacgtaaggcccttgaaatagatgccgtcatcagccccagcccccaagcattcatctatttaaacacatgacagaagatggtggaagagagttcagcagctattcatgtggtagaagtggttattgtattaggacatactctgttgtaggccagcaacttttgagttaaaacaccgcagctgtttctcttcctttctttacatctttctcttcttttttttttttcttagcaataaactcacttttttttccccacaaacattttgtgtagatccaaggagcaacaaattccaactttctgctgtagcaattacacgctttttgtctgtttgactagattttagtattttactttttttcttctttttaaaggcaacggacagccaagacgtagatccatccaagacttgactgtaactggaacagaacctggtcaggtaagacaacattcaaattttctatctttgaagaatactaggcagaaaacaagaattaactgtattctactctgcaaaattagttttatgagttgacctaaagttgtgatagagaaattcattgcacctgaacttaaatacttaggggggaaaaaaacataggtgccattgttaatttaacttgaaagataatttattaaagtaggtttattaaactccatggaaaagtaaattgttcattagcgctgtatatatgttatatggttttatgtatgttttaataagtattcaattttataatttaacaatttatcattaaagtgtcctttaaagtgaatcattaatatgtctcctttttactaataagggtagtaaacatttccccaataagttgctactcctctagcgccacgtagggcattacatggagaactctaacgtcttttaacttggcatatccactggattaatatttttttcaaatatccttaagataacatttactaagcaaatgtgtaaactctcgaaaggcttctattccagtggttaagatttcattgtttatatttctggatcctcctctaaactctccttgtctctttatcactgctgctttgcagatgatgcagacagtgttataatttaagccattactgattagtgcagagttttaacccaccaggtatataaaagtagctcagtcattgttttttctgtgttactcagattaatacacttgacatatataatttattatatactatattctgtaaaatgaatgaagattaattataaggtgtttgttttcagctgtacaagaataagttttatgagagcagcataaaagtaatgaaattaagtaatgaaattgttacatattaagaagtattaagtattaaattattaagtattaagtaatgaaattattacatcgtgacccatatttttgtaaaattttagcgtttatatattataaacaatctgttgtaatttatgataatatgtattagtacttgtcatcctaaaaaggtattttattattatatcatttgtataatatacttaaaatttgggagatcctttgtagtcattaataaaaaagtcttttatacccatcaaccaacttaccaaaaaccacttcaaatatttaagtggtgaatatccttgatcttcatttatatctggaaatatgtttatttcacaaaatgcttataaacacatatataaataaaatctatatagacacattaatttattatgttttgtgatactagtgactctaaatcttgatttcattatttagtgatagtttttttcagtgcatctgtttttgtaagaccccagaacttttggctgaagtttcccgttttctccccctcagatacttaaaagttttaatcagcccatttagtaacagatagtttgacatctgctatttgctttgattctttggaggtttgatgagctcagccttttaaactctgtttactattgccactgatattccagttatgagaacttctagccaactgtttgactaggaatgagaagcttgtcctaagacatgtcaggagcagctactagtttgaaagcttttctgtagactctagaataaaagtgttgccataattcaggactgatcttcccacaccaagtcttacttatttcttcacaagttccacattatttgagattttcgttgttacccttttaattcacaataccttcaggtagtaaaacgctggaactgaggccaactatgggtgtgggacagtcatttgtggaattgtcatagaccactctgaaagatttggggtgagggagagtttgatatgggtgagggagagtttgatatggcagtaaaacctgttctgaaacaggtgatgtatgaccattgtgtagccacattttaaaactgatccactctttcaaaattatttgtgttatagccttaaaatgcctaatgttcagcttggcatgagagtggcaaatactaatcctaatgtactatgaaaacatttctcccaaaaaatgtatgataagtgaccattaaatcttttaaattactcacaaagatgatattcatttgaggaagaaaagtattcacaatatgtgttttcaaaattggaaggtgccatcctttttgaagtctggctaagcgtgattccatcttgcagaggaaagtaaacttattgtactgtggctcttgactcaaaacataatcttagtaaaaccacttagaatttccatctgtaaactaaaattaaattggttgtttttctgctgccatccatttgagaggaacagtaaatgaagcaagcttcttaattaaaagtaatgatataagtataggtgtaaaagattgcattcttacaacatacaactcactttcaaacatggttttttcattaattcaggaagctttttaaacactcaatagatgtgacttcctagaagctttgaaaagatactgagaaagaaaaaagcagtccctgacatccaggaactggtttgacactgtggcctcactgttgttagtagctagccttattctcaacggctggctgtcacagctagagcatgttactgtcttattggacataatctctcagaacaccaatatcagacaagataatgctgagaccgtgataaaaggagacaaaacaagactacttcggaatgttttctaagcacagacaaaaacaaggtcactgtgccacccacaaaatacctaacattgtcctctcccagctattaagagtgactgctgcttctttaccaattacagcttggtcctcactctggactgccctccctgtggaattgcccttgctttctgacagcggccaatctggaacgaacccctccttcctttgagtttccccaaaatcactcaaccaaagcctaaatcctataatactttctttttctaaaaccctcttactgagacaccccatgctgccccatggtaagcattctccttcactgcaataaatattaaacccaactctttccactattggtgtgttcctggcagtctttggctagagggctttgacaataccaataaagcctattccgcaaggacctcatttggagagatcagacttatgcccaaatcaattagaaaactaaagtaataacagcttccatttgttgtgcactgactttgtgccagataggctcttagtatacattatcagaatgttaatcctgttatcaggatcttagtcctgtgaagttggtactttttcacctaatttgcagccaggtaaagtgaggatgagagaaactgacctaagtctcttacttccttatactgccagtaattcctataaccaggttttgaatccagacctgattgcaaagcacacaaactctatactttaatcattctaacttgcatgtgaaactagatgtgatgcatgctgttatagccctagatctcttacatttaggtattttggcttctaatagtctgcattgtcattaattatttaaacagttgttaagtgatgatgaattgtagctgtatcatatcattgaacaaggttaacctatcttgataataaatttctaccaatgactgcacaaatttatgttttatacacctgggtgagccattctgtgtttcactaaaacaatatacattcttataaatgcctgaataccccttctggaattgtattcagtatagatctatattcaagaattctcttagaggaggctgcagtcagtgaaaattacgactgcaagatgatacagttatgattatttagagaagtgggcatattacatttccatatggactttataatctacttttactagtcaaatatgtgactttgggcaagttccttaatttccctgagcttctgcacccttatctgcaaatagggaccataacacccacctcccagagttcttaacagatgtgaaagtgccagggcacacagtagatactaatccatgttgtatgccagcctctccacagtgtgcctcaccgggctcttgatatcacttccttgctctcatgatagtgagaaataaaaagaaaatagcacttggaaagaagtaaaatccaccagcgttctttctgtatcataaggaaaccttgtgtcaaggatcatggaaagtatttgctttaaaggtctcttatcgcatattgagtgatattaatatacattgttattatttatttaagggatgtgatttattatactacttttttccatcttcattctgcacctccttttgtgtaaacaaatgttctggtaaactctaaatcagaaacttatgtaatagttttgaataattccttcttcatagtatacctttctattggagaatagacacgtttcttcttttttttttttttttccgagacacagtccccgctgtcagccaggctggagtgcagtagtgtgatctccgctcattgcaacctctgcctcctgagttcaagtgattcttccacctcagcctcccgagtagctgggattacaggcatgtgccaccacacctggctaatttttgttttatttttagtggaggcagggtttcaccctgttgcccaggctggtctcgaacttctggcctcaagcgatctgcccgcctcagcctcccaaagtgctaggattacagtcgtgagccactatgcctggcctctgttggagaacagacacctttctattgtagaagaccatgtaagaataataaaattctgaaatttccttatgaaaaactgtagtgaagccaaaatagatcaagcctacagacctttagattagaaagaatattttcagtacaaccttcatgtatagatttaattatctgtaactaccataataagtacccatgtaaatccacattaccaacttatacccattttaaaaatatttatattattgagatgttactttagcaagaatatcatagaagtcatcatttaatctctgtgttttgtgcttgtataattttagctactaagatttctgagggtattaaatagcttttaaatgtcagtctaaataataacactgggtgtaaattcctgacttatgaaaatattttcccagtctttcaggtaagatattaaaagctgagctttatttttgtctgtaaaataacttccaattcctttttataaatatagggataaatttctggtcaaaggccaattctggttcatgtctactgatggtaatctgcccctgaggtttaaatttggcttagtattcttttgctgccttaaattgctgtgtcacgtttctatactcttgtgactttcatatccagttcttttggtaagtcaagtttgcctatatctcttaaactttgcaattaatgtggggatagaataagtaattttaaatgtcttagaggaaggagcaacttaaatgagttttaatagtttgagagcatttgtgaccctcagaattttaccagtgattttaaaaaataagtactgtaaaaacttcttcagtagttggttacaagcagtaacataaattcagccacaaactagtttgagttttttcattgattgtcagatgttatgtgttcctcttatttatgccttgtattattcacatactcaaaaactacagttatgccttgtttttaaatatttccttagtttttttatacaaacatattagcatatttttatttattgagatacacatttcttaaaatataaagatttatttattagttaatggatttaaatctaactgtgctggtctaaaaacagttttgaaacttgcattaaaagtgcaagccttatatttcttagtttcatagctgttggaaattacaagtgggacaaacaagcatgcacagaaggtgctaagagtttcttggaaagtagaaggtgaaaagaaaggtgtagcaaagaatcattttgcaaaagatttaagcttaaggagtactataaaattcctattaggtccaacttatttgttttaatattgcagatgttcagtgacctcttttttaaatatactaaatccattctcattttaaaaacctaattattacttctactgtattttgttgatttctcacaactgatactgattcttacatgtcacaaacatgtgtttctctttttaaaatgtgcattagcattacactgactctgaaaccctggtctgccaccactttgaaggaaaaatgcctttgatttataatagcagttataactatgggcatatttgtgtacttgctttcagtcaaagaaagttaaaaagactcaggaataatttcataatgtctatacttgctttgtcaagggtaaaagtatcctaaaagtaagagtgaaacatttcatcactggttttctttggtgtatgtcgttgttattcttatatactaaaggtaaataagcttaagcaccaatcttgtatctgagtgctaatagcttgtgttctcattttattcaatgagtatctattatgtgtttattatatattcagcaatttcccagatcctgggaagtacaatataaaaagtacgcatggtctctgcccttaagaggttataatacttttgaagaggagtaaaactttgagactactataatttcgggcacaagttgaagtaggaactgactatacagccaaaattcaaagaagaaaaaaatctcgtgtgaagacatttcatgtacatcatttcatttaatttttataaccttatagatagataatactgtccttattttcctattgagtcttagaggttaaataagttacccaaagctgtactagttagaaatggcagagcacagtcaaactctgggctgtcttgtctccaacacccaacttcttactgctactactttttctcattcacacttcatcaatgagaaacctaagtctcagagaggctaagttacttacacaggttcacacagctgtaagtggcagaatggagacataaccccaggtctccaaagtattagactgaaacatgtgaagttgctgagttttcaactacaaaaacaccagttttatctggttcagttttatgcatgccctgtgcactacgccgtattatctttaggtgaatatgaggtcaggattaaaaactgcaagggaaacaggggcatgaggaattttaagaggagagaaaatccagatgggcaaggtaaacctgctgatggagagtcatgaatgccagagtgagaatttcagaattgattcagtaacaatcagtaaacgaacattttgcctgcagtacactgttaggcactccatgtcctcaaacacaaggtctggccttgtacacaaacaaccagagaagtggcaagaatcaccacataatgtagaagaaaacctgagctgggccttacagggtggggaaggattaacaaggagaagaaaagaacagaatgagcaatcttatatggagttaaaaattggttatggtgtagaaaagctttttggaatttctgaagcaatttcagtgggtacccaaaatgaaagtcatatttcatcagtttttcttcaaagttaatttatgatttttttctctgaaattgttaggaaagtacctttcactaaaagtataattagattgtttgtaacacaaaggataaatgcttgagggaatgggtaccccatttttcatgatgtgattattatgcattgcatgcctgtgtcaaaacatctcatgtgccccataaatatgtacctactatgtacacacaaaaattaaaaattatttttaaaaaaacagaaatgagaggaaaacaaagtacctgtcactgtttattatcctgaatccattgtggcttttcaagacctaaaatcatataattttagcactatatggaacacttctcatcacattcttaacccagccccaacccctctccagataaagagaggttgaagtgatctgaagcagacattacagcataattagaactcacatacgatggattctactcaaaggtacttttgtattgcatttcattttacttgttgcagtcttgaatttgagtgtttgtatatatgttgaagctagatataagattcttcatgaatttattttaagttttattttctataactccatgttcttttttaagtctcttctttggtactcagtaacacatcaagaaaaaaaaggtgctttttaaaaagtccttatgaggccgggcgcggtggctcacgcctgtaatcccagcactttgggaggccgaggcgggcggatcacgaggtcaggagatcgagaccattctggctaacacggtgaaaccccgtctctactaaaaatacaaaaaattagccgggcgtggtagcgggcgcctgtagtcccagctactcgggaggctgaggcaggagaatggcgtgaacccgggaggcggagcttgcagtgagccgagatcgcgccactgcactccagcctgggcgacagagcgagactccgtctcaaaaaaaaaaaaaaaaaaaaaaaaaaaaaagtccttatgaaacccattttagtttctgtgtcctttgaaaggctttaatatatgaaatataaatatgtagacaagaatgtatataatgtataagttatgaaaataaaatgagcacttgtgaacccaccacccagcttaaggaatggaacattagcaatcccagtgggggttggtccctgtgtgttcctcgcctgtggccttccctgtcatttccccaccaaccctcagtgccatgttctgtcatatgtcatgtttccagatatcataaataccttttatctgattaagaagtcctcttcccactgggcacaggggctcacacctataatcccagcacgttaggaggctgaggcaggaggatcgcttgagcccaggagttcaagaccagcctgcacaacacgggcgagaccccgtctctacacaaattttttttaaaattagccatgcatggtgccgtgagcatgtggttccagctactgaggaggctgaggtgggaggattacttgagcccaggaggtcaaagctgcagtgagctgtgttggtgccattgcacaccagcctgggcaagagaacaagaccctgtctcaaaaaaaaaagaaagaaagaaaaagaaattctcttctcatacatggaatttaagtttgttaaatgtcttttttataagtagatgttaaatgttgtcaaatgctttttctgcatctgttgaggttttgtcctttaatctgttgatgtgattaattttattaatggaatttcctaatgtcagatgagtgacctttgcagtcatttgcaaagttggataaactaaactttttaaatggtttttattgcttctacactgccacattatatttgctaatataatttttagaaattttgacttttgtgtctttttatttttattttatttttttggaagtgaggttcagttgtaactttctttctcacactgtccttacatattgatttttactgccttcacagaatgggtcagaaagtttcttctttctttgtttaggataatttaagattggaaaaatccttatcttgaatgtttgatagaacttacctgtaaaaccctcctctgtgcttggtattttctataatgtataggaatttttgaaacttttttttaaagaatgtgttcatttttatagtattgtctccgatttcaaaatactatcttttactatttttcattttgggaggcaaattcttttttttaactaagttagatctctagcttataaattgtcagtgtttctggttttttcatatatatatttagaattaaatattttcctttaaatgctcttatagtcacatccccaagtattagcatgattcacgttaaaagtcagttcaagtactttctaatgtcccttttgttttcttctttgaccaatgagttatttagaagtgtttttcaaaacaaaagatttttaaaggttttgaaatcagtataaaaagtaattaagttatgatactgaaattttttttaactttgagatttgctttatagcttagtacataatcagttttcattagtgtcccatgaatgcttaaaaagaatgtgtattcttcatttgctaggcgtaaagtcacttatgtttagattaagcttgttttttatggagttcaagttttactgtgtgtgttttgttttgtttttttggtctccttttatataatttacagaagaatattaaaatatattactgtggggctgggcacagttgctcacacctgtaatcccagcactttgggaggccaaggtgggaggatttcttgaagccattaggtcagcctgggcaacataacaagatcccatctctacaaaaagtttaaaaattagccaagtgcaatatcatgtaactgtagtcccagctactcaggaggctactcaaggaggatcacttgagcccaggagtttgacgatacctccttgagcttttttactttatgtgtttatatgtacagcatataaattttgaattgttggccaggcacagtggcttatacctgcaatcccagtgctttgggaaactgtggagggaggatcacttgaggccaagaggtagagaccagcctgggaacgtagcaagaccctggctctacaaaatattttaaaattaactgggcatagttgtgtgtgcctgtagtcccagttactcgggaggctgagatggaaggatcgcttgagcccaggagtttgagggtacagtgagccatgatggtaccactgcactccagcctgggcaacagagcaagaccctgtctttaaaaacaaatctcactgtgatggtggatatgtcctttttccttgcagttttttgatttatctatttgtatgtacagcatataaattttgaatcgttggccaggcacagtggctcatgcctgtaatcccagcacttagggagactgaggcaagagggtcacttggggccaggagattgagagaagcctggtcaacatagtaagacccatttctacaaaaaaaaattagtttttaaaaaataaattttgaattgttgtattctgaattgaaccacttatcatattatctctttctctagtaattttttggaccctaaaatacattctctctgatattaatataggtaccttatttggggtagtttttgcctggttttctttttttatcctttaactttctgttttctctgtctctgtaaattagatatgtctcttataaatagcatttaattcatcctgacaatctgatttttttttaaatatcttaactggagagtaattcatttacatttattgtggttactgataagtttgctctcttatgttttatttctctttcttttctttcaagttttgagttgaataaatttattcttcattttattattttctttctggtttgggagttatatattaattactacttttagtaaatacctttgaaattttaacattcatgcccaacctagtaaagatctgtaccctcatcctgaacaatatttaaaacaaggagttttaagtcagtgcttttcatgcttgtgctattgttattataattttagtgccatcttgtttgtttgataattctataaattcactgtttctgtcactgaatgttttcagtgtgtagatttatttccctgtttatcactattccttattgcatcttgatccttctatcaagtaaaatttttcttcttccaaaaatacatgcttgaaaaacttatgtggtaagaatgtatggaaggtaaactcagtttttgcccatctaagaatgttattttggcctctatcttcaaattttgttggctagacaattctagactggcagttatttttcagcactttgaagatattgttctgctttcttctggctgctttttctgtctcctgttgattgtttcctagaatttgaatgtatacgttccatgttgaactcaatttgtgagcttcctcctatttcttatgctggggatttgttgtggttggaatttgttgtaacctgcatccaatctggaaattttttgtggattcacagttaatacatttctcccttccacccagagccactaacccaagagagacaaatttgtttcctgtctgcttttgtaggtcagattttttttttcctagttgagtgaccttttctctgagagtgaagcctttgctgagttttagctttaagcagaggtttctccagtcttacttccatcctacaaaggcccaaggctttatggtccattcctctgagtgcagcagcctgtgaaaacagtagctctaggccattggtgtttagttgaaattccgagggctgtcagcttaagcacttactagtttcctgatattgttttgtttctaatctcagagtatttcttagtttcttgcaagctcatcagtttttaataggtatcatgcgtgagtgaatataaatttttacatatatataagagaggatttattttgttgtttacaagagttttggggggatctctaagtctcttcttgccttttaatggaaacgttctcgtcattttttttaatcaaaaaatcacattttgtttctcctgtgacttcttcctgtaggtgagcagtaggtcatccagtcccagtgtcagaatgattactacctcaggaccaacctcagaaaagccaactcgaagtcatccatggacccctgatgattccacaggtgaccagtctgtttcttcatacttatgaagttgaatcagtcatgtttatattcatttggccatgtcattactctaatgtttacaaaggcaggcattatactgttgtttagatttttatattaaataaactatttagtaatacatgttaaaataccattttgaatacagagacagagactgccttgccttctgtattttttttaatccagatactaaacatgtattttaaagattgtctgtttggggtttttttccagttgcgaagcgtattgaattcttgatacttcagcctgtgattttcctactagattcatcctactagatgatagtagtaaagtcattttttcagtaaccaaaatcggagaatggtaaaaatcatccccatcatcttcatctcaatcttttaaggacacgagatgtcatgtaccttaagttgaaaaaaattctgaccattgaccttttgaattgtttttaactgataagagacaccattttcagttatacaaatattctattagacctttagaaacctgtgatgagttattaaagctccccaacatgaataactaactgttcacaatattagtattaatgtctacctgcctaaaggtagtgacggcatcgtttcattatgggcaaacaggaaatgatgtgccatagtagaattaacttttccctaactttaagagaataccttgataaatgcttttaagtgtacttatgaaattttttatttatattatattaagtcacgaagggaaagatgatctcttagcccttggaaaattaaagcatttgatattttatataagatcgactatgttattaatagtaacaattagattgaagtttaaaagccagctttctgtctttacaaactaaaatacaactcaagtatttatagttatctgatgtggtttggtcaagtttataatttaatttaaaaaattaactgggtggtttttctgtgtgtcatgtaagatagaactatgtttagccagggtgtactctctagttttagtaagtttaaatttagtggcggcaaaaactcctgtttcacccctagcacagcccaacctaggactgtccagagcattcaccactacgcagcacatgtgtagaattcattatagacttgctcctccccagtggtagacagggcaatgctcttgcccagttttatcattaacattcaggtgatagcagctctttttgatttctgaaccccctggcaagggagtacgttctctgacattacagcatttgcccgggtctggtactcaactcagcagagccttctgtcttcagtctacactaatctgtatatgccagtcaatagtgtggcagattgtgacttcatgggggtaaaataaaaaatgtttaaggctctctctcacataactgctacatttctgcctcatatgttgcttctaccttccaactcccgtcccattgttttctttttctgtacctagaaacaccacaaaataccaattgctagaaataatttgcaatatcagctgaattttgtctttgccttgaaatatattgcacatgtgtggctataattttgaatacattttaaaaatggatgctctggtttaagtttataattaattcagctgtgcagtatttgtaagaaaaatattgataaccaagctaatagaataaattagggaacagataggtaaagtctttttctttgaaggcccactgaccaaggaaaaaattaagagtgtaaatgtaagttaaagtgacctaattaaatttttttaatttgagaggtttttgtatattttcagagaaagctaaagagcataacaatttaataatcatagccgataataagcgctcttcagttcctatttataatataatgggtattcaaaaagacacacatactgagaggatctagtgagagagagatctagacgcagtagagggagccgcagagggggaaactcactaaagaattttcacctttgcttagtactttgcaaacatgtattaatataaagtgtaagacatggcccattccttgcagtctggttagagtcataatactgacacattaaaagtaaacttatactatataataacttactaaatttatagtacaagctgagtgttttgatagttgtaagagaaatcagttcaacaagacttggcatagtctctggccttttcataaaatgatgagacttttctttagccataaagcagaaaggagaaggcagcattccactgaagggaatgcatactcaaagaatatgagatagtaacaagtgttgtgtttgaggggtcagaaaagagagtttgccttaatttaaccaaaccaacatgagctttgacattcaggagaagcaattagatttgattagcaattgaaacacacacacacacacacacacacacacacgcaaaaaactttcattaaataatcttccgatctgtgaccaattattgctagtagagattggaagttcaatatcaatttagtgtaaagtgagaaagtgaaatcccacttctttttttagagagaagatgaaattcaatgaaggaccttaagttccccaccatacaagggctttaattatttgaataacacaatccttggactttttttctgctcccagaataccacgcaacactgatgtattaagcttaattctaaaatacatatcagatacagggtgctgatataatgagatatataatgtatcagtgatttaagaaagaataataggaatggaaatcttaaattgaaactttttcaagacacttaaatttttctagtaaatcaggaggaaatcagtcatttttaatcagttttagttttgtggaaagcagtgtttatgtgggagcgtagtttgaaaccactgttggggtgggagaagagttggtcagagaaataacaaattaagtatatttcttgtttagccacttcagaaaaacacacatttatgttagtactgtatatgagccttaagggtaagggtaagtgccttaagtctctactgtttttctgtattgccctgcaatatttaataaacattactttttcaatatggaattcatactatactattttaaattgttctttctaattctccatttagtatgaataataatgataactaccgtcatgtattgagtgcttaatatacgccaggatttgcatggtgttcctcacatgcactggctcatttggtctgatttcgctaattagcttttggagtttcttgagagcacgttctcagtggctttaaaaaaacaaaaacaaaagcaaaaagaaaaaaaaacacctggattatcagttgacaataaattagaagattactgagccagcaacccttcttgagtttttttggattgcatacagtgcgtctgctgtcttcctgacttgcctttatccacaccactccttcaaggagttattcgtcagaaaaaggctgaagagctcactcatttagctctttttttgtctactaacagtgggaaagcaactacttctgaagtagaaaagtctgtattgcttcagagttactctgtttacttctggaactgttctacataaccataaatgttgagaagagactgtcccacgcatctcagtcaagttgtatggcagttttacctcttttgaaatataaacaaaagcattctattcaaataattttataaaattgactgattgtttgaattaatcaacttaactgttttcggcatgacattgagccacaggtttcaacctcattttggttccttactgttcgtatttgtaatatactctcatcaccaacatctcgttttctgcagtgattcttactgggaagggcaggatgagtggtggaggtcacattataatctatataaattgaaaatgatccactggaagagaatgtgtctctgctttctccctttccctgttaaggaacattgatattagcggagttgatatagccttctataaaataaacttagcatgataaagaaaagagatggggagtttgattagatagggtcaattaagactgaatttaaaatataaaggtctcatcactgtttttgtttttaattaagagcttagaagctctaatatattgtgttctattcagtttatagccaacttaaattataggtatgagaatataattgcattctaatatctgataattgaatatcctttttttaacctttagaattcagaaatagactcttcaattaccaatagctgtaacttttaatttacatattatttactttagggaaaaaaagcatttcattcatgctttcttgctgttcgtttataattatttgtgacagaaaatcaataaaatacatgcttgaattccagataccaatggatcagataactccatcccaatggcttatcttacactggatcaccaactacaggtaaaggagtactttcttattgaaagttgacttttttcttcttagagagtttaagttgacaattgtgttgctacctgtcattgtatagtcactccttaatttatccttttagttggcctccttaaactttttagaatcaaatcaaaataattcttttggttaagttaatcaaactttaaattggcagaatcatattcttatcttttcagtcatcttaaaatcctccagtatctttctttagtactgctaagcattacattttcactctttaattttagtgcattaaaacaaaactcataagcttatttctatttaatacatttgtgatacattctcatgttcatagtgactgaaaatgtaaataatatacttcagtgccccctcatgagtatgagggctataaacatcatttagtttgagcctgtttgcagcctgaaatgtcataccagagactacaactccaacaatcatgattctctgtaacagactgttaaaacagcaagaatagatttaaatgctgagttaattctgacaaaaggacactgagattttctagggcatggtttaacacttatttttaaaagatcattgctttagtgctataaaaatatatcacagtctctgtcttgactctcatcttagctagatattgaaatttgatttaattatgttttaacattcctgattattttcagcctctagcaccgtgcccaaactccaaagaatctatggcagtgtttgaacagcattgtaaaatggcacaagaatatatgaaagttcaaacagaaattgcattgttattacagagaaagtaagttattttttatgaataaaaataaaaatacattagtattttgagtttaaaatatgataaggtgcaatgaaaacgtagtttttagaattagtcattaagtatactttcaacttgtttaagctttaagcacccttttactaaaaattttttatgcaaaactcaatccttttgactatcatattagtgctatggaaaataaactggtgctttatacttgttgttttatgttctcagagctgtttagacttattattataaagatttattgttttcttgtaaatagataaaataatttgatttattaacattcagttgtgccttatcttagaaacatttttgtagatacattttttccaggtgtatgtttagaattggattacttattaaaagactgtatttcataactgagtgtttttctgaggagttatagaaactgccttcctccctttttaaagaaacacagcctaatttccttactactgcattcacagttcttaaatatgtatgtatcttcagttttcttaagcatgacctccatgaaattttatacttaggtaactgaattgttggtggtaactaaaatgaagtgataaggaaaaaattttggcaactttatatatgtatgataataggattcccttcattaattttaatctaaataaatgaaagttgtttttttctgaatttgcgaaaagctttctgtatgtacttcaaaaaaaagagagaaaaaattgttttatcataatttattgatacagtgatttaaatggaaccaacctggtatttgaaaggtaagcctaaataggaaattaaatactacagtttggaaatcgtagaagtaattatcaaactgctggcacttttatgttgaaaaagcttgatttcttatttcacttatttaacctatacttttgccatactttaatcatttgaaagaagtattctatgctggaaaaaacaaatggtggattagggtgttggctgtgaaaactatgacagttttaatcaattttaaatactttcagaagtagtattagttagttattttgcttgaggactttttattaattattcatttatatccagtaacctcactttaggaaatgcctaaagatgcatctttttcgggaatacttaatagttcccaaataagagggacttaaataagtttatcagactataaaagaatgagggtctttcctgaaagtgcttgcaaatgtaagtgttttaaaagaagtggtactttgtcatttttctcactgctttaaaatgggaaaaagctttaaattggatagcatttattttaattagattgcaaatttgctattagcttaccactctctgctatagttaagtaggattgtgacttcagaatgtgaatcagtataaaagtagaatgtgaaggataaaaacttcatgatattttcccatagccacatagaacccttcccagccttttttcatccttcctacacaaaaagaggatagaaaatgaaattttctgaaacttttattttaccattttatctgcttcgctaattatccaagtacagttacttaataaaaggattatgttatttgtatgattacactagaagtagatgagagttccatcccagcccataattatatttgattagtgtacctaagatgcaaaatgataaaccaagaataaaaattctcattaattgagcttccatcatcagctactaaggtatgaatttttccatcatgtgtaatattatgtggtatttgtttgtaggcaagaactagttgcagaactggaccaggatgaaaaggaccagcaaaatacatctcgcctggtacaggaacataaaaagcttttagatgaaaacaaaagcctttctacttactaccagcaatgcaaaaaacaactagaggtcatcagaagtcagcagcagaaacgacaaggcacttcatgattctctgggaccgttacattttgaaatatgcaaagaaagactttttttttaaggaaaggaaaaccttataatgacgattcatgagtgttagctttttggcgtgttctgaatgccaactgcctatatttgctgcatttttttcattgtttattttccttttctcatggtggacatacaattttactgtttcattgcataacatggtagcatctgtgacttgaatgagcagcactttgcaacttcaaaacagatgcagtgaactgtggctgtatatgcatgctcattgtgtgaaggctagcctaacagaacaggaggtatcaaactagctgctatgtgcaaacagcgtccattttttcatattagaggtggaacctcaagaatgactttattcttgtatctcatctcaaaatattaataatttttttcccaaaagatggtatataccaagttaaagacagggtattataaatttagagtgattggtggtatattacggaaatacggaacctttagggatagttccgtgtaagggctttgatgccagcatccttggatcagtactgaactcagttccatccgtaaaatatgtaaaggtaagtggcagctgctctatttaatgaaagcagttttaccggattttgttagactaaaatttgattgtgatacattgaacaaaatggaactcatttttttttaaggagtaaagatttttaattctgtgattgtgtgtatgtgtgttgaaactgtaaagcttttatgactctaatattaatctcttaaatgaaattaaaaggcaaaagaacatgattgagcttaaatgatcatttcttcctgcagtgattcttggattgttttctcatgtatttgaaaaaaaaaaaatgaagaaaaataatggaaaatggaagtaattactccagctaaaaaaagcttggacttagatttctttttatgataccaaatgagaaataaaccaggcaaatcagaaggaagttaaagaagcaaatataaattcaacaagtgtcctaattatcctggatattggaatatttgattttccttacaatcccgttctagaatgcctgccgcctttcaacactttcaagagaatttcaacacttacagagtatttatattgttaacagtaattttgctaccaaaaccttcagaataactttaataataaaatgacactgaaataatagactatacaaactctatattttttcagttggtgttaaaataagtcacattttgataccagtacaagatgtcttttaaataaggatgtcatcagtctgatttttatagcattaatgttttatgaagaaaaagttcaaaatgaaagcattaattgctgtgattattagaattctatcatgactgtattgtagtttttgctctatttcagataagcaagatctaagaagttatcaaaactattctttaaaatgctaaagcaggtaactttttcttccattattttttcctcctaccactgagttttgtaatgaattccttgtgtatacaagcaatacaggtgaatactaaactgttatttttagcttcttcaaaagctattttagaaagcttcctggaaataaatgtcttctgtcatttaatttaaataaaaggagtgttaattgttcccaaatttgattacctagctgaaacagatattggattcagcatagtaatagtaaaataaaattggcagagaaaataactgtagactaggataaagcatgactcctccatagcattgttgcttgtatgtacatctgtcactccactgaaagggacctagtcactttaaagaggccttttatctcagcacgagatatccaagcgtgaatgctaaggcttgatgtttccattaggatttagcattcgagatttcagattttatttatagtcattgatgtgttttgctgtattataacacatttaagggaaattttattatggtttttacatgtagtcatttcataaaaatatccagataggtaaatggaagaaaatagtagattttagtcatggtaccaaatgcaagaggctgttgaacagttgcttgtttgtttacagtaagttccttgagattttcagtactgtagttgccctggacattgagtacagttcagccttactctgtttttaagtagttgtgttgtcaatttcatgcttttaagtcctgatgatccttggagatgggagaaaaagataccagggataattaaaatccacagccagtttcatcagtttcctcatccatcctgcaaataaaaatgttaacaaggagccaaacttattcgttctggttttacaatttattttgaccgttttttgggtgaaaattgcaaacagccaagcaagtggctggaatgccccagtctaagaaattcaaaaacaatcactgagtaagccctaattacattaattacattttactcttgactccaggaaaagaaagcaagcttttatctaatctagagggaagtattcgtgagcaataaaaatcacttttttgagttgaataataatcagttaagaatatttaccgcatagcaacacaacatataaagatttgttacaagttgtttacggatgtttgactatttttgctgaagtattttagagtattgaatgtcttctctcttcaagtttctttcatgttcctaatttcagctcctgtagccagagatcacaggtcttccctgtgaaactttggtttctttctataaatgtgtgtggttttcagcgctcaactcctgtcttcaaatggtagtaagttctacttctacttctgtcattcagaacattttatgtcaaatgatgtaatgcagaaattcttgtgcatatttgtaactgaaggaagctttttagatttatttttgtttttaataaaattcagattcctattctaaactggta

SEQ ID NO: 1214 - DNA, 16716 bp, Homo sapiens
cttggtatccccaccttcctgggctcacctctgccccactcaggtgtttaagacgtgcagcagagaggcgccatcctgacctggtgccacatcctagcccctttccttactggatcctcaaaccagaagaaaacctgaatctctgaggtcagttactctcttttgcctgcgtctagcctaaaatctggcttccaggaccccaccccaacttcagaatcaaggtaccttgcactggtgccactgatcccaaaggtccaaaactcctgcagcactcacaggcaagcgaccccgttccttaggctctcatggggtctcagggccagagtagggggtgggggagggaaaaggctggggaaaatatcagataccccagggcaggatggactgagggagacatggttggatcagtagacatgtccttatgatgtgggcaaggccatttcctttgaggagcaattctgtcaactctaggccaccgcatagcctcgcagccaagagcagggactctagaatcaggctgtacttgctttcacccagctctgcccttaccagctgtgttaccttgggcaaattacttagcctctctgtacctcgggttcctcatctctaaaatgaggataatcatattactgactcacaggcctcttaccaggattaagtgagttatataaaacacttaatgacgggcacatggcaaacacaagtgtgtattaaatgactcttttacatctaatgggctgactcctccattcattctccacacatttgctgttatattgccatgtgccagaaatgaaaaagacagattgcctgactgaaataatggcaggtgttgttgtgtgatgatggcaccccaccctcatctcagaatgatcttccaggctgtgcctgaggctgcaggactgcccgggagggcttggggcacagagtttgggggctgcagactccctagtgtgggcccccggcttgctgtaagcccctagcaaatttctttccttgttcaatagaccttctttttgacaaagtgaagcaggtggtccccgccccttccacagccccatgcctgggcaagagaggggttggacaagtcaggctgggcatccagagcccttgcagccatctcctccccccacctgcccaccttgctcctcagaggcctttgtggtttgagcaaagaatctccatcaggctgcacaggccaccagacaggtggcaagggccccaattagtcattgtcctcatagagccttaggaagtccacagaaactgtgttcaaaactgcacatttgggccaggtgcggtggctcacttctgtaatccaaacactttgggaggctgaggtgggcggaccacctgaggtcaggagttgaagaccagcctggccaacatggtgaaaccccgtctctactaaaaatacaaaaattagctaggagtggtggtgtgcacctgtagtcccagctactcaggaggctgaggcaagagaattgcttgaacctgggaggcggaggttgcagtgagctgagatggcgccactgcactccagcctaggcaatagagtgagactccatgtcaaaaacaaacaaaaatcctgcacatttgaacctgcgtggatatttggtattatagaattagtgctattaattttaggtttaagaatgtattgtgggccaggcgcggtggctcacgcctgtaatcccaacactttcggaggccgaggcgggtggttcacgaggtcaggagttcaagaccagcctggccaagatggtgaaaccccatctctattaaaaatacaaaaattagccgggtttggtggcaggcacctacaatcctagctaatcgggaggcggaggcagagaattgcttgaacccgggaggcggaggttgcagtgagccgagatggcaactgcactccgacagagtctcaaaaaatatatatatatagtattgtggatacgtacttttaaaaatccttacgttttagagatacaaaaatatttatgaataaaatgatatgacgcctgggttttgcttcaaaacgatggtgggagaggaatgtggatgaaataaaattgattatgagttgtggttgctggggaattggggtcacgggggttcattagaacctcctatcagatgtggttcagaagcctcagacctgggagctggctagaaatgcagaatctcggctccaccccaaacctactgagtcaggatctgtattttaatcaaataaaatgcccaggggattcctgagcacactgaagtgtgagaagcgctggcttactctgttcaattctttcctgcatgtttgacattttccataatgaagaggttgtggggttttgttctgctttcctgtgtgttcacagtcacagggagctcttcctacggagaccggggctggagggaactgggaagcactgcctccccgctcctgcttggacccaccagccccgccgctggcccgcgctcggctgggaggcaccggggtcccgctgggcagccccgaccccgtgcctgggccgcacctgccgcagtggctccgtcgggccgggcggaagcgcgggagcgcagggctggacaggcccgggcgtggcggccccggcgcacctgggcgagccggcaggtgggagcgtagcagcccggggcccccgccctcgcgcgggggaggagcgggcggcgcggggcgggcgcagcgggggtcggggcgctgggagcccgttgggccgcgaacgcagccgccacgctggggccgccgagatcgggtgcccgggatgagcctcatccggaaaaagggcttctacaagcaggacgtcaacaagacagcctgggagctgcccaagacctacgtgtccccgacgcacgtcggcagcggggcctatggctccgtgtggtgagacccctgggccgctggggggcggggggcgggcgccaggctctcccctttccgcccagcccgccctgggctggcccctcgccagcgccaccttgaccgcggacctcaaggcccagcgccctccccggggccacccagcggccatctcccttttctcaccgagtggctgagtgaggtctctgggggttgagttgggactgggcctggttctccaggactgtacacttgcaagaccccagagttcatcgggcagatcctcactgttacagacgagtacaccgaggccccaagagggggaggtggctcgccaagttgcagacagagtgagactcccgccctgccgtggatcccgtcgcaatgagacgttgctgcccctggcgctgtgcccctctctcagctcctgcctggcttcctactccctgccctgcgtcccgcggctcccccatattctaggtggtgggcctagtcccctctcagcccagctgcccagtgggaggggtcagggcggtctgggagatacggcccaggaggagagcctcgcctgctgaccggcctgtgcccgacagctcggccatcgacaagcggtcaggggagaaggtggccatcaagaagctgagccgaccctttcagtccgagatcttcgccaagcgcgcctaccgggagctgctgctgctgaagcacatgcagcatgagaacgtaggtggtggctgccccggggagggggtgggggctgccctggggagtcaggggcaggcgcaggcggggcctcccggtatggagagctcgggacagtctcctccctgctcccctgacggtgcctctcgcctcactattgaaaggagggggtgccgagaccttccctgcccactttccaggaagaggtcaaagggtatttttggcagaatgcactttgtgaggtacagactgtgttatcctacagaggaaattggcacaggggaactttgtaattggttccatgtctgagagcttgtggccagctgggactagaatcctagttagcgttgtgtccacgtgaccctgataacaatagcaatatacacatattgagcacttcctatgttctaagagctctgcatacactaacttgtctagtcctcatgatatatgagtactactgcccccatgtcacagacaggaaactaaagcacagcaaggctcacagattagatggttagtcagtagcagagctggggtttcaatctcggcagcgaggctcccggtctgagcacatgaccatcagattgtcttgtctgatagaagcagctgggaaaaccaggggcccagctcagggcctggcagccaggctttgctgcaggatacctagattggagggcagacatttcaaagaatgatttcaaaatgttatgtacattttaagcccatccttctccagcaaacccctcccctatggcctccagccagggtgatcttgcccttggctctgaaccagccctgtggcaggcaaggatggatgtggctggagacccaaggtcaggggcagggagtttgctggctgaaaagctccttctctgttccctcctttttcccttccaccctccccttatgctttcctgctgcctaggtgagttgagagtgggtttgtgttgcttgccctgacaccagacttgacagcaatgagcacacatcattctccccaccttcccttctccccagcctgactctctgtcatgatttattgcaaactccctccaaatccaggggattcctctaggcctctgccctttttactgcttccaagaaggttggagacatgcctcctgctggaggtggtgtattaggaaagggtggatggccctgtgcatggccagggcccaggaggaggtgggaggagaaggtagcgtctgtctagccctcacaggtgacttcttccccaggtcattgggctcctggatgtcttcaccccagcctcctccctgcgcaacttctatgacttgtgagttgggctgcactgggttctggggcatttgcaggccttacatgccgctggggagcaaggtgggggagggtctagggtttctattccgggtgtggcggggagagcctccttccctggcagtcctgtgcctttgcctgtcaagtgtgattctctctggaaagatgcttttagccaaaggcaggcaggaagaggcaggaaggactttgtggggtgcttgcctggcagggggcagtctgcacagctgctttgctttttacccagctttaacaccatgaagacacatctgccagtcctcacagggttagcaccaactcacctttcctggggacacagatgtgagtctggaccttggagctctttctagcatgaagcaaggattaagaagccttggctgcctctggctgatgggggtgtttgacagaatggcagaaaaccagaatatttagctgcaaaatgtatagctttgcctgtgcagtgtctgaatgagactggactatttggacaagatggagaagtcagtgtggcacgtggaggccagcagctggcttggtcaagctgaatctggactgaccctacaggcagcctcaagacctggggactttgagccgggaggtgatatgttcagatgggatttgggggatgcacactggcagcagcaagaaaggagtaggaagcagctcggaggcagagggggagagcctggaggtcagtgttagtgatctaaagtagggatctaaagcagaggtgatgggatgccaagagcagacttgaggccccatttgggaggcagggccgacacaatgttccatctgttggggtgcagtagctgagtgaggtggcagaggtggaggaatgggcaggttcctgcttgaaatacacggtagaggaagaacagatcttgggggaaagataacgaactccattttggacactttacttttaaagaaactgtgaacattccaatgtttaatcacagttgcaaataaatatgaacctcaggagacgaaggtctgggctagggatgtggatttgtgctggaataatcaccgatgggttatagctgacacccgggaacagataattgtagaatgtggtaagatagtattgattcagatatcaacatgaaagagaagatccaagaggatgagcagatggaagaagctgagagggcctgataggaggcagaggagagtcagcaaagaattgagagggagtttcagacttggtgaaaggttagatcagaagaaaagggagtcatggtgtgtttgtcgggtgttcactggtgaccttgagctgagcagtctggcagtaggagggaagcagaaaccaggttaactcaggactgggaggtaaggcagtgggatccaggagtgtggaccgccctttctagaagtttggtggtgagagagggagaaggggtggtcagttgaagaagcaaagtcaagggaatgtggttctagcacagagaggcttcaggaagcatgttgccaagatgaaagaaccagtgcccgagtggaggggaaagacacaggaggggactgggcatggagaggcccccaagggaggtgtgtggtccggcaggagagggctgccaaaatccagagtctcctggagatgcctccagcatgtcctttcaaaaacaacaacaacaacaacaacaaaaaacacaacctattacataattgtttaaggtaacattcattttaaaaaagttttaaatttattatattctagagatagggctgggttgcccagactggagtgcagtggcacaaacacagttcactgcagcctccaactcctaggctcaagccatcctcccgcctcagccccccaagtaggtgggactacagatgcatgccaccatgtccagctttttgttttgttttaatttttatagatatggggtctcactatgttactcatcctgatctcgaattcccggcctcaagtgatcctcccacctcagcctcttgagtagctaagactaaaggtgcatgccaccacacctggctaatttttttttttttttctgaaaggtggggtccaggccgggcatggtggctcacgcctgtaatcccagcactttgggaagccgaggcaggcagatcacctgaggtcaggagttcgagaccagcctggccaacatggcaaaaccccgtctctactaagaatacaaaaattagctgggcgttctggcgtgcacctgtagttgtagctactcagggaagctgaggcaggaaaatcgcttgaacctgggaggtggaggttgcagtgagccaagatcacgccactgcactctagcctgggcgacagagcaagactccatctcaaagaaaaaaagaaaggaagaaagaaagatgggtccctatgttgctcaggctggtcttaaactcttcgcctcaagcgatcgtccagcctccatctcccaaagcactgggattggaggtatgcccctggcctattttataatttttattattttttgtctttgtcctggtctttgcttttactgtaacagttacattttgctggccttatcctgttgtgcaatcccctaagaggctgcaggagcctccccatctccctcttccaccctcctggaaactgttgtattgtttccttcttggaaaggtagacatattgtttgtttgtggagccatctcagctgggcatgaccctctgagggatcaaatatttggacagaagccgaaggaaatactggcagatgtttctaactcctagctgtggctttccctggggtgtggaggagggcaaggagagagtacctttgaagagcgggaacacagttccatgtggctttcctgagcgcgctccaactgcagcgcttactccgagctctgccagctgggcggcccgccacagggagactgggagccaggagcccagaggcccgtgtggtgatctggctggctgaggtggagttgagtttttgcacactggagggtgtctctatgacccctgttctgccctgaggtccctcctctgagctctgacctggggctgggtgggacccggcactgttccaagaacccctcatgccttccagctacctggtgatgcccttcatgcagacggatctgcagaagatcatggggatggagttcagtgaggagaagatccagtacctggtgtatcagatgctcaaaggccttaaggtgggtggggacttggaggctggcagaggggacgccttgctgtctagacctgaggtttggggaggctggagggagcgcactgttacaggtcggccagcctgaagtgcctggtgtggaagctgggccatggactcacccttctctctctcccacatagtacatccactctgctggggtcgtgcacagggtgagtgctttctctgccatggtcctcagaggcccctgtcccatccctgggtatggggttctctggcaatcaaggagtgggaaagttggagggaggggacactgcccaggagcacagaatgtggagttttcacacccagccacggcccaggaaggcctgctcaaaagagtcactgtgtcccaggggacttcatggggaattgctgcagacaaagtgagccctgagctgagtgtttcaggcttcaagaatcaggaacattttagagctgggtgggccctgagagaacacctagtccaaccctcattttacacatgaagaaactgaggcccagaaggggaaggggcctggctgaggtcacacccctgggtggtggtggagctaggacaagctccatctctgcctcagcctagcatgcattctctgtcctccccccaggacctgaagccaggcaacctggctgtgaatgaggactgtgaactgaaggtgagtgggctgcaggctcagcccagaggcgggataggccctcccccagggaagcccctggaagccgctcccagagcctcctcccctcagcaagttccttttctatttatcccctgtgccatagattctggattttgggctggcgcgacatgcagacgccgagatgactggctacgtggtgacccgctggtaccgagcccccgaggtgatcctcagctggatgcactacaaccagacaggtcagtggtcaatgcctgagagggcggtcctggggccatctggtcactcggtgctgactgactgctgggccccagacagtccaggtgacactctccctccctctgcagtggacatctggtctgtgggctgtatcatggcagagatgctgacagggaaaactctgttcaaggggaaagattgtatcctttgctggaaaagccaaactccatctagggattccttccttcaacagacactttatttaaataactgtcttttttttcttaatgtgagagtgatacatactccctgtagaataatttgtaaatgcagataaggctggacgcagtggttcatgcctgtaatcccagcactttgggaggctgaggtggaaggatcctttgagcccaggagtttgagaccagatgtggcaacatagggagaccccatctctaaaaaagttttttaaattagccagacatgggcctggcgcagtggctcatgtctgtaatcccagcactctgggaggctgaggcgggcagatcatgaggtcaggagatcgagaccatcctggctaacaaggggaaaccccgtatctactaaaaatacaaaaaattagccaggcgtggtggcaggcgcctgtagtcccagctactcaggaggctgaggcaggagaatggcgtgaacccaggaggtggagcttgcagtgagctgagatcgcgccactgcactccagcctgggtgacagagcaagactctgtctcaaaaaaaagaaaaagaaaaatcccagctacttgagaggctgaggtgggagggttgagcctgggaggttgaggctgcagtgagctatgattgtgccactgtactccagcctgggtgacagagggagaccctaactcaaaaaaaaaaaaaaaaaaaacaaaatgttgggtgggcatggtggctcacacctataatcccagcactttgggaggccatggcaggcggatcacctgagattaggagttcgagaccagcctggccaacgtggtcaaaccccatctctaccaaaaaatacaaaaattagccgggtgtggttcacgcctgtaatcccagctactcgggaggctgaggcaggaaaatcgcttgaacccaggaggtggaggttgcagtgagccaagactgtgccactgcactccagcctgagtgacagagtgagaccctgtctcaaaaaaaaaaaaaaaaaaaaaatgtagataagcaaaatgatgaaaaattctaccactacgtggaaaatacattttggcacggcacacattaactgagtacctgtgtgtgcagggcaggcctttggtgagaagacgaggaaacagaaaagagtcactgggatgaaggctgagaagtccacatccatttgttgggtagggacccccctcagcctggcacgttggaaagctctccagagccctgagccctgaagaataagcctcctcctgagagcaggaggtggttaggcagggctggagcctggatgatcagttgccatggtgcccgggtgaagtgatggtggggtcgcaggaagggcagtctcagacccaccaggagagcaaggctaagccttaacctgccaccaagacctggaccagctgacccagatcctgaaagtgaccggggtgcctggcacggagtttgtgcagaagctgaacgacaaagcggtgggtggtaaatgggacctaggctggcctgggctgtgtgcttgcctgacgtgggcccagtgggctgcaggcctttgtggaagaaggctcaccagcaccttcccacagcatcctcctaccctggcaggcactcttgtcttaatctcaccgtggaccctgacctgaactttcagccctgctctgaggcttttctgaaatccctgctctacacgctgaggccagagccctaaggggtttgatgcttttctgtcttccaggccaaatcctacatccagtccctgccacagacccccaggaaggatttcactcagctgttcccacgggccagcccccagggtgagtctcagagcccgctccccaggggcctctcagcgtatcccagagggcgggctctcccagcccctggtgtgaggctcttggctctgcccctgcagctgcggacctgctggagaagatgctggagctagacgtggacaagcgcctgacggccgcgcaggccctcacccatcccttctttgaacccttccgggaccctgaggaagagacggaggcccagcagccgtttgatgattccttagaacacgagaaactcacagtggatgaatggaagcgtaagagctggggcctcgggcttcctcgcctccgcctgcagcctctcttccttgcttcctccatctttgtgcctggcctctgccagccctacctgccacctccttcttggtgggcattgtctcctgggtgcttctttctccttgagctgacttcgctctccatgctgtctctgaaggggggtggactttctcgccacagcacctctttacgcaccttaaaccatgctgcctttctcagagcacatctacaaggagattgtgaacttcagccccattgcccggaaggactcacggcgccggagtggcatgaagctgtagggactcatcttgcatggcaccgccggccagacactgcccaaggaccagtatttgtcactaccaaactcagcccttcttggaatacagcctttcaagcagaggacagaagggtccttctccttatgtgggaaatgggcctagtagatgcagaattcaaagatgtcggttgggagaaactagctctgatcctaacaggccacgttaaactgcccatctggagaatcgcctgcaggtggggccctttccttcccgccagagtggggctgagtgggcgctgagccaggccgggggcctatggcagtgatgctgtgttggtttcctagggatgctctaacgaattaccacaaacctggtggattgaaacagcagaacttgattcccttacagttctggaggctggaaatctgggatggaggtgttggcagggctgtggtccctttgaaggctctggggaagaatccttccttggctctttttagcttgtggcggcagtgggcagtccgtggcattccccagcttattgctgcatcactccagtctctgtctcttctgttctctcctcttttaacaacagtcattggatttagggcccaccctaatcctgtgtgatcttatcttgatccttattaattaaacctgcaaatactctagttccaaataaagtcacattctcaggttccaggtggacatgaattccagggggaaatgattcaactcactacagacagctgggagggaggggccccttcctgggccccgtgctgaggccttgtgctctgtgaaggaacccaatgtgtttggctgctaaattaagggagttgcagagagagctgcagctggtgcgattgcattcaggttattttgggtgagtgataagcaatcaagatatgaaacaacagcaggctcggagactgcgagctgcacaggcagaaatgggctcttgcctggcttgatggcaaaccgttctgctccctttgggagatggcacagctctccagagctttgacctgacagtggctagaacctctctgtttttatctgagaaactttggcagaacaaatttccatgtgcacaagctgtcgggcacagtgggtctcaaatttccttgtgcaccaggggacttgttaaaatgcagattcctgggccccaccccagggcttgtgactcagcaggtctgcagttgagaccttagaatgtgcatttgaatgaggacctctcgccctgacccaagcctagtgattctgatggatatcagaccatagttcgagacatttagtggatttcagtcatacttgatttgttgggaggcctaaatcaaaaacctataggaggagactggggggcttcagatggagtttcacactcatcttacaggtgttaaaactgaggctcagaaagcttttttttgtttgtttgtttgagacagggtctggctctgtcacccgggctggagttcagtggcacaattacatcttactgcaacctcagcctcctgggctcaagccatcctcccacctcagcctcctaagtagctgggactacaggtctgtgccacccaggtgcaccaggactgcaggtggctaattaaaacattttttttcttttttgtataggcggggtttctctatgttgcccaggctgatcttgaacttctggactcaagtgatcctcccactttggcctcccaaagtgctgggattataggcatgagccaccctgcaggcccagacagcatttttaaggccttgaaactcttctgtataatactgtaatggtggatacctattgtgcatttgttaccatctgtaggactggataacacagagtgaaccctcaagtaaactatggacttcagttaataataatgtatcagtattggttcataaattgtaacaattgtgccacactaatgcaagatgttactcatcaagaaaactgaggagagagaaggggaggaagtaggtgggaacctctatactttctaccaacctaaaactgctctaaaaaataaaccacaggccggtcgcagtagctcacgcctgtaatcccagcaccttgggaggctgaggtgggcggatcacttgaggtcaggagttcaagaccagcctggccaacatggtgaaaccccatctctaccaaaaatacaaaaattagctgggcttggtggtgcatgcctgtaatcccaaactactcgggaggctgaggcagaattgcttgaacctgggaggtggaggttgcagtgagctgagatcacaccactgcactccagcctgggtgacagagtgagactccatctcaaaaaaacaaaaaaaacaaataccctgaggacacagagacattgggtcagacacccacagctaggaagtggtggagtcagattggaacccaagtaggcttgagcactgtacccagcttggattcaagggttgcccagccttccctcttcacgccagtctgagacccttactgctgactgtgtccatggtctctgttttctctcccacagaatggccctgctgtcaaggagctggggagtccttgactgggactggctagtcttgccacagccctggcctcgctggttactaaaactgccccaggttccctgagtctacatccctctaagcctcctgagaattctcactgccccaaggaaaaagtctagccttccttcttggcctggcattcaaaaccccttgtgttctctctaatctcatcagctcccactgcctcccctagctagtccttatgtcagtgtgggacaccagtcctgggatccaccgtaaggttcattctgcattcacaggttaaaggtcttgacaagtcctgcagtaaagagatccgttcctcatttaatccagaacttcccagatgtacttaaccgcaggacccattttctcccaacagcatgacacacatagccttttttgcccagtgcagcccagtgcacaggtcccgatattgcctctccccaagtaggcttggccttcttttagtgcccgtgcgtggaaggccctccattctcctctccattctccttggccttcaaggctctaccttaggcctccctccaggcagctgttctccatcatcccccctgggctgcaggccctctgtgggcagcatttagtgtgtggtttggcctccccttcccattgcccactgtgagcaaatacctgtgcgtgaatgaataatgagtgaaagatgtcccaggggcctgtcggtcacttctttgccccgaccaggccaatgtcatatggaaggtggcagagagcccagcaggaagcagaagtgggcggccctgggctgtacctttgagctgctctcctgaaaatctctattatttcagactcccagaccccaccccccgcttcatcctctggtgtcctcctaggccatccccactccggaattaaacctcagcccctcccacagagttttctcaaatctgtgaagtttcttcaaaaggcggtggaggtgctcagcagtgcaaggtggggggtggagggggtggggagtagagggagtgggggttccacgggtttgggtcttgcccagtgggcacatggcctgtgtaataggaaacaagtccattctcctgctgtggggggcagaggagctggcggggcgagggagggggagatgtgggctcaggtattcttggtggatgcgcttcgttctgtggctgatggggtggcttaaaagatcttaacagagagagatcaggaagccagactgcaaggtgggggacatttcctaagagcaagtgtaccctccattccctcttttgaggaacaaagagtatctttgctggggcctgagtcatccatgaaaacagacagcagcggtgtcccagggcagggcttgcctggcgtggattggggtggtgctgcccccagtgaggggcagcacaaggggagacagaaatggaggaatagcccccgtaagggcaagcccagtgtgcaccagtgcccagagctgcctgatggaggaacagctccgtaagggtgaacccagtgtgcacgggtgcccggagctgcctgcgtgaggctgggggctagtttggatgagggcatggctcaactttcacttggcacattgaaatagcttttgctgtctgctagggtgtggaaaactgtttttccatggccccaagcaatgctatagctacagctgaggagggaggaatctctccctgcctctcctcccaactcttggcttttgcttccttaaatttgaacaattccctaagatctaatgctgggaggctccccttccttcattacacagtgaactcatgtgctctatctgcattccccctaaatcctcctgagcttttaggtaagaggccgatgatttcacaatcggcagcagaggcctaaggccattccatcaaactgaagatggcagcaagttgtcctcacttcttcattgagcacccatgggtgtgtactggagcaagggtggtgccagggattctcctgctctggttcctcctgcggggtccctgctcagctgggcagctgccctcactctgggcgggtggcatgtgagtgtcaacagggcccctctcagtcaggggctcttggccattttttgtgccatggatcgcttctcaaaatcatattttcttttcttttcttttgagatggggtctcactccattacccaggctggagtgcagtggtgcaatcacagctcactgtagcctcgacctccctgggttcaggtgatcctcccacctcagcctcccaagtagctgggactataggcatgcaccaccatgcctggctaatttcagaataatattttcatacacataaaatatgtaggattacaaagtaagctagttatatttatatacagttgtcaaaatatttttaaaatgtataacgtgatactatgtgtataggtttctttattaacatattgaataaaaagatcgagggtaggcctattaaacaatggtaaactgaagagagatgagtgtaaacaatattttaagatagatacctgtggcaaactgtaaagggatatgaaaaactctgtaatttctattggcactgctgatacaactgcactttgctacctttgttcataaccaaggaaatagaaatgactgaaaataaagttgtattctattccaatcc

SEQ ID NO: 1215 - DNA, 11190 bp, Homo sapiens
gcagtcgggcctcggtcgccacggtaacgcgcgcgggcaggtgtccgaccatgagcgtccgggtcgcacgggtagcgtgggtcaggggcttgggcgccagctaccgccgcggcgcctcgagcttcccggtgcctccgccgggcgcccagggtgtagcggagctgctgcgagatgcgaccggggcggaggaggaggcgccctgggcggcgacggagcggcgaatgccgggccagtgctccgtgctgctcttcccgggccagggcagccaggtggtgggcatgggccgcggtctgctcaactacccgcgcgtccgcgaactctacgccgccgcccgccgcgtgctgggctacgacctgctggaactgagcctgcacgggccgcaggagaccctggaccgcaccgtgcactgtcagcccgcgatcttcgtggcatcgctggccgctgtcgagaaactacatcacctgcagccctcggtgaggcccgaggccccgtgacaggagggggaaggtgagctctgcctgagctcttggccctgccagaggcttccgcctgccattccgggggctcccacgtcttactcattcgatcgagtttttttttttgtttgtttttgtttttttttttgagacggagtctcgctctgtcgcccaggctagagtgcagtggcgcgatctcggctccgcctcccgagttcacgccattctcctgcctcagcctcccaagtagctgggactacaggcgcccgccaccatgcccggctaattttttgtatttttagtagagacggggtttcatcgtgttagtcaggatggtcttgatctcctgacctcgtgatctgcccgcctcggcctcccaaagtgctgggattacaggcatgagccaccgtgcccggcccgttttgttttgttttttgagacagagtcttgctctgtcacccaggctggagtgcaatggcgcagtcttggctcactgcaacctctgcctcccaggttcaagcagttctcctgcctcagcctccgcagtagctgggatcacaggtgcacaccaccacgcccggctaatttttttattctttacttaaatcctcccaggttcacccacctcggcctcccaaagtgctaggattacaggtatgagccactgcactggcctaaatgaaggaacattgagatgagttgagaatgtcacttcacttgaaggtggtggattgattgctattaatatttaataagacggtaaatgttaagctagcacttgagatcctttaccctatttcaccttcacaccaccttgtgaggttaatactgttatttgatggttgaggaatgcagactcagggatattaaaagaattagttaagtggtcctgttgaatcgtcatcataatattcattcactgcttaccctagtctgggtctgtgctaagcactgtatagacattatattcacataattctctcatccgccctttggggtaggccctgttcttccctcatttcacagatgagataaaaatgctcttggccgggcgaggtggctcacgcctataatgcctataatccagcacttcaggaggctgaggtgggtgcatcacgaggtcaggagttcaaaaccagcctggccaacatggtgaaaccccgtctctactaaaaatacaaaaattagccaagtgtggtggtggacacctgtaatcccagcaactcgggaggctgaggcaggagaattgcttgaacccgggaggcggacgttgcagtgagccgagatcacgccattgcactccagcctgggcaacaagagcaaaactccgcctcaaaaaaaaaaaagtcatgctcttaacttgtgcacaacgatatggcctgagagcctgctgcagggccatggcaagggaatccagagccctgggttggcgtcagtgtgaccatggacggagttgatggactgtaactaaccaggaaagctcctcctaaataaaggggcaggactcaatgattgtcaaggtcacttttgtgtgtcctcttccagctggtgcaccaagttcgtagaacctggctcactgagatgctgaacaccccgccagctctcaggtacagagccctggaactgggatccccaggagagtgagggctcacgttctgcatctgtccccacaggtgattgagaactgtgttgctgctgctggattcagtgtgggagagtttgcagccctagtgtttgccggagccatggaatttgctgaaggtacaggaaggagtttggttttatgcaaggctgtggtcttgggctcattaggggtaagggacactgccaaaaatgatactggacccactcaggtgatgggaagggagcacatggacaggggtgacattggcacatgaggacagggctttgctgtgattccttttcaagactgaaggattcattagggatttcccttatttttgtaatctcatgaaatctgcttgctgaactgtctaacccgctatcctgtgcactcatacctgcagcacctgcaacacgagagtatgtgttcagtagatattcgttgaattaaagagtaaataaatattggatctggagccatatcagttttacttcttaagatttttgctggccaggaaccatggcttacgtctgtaatcccagtgctttgggaggccaaggcaggaggaccacttgaggccaggagttccagaccatcttgggccacatagtgagaccttcatctctgcccccaacaaaaaacaaaaattacgttgggtgcagtgattcacacctgtaatgccagcactttgggaggcagaggcagatagatgtttgagcccaggagttttagaccaccctgggcaacatggtgaaaaccccatctctaccgaaaatacaaaaattagccaggcatgttggtgtgcgcctgtagtcccagctcgagtacttgggaggatgaggtgggaggattacctgaacccaggaggtcaaagctgcagtgagctgtgatcgtgccactgcattccagcctgggtgacagagtgacaccctgtcacacacacacacatacacaaaattagctgcacttagtggcatgcatctgtaattccagctactcaggaggctgagggaagatcacttgagcccctgagtctgaggctgcagtgagccacgattgtgccactgcactgcggcatgggtgacagagcaagaccctgtccaaaacaaacaaaaaagaatctagtatagaaacacgagaggttattgggactggagagggagaaatggagagtgcctacatagtggacatggagtgtttgaaactagagagagttggtggttgtacaacattatgaataccccaaataccactgaattatacacattaaagtggttaattatattttatgtgaatttcactgcagtgctttttttttaagcgttataacattattaaggaaagtttcataatttcacattttatgaaacaattttattacatgtatcattttatgtgtacataatgtgcagaattaggcttggtgtggtggctcacgcctgtaatcccagcccagcactttgggaggccaaggtgggtggatcacctaaggcaggagtttgagaccagcctgaccaacgtggtaaaaccccatctctactaaaaattcaaaaattatctgggtgtggtggcgtgcacctgtaatcttagctacttgggaggctgaggcacaagaatcacttgaaccaggaggcagaggttgcagtgagccgagattgtgccactgcactccagcttgggttagagaatgagactctgtgtcaaaaaaaaaaaaaaaagtgcagaattatagcatagttacacttttgtgttttctttttctttttcttttttgaggcagtatcttgctctgtcaccccagctgcagtgcagtggtgcagtcgtagctcactgcagcctcagcctcttggcctcaagtgatcctcccgcttcagtctccagactaactgggactacaggctcacaccatcatgcccagctaattttagaagtttttgtagagatggggtctcgctatgttgccagggctggtctggaactcctgactcaagtgatcctccagcttcagcctcctacagtgctgggattacttacaggcattagccactgtgcctggcctacttttttcccttgacattttacatagttttgaatgtctctgtgggaggatgtctgcgtgctctcctcccttttcttgtatgttttcttctacttcttgtcacaggctcttgttcatttgttttttaagagacagagttttcctctgtcttccagccttgagtgcagtgatgcaaccatagctcactgcagcctctaactcctgatctcaagcagtcctcctgccttagcctcctaagtacctgatgtcacaggctgtttatgtatttgtcctcctgttcttgtgtaagggagctaaaagtccagtacatagaagtgctaagtgaatgaagatatgtcaggatttgctccttagacctctctgttgacctgtgaaacactgtgcaggtcccttaatctcttctcagtctggtcatctcttctctctgcccaggaagcaggaccagggtgtcaggggtctggtagtttcaggccattcttatgtgtggctttgtagggatttttgagacagggtctcgctctgtcacccaggctggaatacagtggcatgaacacagctcactgtagcctcaacttcctgggctccagcaatcctcccacctcagcctcccaagtagctgggaccacaggcgcacactgccacgcccggctaatttttgtatttttggtagtgacagggttttaccatgttgtctagtctggtctcgaactcctgagctcaagtgatctgcctgccttggcctcccaaagtgccggaactacaggtgcgagccacagcgaccagccctcaggccactcttattatcattggcactgcctgccctctctccatgctcttgagccacactgaatcaggagtcataggttttcgttcatctgcattggctgtgtcaggttctccagctctaagtggggacagtaacacttgacttatgacaattatgtcactgaaattcatgtagtacagtagcccatgtctctgatggttcttttttgttgttcttgttttgagacagggtcttgctctgtcaccaggctggtgtgcagtggagcaatcatagcttactacagctgcagcctcaacctgctggtcacaagtgatccttccgtgtcagcctcccaagcatctgggactacaggcaggcaccaccatgcctggctaatttgtattttattttttgcagggacagggtctccctatgttgctcaggctggtgtcgagctccttgggctcaagccgtcctgcctcagcctcccaaagtgctgggattacaggcataagccaccatgcccggcctgatctctcttaataaactaactaataataattcccagctttcacaacagcccaggcagattagatattattatcctcattttactaactaaaaatttgaacctcaaggaggttgtgacttggctaaggcaatgtggcttccaccctgttcctctttaccttttaccagggtttctcaatagtggcactatttaaaaaaaaaaaaaaacagtggcgctattgggccaggtcatttgttttgttgggggcaaggggggctgacctgtgcagtgcagcatgttgagcagcatccctggactctacccactagacgtcagtggcactctcccctagtcagaacaaccggaaaacgtctccggacactgcccccggcctgttgagcaccactgtcctactccaaaccagctttatagcaggaagctccttgggttagtttgtatagtgccaagcacagcagcatacttttggtggtgagcgcttgtgcagtcgatggaggtgtgtggaactgtggccctgctggctggtggcagacaccagtgcccctgtctctagtgcagagtggagcttgggctttgtttctcaggcctggccttttctccttcattctgtgccctcatttttccaaatgcgcttctctctggccaggtttgtatgcagtgaaaatccgagctgaggccatgcaggaagcttcagaagctgtccccagtgggatgctgtctgtcctcggccagcctcagtccaagttcaacttcgcctgtttggaagcccgggaacactgcaagtctttaggcatagagaaccccgtatgtgaagtgtccaactacctctttccagattgcagggtgatttcaggacaccaagaggtgggtgttgatgggaactgccttcataggccagtccagtacggagggttggaactgctccacacccgtgaggcctagcagtctggcgggtgctgggtccagcccggtctttaggaagtattttggggccagggcagtgaggtagaccgagtgctgcaaagcaggcaggagcaagaatgctgccctgctccaccacgtgtagaatggggtctggaaccaaccagccagcccatgtctaaagtaaaggggcagggccagctgatctccagggcccttcccgtagtacattctgggcttctgaggagcctgtgatctggttgcttccttagagaaaagagatttgttttctgctagattgctctgcctgccctgctttttttaggtgtctgtttttgccctggagttcatttcctttccaccgtatttccttccatttgctacttccccaaacatttatcaagggctggggacgcacagactgattagccagggttcctgccgtcaaaggaagagccccgtgaatggatgactccaggccgaggggtgcagtgagggtctggctggctactcatgggcctaagagcaacccaggaggcagcagctggaggacgggcatgtgtttgccagcagggggcaccctgagcagagcggcaggagccccctacagaaagagcagtgggtgctgagtgcctggctcagggaatgctgagtgagcgcagattgcagcccgtgtgaggggctgctgcccgggccaggcatttctgtcttacttcatgtccctcacagcccatcctgtgctatatggaaggaagggattctttttttgtttgtttgtttgagacagggtctcactgtgttgcctaggctggagtatggtggcaccatcacggctcactgcagcctggacctcctgggctcaagtgttcctcctaccttagcctcctgagtggcttggattacagacacgggcaaccacacctggctaacttttgtatttttttgtagagacggggtttcaccgtgttgcccaagctggtcttgaactactgggctcaagggatccccccacctcagcctcccaagtagctgggactacagacacaggccaccacacccagctaaaggaagggattcttaatcacattttccacacaaggatgctgaggcagagagaggcaagtgcttggggatagtagaggcagaatgggaacctgagtctgtctcactctggagtctgtttccgccacttgaccgtgcttggctccccttcccctttgagggctcaccgtgtgccaggcgtcctcaactgcctcctctgaagtagtgagagctggcaggagcctcttatgactgttctgagatggtgggcaggtcaggtatggtggccccaggtcagtcttggagctagttaggcgttccctttaccagccttggaaggaagcccagaagtggctcaggaaggacttcccagtcagggcaggagtctccccagtaggctcccagacaggtgcacccagtctaggtgacaactcctaggttcatccttttgattttttttttttttttttttgttttttgagacaatgtcttactctgtcatccaggctggagtgcagtggcacgatcttggctcactgcaacctccacctcctgggttcaagtgattctcctgccttagcctcccaagtagctgggactacaggtgcatgccaccacacccagctaattttttgtatttttattagagacggggttttaccatgttggtcaggctggtcttgaacccctgacctcaggtgatctgcccacctcggcctcccaaagtgctgggattataggtgtgagccactgtgcccagcttccctttggtattcttggtagtgccacagcaaagagctcaggtgagggcaggggtaccccctcaggggggaagcccctttccaacaactgatgtgaaaaggctcctgggccctgctcgcccaatgcctgggccaaggactggccattggagaggagactgctggcccctgtgatggtgaccttgagccctgtggccctagcctgggacttgagagggctcagctgttgagccagagtccagagatcttacacggaaagcactttgagaccacagatgctccaggaagtgctactgagtagccatccccatacctgccagtcactcagacaatctaggtgtggagggaggggcttgggctccagagtctggaaggcccagaccaaagaggctcctggttcctgcggtccagcctcagtgggatggagccacatggagggtgatggtggaggggaagcacgggtgagtcagtacaggccaggttttgttgcagtgacaagtagcccacacctcagtggtcacagcacacaagcaccggtcccactcctggtctgtgctcgccaggctgggttctgcttttcagcccaggactcaggcaacaggaacagtctctagggaacactgacagactaaagcaggtggatgacttgaggccaggagttcaagaccagcctgaccaacatggtgaaaccccatctctactaaaacttagccaggcgtggtggtacatgcttatagtcccagctactcgggaggctgaggcaggagcattgcttgaacctgcgaggtggaggttgcagtgagccaagatcgcacctttgcactccagcctgggtgacagaacaagacttcatctcaaaaaataataaagacctttgcaagttctgttgcttgctcactgttgcaagggttttggagctattggctcgcccgaggccccttctgagctcaaatgccttcaggggaggtttttggcatcaagaggagagctctttccttctccagagaaacctcagatgaaagtgacaatatcctagaccctgcattgtgaaatggggcttgaattttagttctgaatttttattttgaagattatggaataaaaagcaaacagactggtcaaaaattatgaaaggagtgatagaattctcattgagatccgggtgcggcggctcatgcctgtaatcccagcactttgggaggccgaagagggtggatcacgaggtctggagatcagctaatacaaaaaattagccgggcgtggtggcgggcgcctgtagtcccagctacttgggaggctgaggcaggagaatggtgtgaacctgggaggcggagcttgcagtgagccaagattgtgccactgcactccagcctgggccacagagcgagacaccgtctcaaaaaaaaaaaaaaaagaattctcattgagaactaacacttcttagatagtgcgttttcctctaccagacactgttgcatgccttgtagggtttgctcttcctggcagcgttgtgaagtagatggaactgtgcttatttgaaggctgggacagaagagattccaggatgttaagtgaattgcctggggatggtgctgggacagacaggtcacatgtccacatctagcagctgtgggtctctttgtggtcaccctcccagtttggccctgtgaatggtcagatctgtaaaggcggatttctgggacattgctcggctgaaacctccttccttccccaggctctacggtttctccagaagaattcctctaagtttcatttcagacgcaccaggatgttgccggttagtggcgcattccacacccgcctcatggagccagccgtggagcccctgacgcaagctttaaaggcagtcgacattaagaagcctctggtttctgtctactccaacgtccacgcgcatagatacaggcatcccgggcacatccacaagctgctggcccagcagctggtctccccagtgaagtgggagcagacgatgcatgccatatacgaaaggaaaaagggcagggggttcccccaaactttcgaagtaggccctggcaggcagctgggagccatcctgaagagctgtaacatgcaggcctggaagtcctacagcgccgtggatgtgctgcagaccctcgaacatgtggacctggaccctcaggagcccccgagatgactgcagggggctcaaatgcgatgaccccctctgtcctcctgaggagaggctgtaggctgtgcctgtcgccccctaccttcctaatggctcctcctctgaggagtgaaagggatttgtttgcaacgtgctttgaaggccacataaaaagccctaaaaatgagtatttctttacatgacccagtccatttctcccccttggaaaaacgtttggacgttgggaagaatgatgccacagggctggtgtgtggggaagctagaatcctggccccgcctctgccagccctgcaccataggcaggtgtgccatctcagcgggaaggggaggactggctgctgcagcctgtcctgctctgtgagtgctgagaacatgctggtgtggcctcaatttcagccagtgccaggggagcccctccaccacccccagcctgccccccagggctcctttgtcacaaatctgaaaggttttagaacccagttggccttggcagttttgttcacctcctcacttgacagctgggagacagaggcccacatttatggacatacccaagagatatgtattgcctgctgtgtgctagagagtgagtgcgctctgttctggtagaaaggtccttgagtgaggtgcggggtgtggggagtgccaggtagggagggcgactgaggccctggtcctaggggtggaaccatggaggaacaccctggtcacccactgggactgcgggtctgcggggcgccagagggagcacagcacatacctgcctcggagctgacccctggctccatgccccgtcctcagagcagctcctgcgccaatattaagtatgagacattccaa

SEQ ID NO: 1216 - DNA, 20556 bp, Homo sapiens
gtggcgggttgctttccaaaatggcgcgggtgctgaaggctgcagccgcgaatgccgtaggtgaataccgggcaccggcgaccttcgccatgggacagggagcgtgggaacggcggtcgggggcggaggaggcctcggcgtggccaaagcaccttgatctaatgtcctcccccgggggcgcgttccacagcagctgctgtcacttaggcagagggtgccttccagaagcgccaccgcttagtagcggggattgccttgtgcatgagtcccatttccatccgagagctgtgcgccttgggctctgcaccttccagtatgtgggcgggagagtcgagggaacttgcccggcaggtcaggcagggcagggacagaagtaaatagaagcggatcggtaagttattttaccgcgcaccaataaagagactggggagaaaccagaaaggagagcacgttccgtaaaaacaacaactactagtcggccgaactccaagcgtgaccagctttctgttgggaacactcaaaggtcagtggtgtaaagaatacaaaaggagtggtttttccacgtgcactaatatatttatcgcgtacacagataaaagcatgtggatttggaaactttcttgagttctctcccccttcattttttttaaaatatgtacatagaatcagttatgacagaaataactgtaataattgtcacgttttctgactcactttctcctctttttatcctttttttttttctcttcctccttttatgagagggcaagtatttcccttaatctgagattccctattaggaagaaggtgccaagtggtaatgccccagagttactccgggacattcgtgataaatccttctagcaccagagcccacattcttaaccgtaaggcataccttcctcttaggtgatacacaagataggaacgtaaaactataaataaatgaatatttgggaaaaggcatttttatgtctatttttagaactgcacactttaatgattgacagtttgggaaaaagtatgacttccaacaggtcatatacatactgcaagaactcaatacagataaaggtgcatgtttgttttgtacttacatacacatcttggcataaaggaaaaatgaagacagtgtattccaaagattgcctttgatttgtcctattaagatacttgaagcttaatgtctccacttgtgtgtgtgtgtgtgtggttgaatatacataaagtaaaatttacctttttttttttttttgagacagagtctcactctgtcgcccaggctggagtgcagtggcgttagctcactgcaacctctgcctcccaggttcaagccattcttccgcctcagcctcccgagtagctgggattacaggcacccggcaccacgcccggctaattttttgcatttttagtggagacgagatttcaccatgttggccaggctggtttggaactcctggcctcaggtgatctgcccacctcgtcttcccaaagtgctgggattacaggcgtgagcccgtctctactaaaaatacaaaaattagccgggcgtggtagcacacgcctgttatcccgggtactcgggaggctgaggcaggataatcgcttgaacccgggaggcggaggttggcgtgagccaagatcgcgccactgcactccagcctgggcaaccaaagcgaaactccgtctcagaaaaaaaaaaaaaattgctttttaagactgaataatattccattgtgtgtgtataccacattttgtttatccattcgtctcttgatagacatttgggttatccccaccttttggctattgtaatacagctatgaacgtgggtgtacaaatacttctgaattcccgcttctttgggggtgtgtatactcataagtggaattgctggattacatggtaattctatgttatggcccctcttttaaggaacataaaacttcgccgaaaaacaaaagcacagaaaaatcagagtgaacacgtagaaaagttctgaaaatggaaattgaacctgttaggtgggagacaagaatgaccaacttacatgactgcataggtttactttcattaatcgtctgtaaatgggctaacagaaatgtaatctgtttacttactgtaatgaataaaaaaaattgatcatagtttgaaacaagttgaagatatatatatggtgctgtgaaattaactggtcaaatgtttaagagaaaacttaccagactaacttgaaagcacttctaatgaatgactttctaaatacgtatgtttcctcaaaccagatattcagtgaaaattcagacttatgttcggccaggcgcggtgactcacgcctgtaatcccagcactttgggaggctgaggaaggtggatcacctgaggtcaggagttcaagaccagcctggccaacatggcaaaacccatctctactaaaaatacaaaaattaaccgggcgtggtggcgcgctcctgtaatcccggctactccggaggctgaggcaggagaattgcttgaacctgggaagcagaggttgcactgagccaagattgcgccattgcactccagcctgggctacagagccagactcgtttcaaaaaaacaaacaaacttattacgtgttctaaaattagattatgtgaaggtcgcacaactttgcaaagatgcaaagaaatgaattgtacacttcaaatgggtgaactttatggtatataaattttaagtctgtttaaaaactattaagagataaagctgttaaaaaacctattacaagtgattattcacttttatagtactttttatacaaatttaacatctaatgtctttaaatagtaagtactcttaatgcatttgagtatagatccttgcagctaaacctttatgtattcagggacagtgtctaaaaagtgtgatctgaaataaatgcaaaatctgaactgaaagaaatgcaatgttgtttttaagtcaggacactaaaagtgattaacgagaattgatattgaaaggaagattggaatgagagttaacatacacatccgattttgatcttttacttgtataccagcttcctgacatgtgaaaatagtttctttaatctgtattcatctttacatgcgttttttattaacacttctgtttttaaatatcttatgcatttatttgcacatggttttacactgtagtatattcatgcaaagcaacctttattggaataatcacaaattaaacattgcagaattcaaaataatgcaattctgctgcactattctgaaatgggaggcagagaaatctaaaactaaagagctgtgaattcctgctagttggagggcaacctgaaataaaaatagctttaaaaaggtagcttcagtgttggtaatcattttcataatttatgcatttattaaaacatcacattgtataccttaaagatacaccgtttctattagtcatcatacctcaagctggaaaaaagtttctacaagtcaaaggagaaatataataattaagagttcaattcacaacaaacttttcaggaacacatttttattaaatataaagctctgtctctttttaactcctttattcagtgttctctacccagtttgcttggtctacacaatttcacctttggatttttattgttggatcttttttttttttttttttttttttggtaaaatgtacataacaaaaccctttaaaaatgtacagtttaggctgggcacagtagctcatgcctgtgatcccggcactttgggaggccgaggtgggcggatcacgaggtcaggagttcgagaccagcctggccaacatggtgaaaccctgtctctactaaaaatacaaaaattagccgggtgcggtggcatgcgcctgtaataccaattattcaggagactgaggcaggagaatcgcttgaacccggaaggtggaggttgcagtgagccgagatcacactattgcactccagcctgggtgaaagagcaagagttcgtctcaaaataaataaataataaagtacagtttaacagtaattattacattcactgggttagtgcaactatcacatttgtctatttcaaaacattttcactggcctagtgctgtgactcacatctgtagtcccagcactttgggaagccaaggtcggaggatcgcttgagcccaggagcaacatgggcagcctgggcaacatggtgaaaccccatctctacaaaacgtacaaaaattagccaggcatggtggctcatgcctatggttccagctactcaggaggctgaggtggaaggtattctttttttgcaatttagtttcaattgtacatttatgtatatgtgtactcggttgtaatccacttggatttcatgataacaatgaaacttactaagtttctaacttggtttgttgtgaatattagatagttggtgtaaaaaaataaatacagtgccagacagtaggtgcacagtaaattcaggccattcttgttgttaatgacatgcaatgactgtttgctaaatgaatggaatgcagagttatctgtggagatcaagaaactatctgatgaggacacagcgacagtgaattttaaaaatgctaaaaactgactggaatggtggcttacacctataatcccagcactttgggagaccgaggtgggtggatcacctgaggtcaggagtttgagaccagcctgaccaacatggtgaaaccccatctctactaaaaatgcaaaaattagggtgggcacagtggctcacatctctaatcctatcactttgggaggccgaggtgggtggatcacctgaggtcaggagttcgagaccagcctggccaatgaggcgaaaccccatctctactaaaaatacaacattagccgggcatgtggcaggtgcctgtaattccagctactcgggaggctgaggcaggagaatcgcttgaacctggggggcggaggttgcagtgagcccagatcgcgccacttcactccattctgggcgaaatagtgagactccgtctcaaaaaaaaaaaaaaatatatatatatatatatatatatttatatatatacacacacatacacacacacacaaattagctgggtatggtgacaggcacctgtaatcccagctacttgggaggctgaggccagtgaatcacttgaacccaggaggcagaggttgcagtgagctgagatcgcactgttgcactccagcactccggcctgggcaacagagcattaaagagtactgtatgtactcttttaatgtatatttatacctttaatgaacttattacaaaatataagacaaaaaattgggtacaggtagagaaattgcttgctcttattaaatatatgttgtttcattgtgaaatgcagagaatagcaagtaatgcttaatatgccactatttaagtgttaccagtaaatatgaattgttatgaaaaaatgttatcctgtgttttaaatctaactgcagctcagaattagcttttttattccagtcagttatttgaatgggcagagcagagtaattctgatgtaagtttttccatttatctcctggtttcatttcaataattaaaaagaacagatatataaataatgaatttttgcatgcattatttgtttagtttttaaaattcaatttagaagtgcgttaattctcaaaagaaggatatcaatggctgttcaatttttcagggcttttttccagacttcaagctcccattccaacagtaagagcttcttccacatcacagcccttggatcaagtgacaggttctgtgtggaacctgggtcgactcaaccatgtagccatagcagtgccagatttggaaaaggctgcagcattttataagaatattctgggggcccaggtaagtgaagcggtccctcttcctgaacatggagtatctgttgtttttgtcaacctgggaaataccaagatggaactgcttcatccattgggacgtgacagtccaattgcaggttttctgcagaaaaacaaggctggaggaatgcatcacatctgcatcgaggtattttaattattttaatgcctggtattttaaatctctcttttaaaaaatgtcttctactttttaagtctatttatggtcactgtcattagaaacttttgtaaagttctttaaggagaatgataatattcatcctcctcaaaggtggatccttacatacatttcttttccctttagaaaattctaacatataatattaatgtatttttttgaagtctggattcagtgaccactgtaagtgccaccaaagttagccacaatgtagagtctgctttagaattgatcatgtttgacctcccatgtaacaggaatacagctgttttcactgtcataaggcaattaggagaaacaaatgaaaagactttaaagctttcagtgtacatgctaagtattctttataactcttttctctctttaaaatgctaataacttcttcgttattacaaagtcaatacattttcaattactgtaatttttaagatcttctgaattgcacctgccaacaatttttaaaggaatgtgaagaaatgttagacaagaaaagtccattagagaacatttctatagatgttcatgttcagataactgccttttagaatatcagcaatgacaattatgcatcgatttaatttgctaggacaattctttttatagaaagaatgacataattgttaagccaaatttctttttcttttctttttttttttttttttgagacggagtcttactctgtcgcccaggctgaagtgcagtgtggcgtgatctcggctcactgcaacctctgcctcctgggttcaagtgattctcctgcctcagcctaccaggtagctgggattacaggcatgcgccaccatgcccggctaattgtgtatttttagtagagatgaggtttcaccatgttggtcaggctggtctcaaactcctgacctcaggtgattcacctacgtcagcctctcaaagtgctgggattataggcgtgagccaccttgcctggcctgttaggccaaatttctaatacagaggagaggtcatttgattctagagtgaattcaaggatgtattcagttcattattgcaaacatgtatgagaccctataatgtgtattctgccaagtacttgggatttagcagtgaataagacatgagtcatgtccatagtgaggagggtcagaaatttaaacacccaagtgcaatatactatgataagtagaattgatatatgtgactttgcagtagcacagatgaaggagattgattgctcctggcagattgagttgctgggaaggcctcacagagcataagttacaatgaatgtgaaggaattccctaggtgaacaaaaggagaaagttatttcaggcagagggaattgcatgtggaaaggcatagagttatcataacagctaacacttagtggctgggtgtggtggcttatgcctcgacatggcttggctgtgtccccacccaaatctcatcttgaattcccacatgttgtgggagggaccagtgggaggtaattgaatcatgggggcaggtctttccgtgctgttcttgtgatagtgaataagtttcacaagatctgacagttttataagggggattttccctgcccaatctgtctctctttgcctgctgccatccatgtaagatgtgacttgctcctccttgccttctgccatgagtgtgaggcctccccagccacgtggaactgtaaatcattaaacctgtttcttttgtaaattgcccagtctcgggtatgtctttatcaatagcgtgaaaatggactaatacacacctgtaatcttagcactttgggaggccaaggtgggcagattgctcgagcccaggagtttgagaccagcctgggccaaatggcaaaaccgtgtctctactaaaaatacaaaaagctagtcaggtgtggtggtatgcacctgtagtcccagctacttgggaggctgatgtgggagcatcacttgagcccaggaagtgctgaggtggaggttgtagtgagccgtgatcacaccactgcactctagcctgaatgaaagagcgagaccctgtctcaaaaaaaagaactaacatttagtgagtcctctagtagtatgtctacaaagtaactcaacacatactattttcttgaattttcatagctaccctgtgagggccctattatccccatttgacaggaaaggaaactgagacagagtagttaatttgcccatggtcatatcaatagcaggtatggggctgaatcccagattggttctgattccagggtctgcactcttacccatgatgccagttgccttcattatattaactgagttttaaatttgcggtggggaagctataagaccttaagcagggaactaaacaagtcctaatattagcctttattttatttttagggagttacttttggctgcaggtctttgtcagtggacctgagtgtttgtctaagccctaccccaccccccaggatgagaagcaggacctttgaatccactcccccctctcccacactgcactatcagtattccatcaagagagcccatgctttcaaaggagttcagctatgtgatttagttcagttaagtaaggaatagtggaagttcagtaatggcagattcaaaagcagagattataagggggacatgcaaatgtattggatataaaatgaaggtaggtaagaggagaaggtgtgaacagtggttagttaggtgctattttagtataatacccccatcatcattctctgccctccacaaaaaaattaagtggcttaacaagattttatttttctgttttcagtctaatattagctatcccaggctgatgggcagctctgctgtccatgacacatgacttacaaggttgctccaggcatcaccatttgccagccagagggaagggaagggaaggtggagtgggaatacctggcaagtggctttaaggagatgctctaggatcacttctgtccttatcccattggcccaagcttagttacatgacacacttctctgcaagggaggctggggaatgtagtctctagctaggcagttatgtgccctgctgaagcttgggggttgctgtaattaaaaggaggaaaaggagaaaggtactggaggccatcaatggatgccacgcttggtgatttttaaaaagtggtgtgtcacctgggcatggtggctcatgcttattacagcactttgggaggccgaggtgggcagattgcctgagctcaggagtttgagaccagcctgggcaacacggtgaaaccccatctctactaaaatacaaaaattagctggacgtggcggcgcacacctgtaattccagctacttgggaggctgaggcaggagaatcgtttgaacctgggaggcagaggttgcagtgagccaagatcatgccacttcactccagcctgggcaacagagcaagactccatctcaggaaaaaaaaaaaaaatgttgaaccactcatcagagaattggctttcccctctgtaatcacagggctactttctgtcctttttcaccaggatcttataaaacctctgacttagcatatatctgttggtgcatgctccatggtttttgttgactcacttgacgaaatgttcctttctcacatgtggattacgatctcaatagttaattagcatttttctgtcgaggttgagttggtttctactttttcttgtgaggtttactcatatttcttgtgtgtctttgcctctcactagaggaattttagagggcatcttgtcccatctcttctcttgctcaagtatggactgaatcacccactgttttctggcacagcttgtgtttgtgctcctaactgctgcctgcgatggcaagaggggggtcaccttccctgccttctgcgtgcctctgcttgaggagacaaagctggccgtgctttctctggagaacttagccagacagcacagtgtgtcacagtgaagactttaagggccaccagaaatacttactcaaatttgtattgagtttgtaaaaatatttaaatgcttccgtgttggttggtaaacagctgctgctctgtaacacctgagtaacattccttttccagaaggacccttttctgggacccttcagacacccttctccctctacaatttttttccttcagagagagggtctcactgtgtcacccatgctggagtgcagtggcacaatcattacgcactgcaacctggaactcctgagctcaagcgaccctcctacctcagcctcctgagtagctacggctacaggcagcacaccatcatgcccagctaatttttttttttttaagagacaaattcttgctatattgcccaggctggtctcaaactcttggctcaagcaatccttctacctcagcccttccaaagcactgggattacaggcatgaaccaccatgctcagccgcacaattctatctgattagtatctttgtattttcctgattgttaagtatttttggtatcactctgtccttcactgtacaagatgctggggatatgtggctgaacaagcagaaagttcctgtctacccagagcttgcctgcttgcttcatttattcacacatgctcctcattttccagagaggattaaaggtgactgactaaaacacagcctacaaagtacaaaaggataaacagaagtaatagtgctagttgcaacaaagaggaaatataagggatgattagcataccttactagtttagccaaatacagtcccacaccgcataacaatgtttcagtcagtgatgagtccacatgaggtcccataaggttatacactgtatttttattgtactttgtctgtgttgaaatgtgtttagacaccattgtgttacacttgcctacagttttcagtaacatgctgtacaggtttgtagccaaggaggaatagactgtaccctgtagcctaggtgtgtagtaggcgccaccatccaggtgtggtgatgttcgcacaacaatgaaattgcctagtgatgcatttctcaggactcgtacccatcaagtgacacatgactgtatttctttctacttaccaaaaacaaaaaaggaaataaacagtattgagtacctatgactcctccccattccttcccttcctgaagacttcaggtaggacagagcagaagagtcatttttgttgatggggagaaccagactggcctaaagcagggtgttgggatcctggcaaggtgaggagggcatccatgagtgagagctgcctgccccggggaagccagagactgagtgcccatgcatggggagttccagtgcaaggtgtccgagtctgagcagggtttgtgcgtttgtgcccaagggagcatcttgacttgcagtgtcagagtgaggagggcatcagcatgggaggccagcttagaactaaatgcttatgtcccctcaaaattcatatgtcgaaatcataaccccaaagtgatggtgttaggaggtggggccttagggagatgattcctgaggcctcattcatgagcagtaggcctatccctcatgaatgggattagtgtccttataaaagaggcctcagagacacccgttgccccttccgctacgggaggacagtgagaaggtgctgtctgtgaaccaccaatcccccaccagatgttgaatctgccagcacttagatcttggacttcccaggctctcaaactgacaaatttctgttttttctgagccacctagtttaggtattttgttctaacagcccgaatggactgagacacagctcagagcagggagctggagcccaaggatgttgagaagagcgtccacctgaggggcagcggcagcaaggagtgggagagccagagcagggtaggggcaccgacactgtggggagggcacgcccagcatggagggccagggctggtcctgtggggagtgcatcgttgcaggggaaaatggtgactaatgtggggagttgaagcccaggtgggataagctgggtgtcctcgcagggagtggcctggtatgggagcagggcctgagaagggtgaggcagatgttcacatggggtagggggcaggtatggggagtcagagccacacagggtgaggaggatgtgtatccactgggacgcttccgggcgggatgttgaatcccacaaaaggcaaggaggactgcagcacagggagtggcccagctcacatggggtaacaggcctctgtgcaggggtggtgtggcctggaattgtgagtgggagctcagatgggatgaagagggcagccccacggttggagcacatggagggtgatgagtgcagtgctgaggctgagggaggggctgcagaatcatagggaccggtgacagagaaggggctggttagatgagtaggtagtaaggatcatgggagcctggcttcccagtggcagacagagatgttggatttgatttcaaggtaatcttgaaattactgttgcaggctgctggggaaaagcacatgagaaaaatattaatagtatttaaaaactaagacaaaaggtagagaaatgcagcaattatagcagttttattttctgagtgattagacaatagatgactcattttcttgtttgtgcttttatatgttttgcagatcttttttgacagcatatattccttaggaaagaaaaaatttataacttcaaagtaacaggctagtgaggtaactcatttcctacatactgggtaatgtttgttcttcaatcaagaaaggaaaatattctcctttttaaaaaattttattctcattttggcttttcacaataaactagggaattaaaaaaatattttactatccactgtgaaaatttcagcagagacaagcatttgatggatactccacatagcccccactagactatatagtcattgtggaagcttaggtaacatgtgctcttctgaaataaatccaagaagactggaaccatctgaaccctatgtaaagtgagacagtgttaggcttgcataattcactcagcttttagcttttgaggagatacagttggaacaaatacaacaaatacttaatccagacttttcactttaactttcatggatttataccaatttgaggattgaagtcattcattatatcagcaccattacaactgtatataaaattaaagcttatgtttgttaaatctgtccaaatgtcatgtatagttaagaggggtacattattactttttcataaaatttggtcattgaggattacataccttaaggttagagttatttagcccaattacttggcttgaaataaacaagattgtattgccattttcagatggggaagctgaggaccaaagaggttatgagatgtacctgaagattgtgaattctggccgggtgcagtggctcacgcctgtaatcccagcactttgggaggccgaggcaggatcacctgaggtcaggagttggagaccagcttggccaacatggtgaaacctatctctactaaaaatataaaaattagccatggtggcacgcgcctgtaatcccagttactcgggaggccgaggcaggagaattccttgagcctgggaggcggaggttgcagtgaactgagatcgcaccactgcattctagcctggtaacagagcgagactccatctcaaaaaaaaaaaaaaaaagttttgaattctgattgtgacaatccaaacattttttattcgggttattgtcactcttaatttgcaggtgaaggggcagaatcaagataaactctcagatacagataaataccaaaaaaaagaaagaaagaaagaaaaaggaaatagctggtaagaagttgaagtgaaaagtaaagggccgggcatggtggctcacgcctgtaatcccagcacttttgggaggccgaggcgggtggatcacgaggtcaggagatcgagaccatcctggctaacacggtgaaaccctgtctctactaaaaatacaaaaaaattagccaggcgtggtggcgggcacctactacttgggaggctgaggcaggagaacggcatgaacccgggaggcagagcttgcagtgagctgagattgcaccactgcactccagcctgggccacagagcaagactccatctcaaaaaaaagaaaagtaaatagccccgattttcactagtggtatgcaaagtcttccagaactatatggtacactctgtaattgtttgaaggactataaaagcagttttaaaaaaccataaccccccccttttttaaattaatactttaagttctgggatacatgtgcagaacgtgcaggtttgttacataaggtacacatgtgccatagtggtttgctgcacccattaacccgtcgtctacattagatatttctcttactgttatccccccctttcccccaccccccaacaggccccggtatatgactccccaccctgtgtccatgtgttctcattcttcaactcccacttatgagtgagaacatgcagtgtttgaaaacctccctttttttaaaagatgggttattactgactgtgttactttcatccttacttagagggactgatttaatttcccaaatcaaattgctctgcatttcttacaactattgcatctactttcaattcagaaaattaagacattttaattttattctttttattactgccaaacaaagcattaggagtactcttaaaagaatcataaaatgtatagcaacactaacagaaggataaatatggtaaaagagctttaaaattgaagttagtgatagaaatagtaacagaagtagaagtagatgctagtgcaatgtcatttagacatttattagttttttgagacagggtctcactctgttacccaggctggagtgcagtggcaccatcatagctcacttcagcctcaacctgggctcaagcagtcctctcatctcagcctcctgagtagctaagactacaggtgtgtgccaccacacctgactgattgattgattatagagatggggcttcactatgtttcccaggctggtgtcaaactcctgggttcaagccatcctcccaccttggccccacctaagtgctgggattataggcatgaaccactgtgcccagcatgaaacactgtgcccaggcttgaagtaattcatgattgagggatattgaagaaggagtatactaaaacattgggttgcaatgtcaaaattatagatacttgtacttggatagaatgttccataaatgaaaatattcataatcacatgtagcataggagttatcaaaagggcactatggaaaaagtcatgattatatcatgaaattgttcaaacatatgagaagtagaaaaaaaatcatgtcagtactttcatcacccaggttcaacagttttcaagctcttgctacacgtcatctttttttcttttttccttaaattattttaaatgaacaacatgtcattttacccttactcagtttgggtctctaagaaatacaaaaataaccacggtgacatcatctttattttctggcacttcagtcaaaattaaagggaaatcttttggcaccatctatacacagctcataaattaaatttcccagattgatttacaaatgtctttttatagttgatttgctctaatcaggataaaaacaagatccactcattataaacagtggttaatctcatcagatgctttaaaaaaattatgaacatcttataatagtttgatacatttatcacaattagtgaaccaataccaattcattgttattagctaaagtctgtactttattctgattcctttagttcttacccagtgtcccttttctattccaggatcccatctaggatttcacatcacattttttttttttaattttattttaagttccaggatacaagtgtaggacatgcaggtttgctacataggtaaacgtatgccatggtggtttgctgcacctgacaatgcattacctagatattaagccttgtatgcattagctatttatcctgatgctctcccttcccccactcctccacccctagcacatcacatttagtcatcgtatctgctgaggctcctcttgcatgtggcagtttctcaaactttccttgtttttttgttttgttttgttttctaacctttttctaggatctcctttccttgtttctgatgaccttaacacttttgaagattactgttcagttattttgtaaactgtccctcagttgagatttgtgtgatatttttcttattagactcatgttattgattttgggaagaccatagaggtaaagtgtcattttcatcacatcatatcaaggattcatactatcaacatgacttactactgttgatattaaccttgatctcccaggtgaggaggtgttgtcaggtttctccactggaaagctgttctttttttctcctccatactatcctcttttggaaggaagtcattatgcaaggcccacacttaaggaatagagagttatatcagtatggacttgtggatatttattttatgacttgcattacaatctaatactactttttttcccctcagattgttccagctttggccattaggagctctttcagttgattcttatgtccctttgacataccccgatcatttttggttttgtgttttgtgtttgttttttaagcacttcctttctttttctggcactgtaagatactccaaattcatcttctatatgagatgctccaaattcatcttctttactctttgccctagccatataattagacatttcatctaggagccctggttcctactactggagaatggtattagaagccaagatctaggttctaagtgtgcttattgctactgggtgtgtcattggttcttgccctactgagccaggacaacagggagatatatatgtgtgtatactgtatatatacacatatctatacacatttctgtatataactatattatagaattcatgaaatgtcataaactcctcagagcatactgacgtctccagctctaatccattaccacatagaccacactagcctttatcttctcattccaacagtgagaaacttagctcccactatcagccatccatctacttcgttgttcaatttcggtatgatgtgtggtagttatatttgtcttctagggctgctataataaatgatcacaaacttagtggcttaaaacagaaattattcttttcacagttctagaaactagaattccaaaatcaagaggtaaaaaatatggaagaaaaagaaaacagaatagagcataagacagatgtaggacatggtcaaaagttctagcagaatatagttggagtcccagaaaaggaagagagagaaaatagaacagaagcagtaattgaaaaaatagttgacaaggacactaccaatctgatgtaaaacatcactctatggtttcaagaaagtcagcaaccccaagtagggcaaacagaaaactacaccaggccgggcaacagtggctcacgcctgtaatcccagcattgtgggaggccaagtcgggcagatcacttgagttcaggagttcgagaccagcctggccaacatggtgaaacccagtctctactaaaaatacaaaaattagccaggcatggtggcacatgcctataatcctagctactcaggaggctgaggcaggagaatcgcttgaacccaggaggcagaggctgcagtaagccaagatcatgccattgcactccagcctaggtgacagagtgagactctgtctcaaaaaaaaaaaaaaaaaaaaggcaggtgcagtggctcacgcctgtaatcccagcactttgggagtcagaggcgggcacatcacaaggtcaagagatcgagaccatcctggccaacatggtgaaaccccttctctactaaaaatataaaaattagctgggcatggtggcgtgtgcctgtagtcccagctactctggaggctgaggcaggagaattgcttgaaccctggaggcaggggttgcagtgagctgagatcgcactactacactccagcctgggtgacagagtgagactctgtctcaaaagaaagaaaaccacacctaagcacaccatagtcaaactgaaaatcaaagatgacaagaaaatcttaaaagcaatcaaagtaaaaaagacatattatagaatgacatgtaatgacactttttagttgctgacagaaaaaacctgccaatttagaaatctgattccggccaagttggtgtaaaagagatcagtttatcctccctgaaacaaacaagcaacctagacaaaatacatgacataatggatttctggcattggacatcaggcagcacaggaattgatttctgagagagggtaaacaaacaagatgagccctacaattacccagtttactggctgtagagagtttccagactgcagtgcaggaagggggaatccacgtggaacttagtggtctccctgagttgcggagataggagttggaagtctgaggaggccatggtgctagagttcacagctctctcctggaaaggagagctgcacagagagtgaactctaaagatctgtagtacctttcatgtcttcatcggagcttcgagtattgcacgcatgttaggaagctagaatagaaccccttgaaaggattagagggaataatccacacacagaggtggggatagttttttcttactagtcatagtaatttccgtaacattgggaagagtactcagaagggctttggcttggtagtgaggaaaattagtcctagactaaaagctgctccaatcccacctaacgcagcagaagaaaagcttaataatattgatatgaatttaaaaataagataaaattgacaatgtctgacatcagtgaggaccaattttcctcactaagtgggtcgagccgttcctgccacgagcttctagtgcatgttctattctgaaaaagatgagaattaaccagctacagtgcaagatgtcatgaaatgagctgtgttcagaatctaggcacgtgtgactttgacatatctatgaggtttaaaaaagaaatatcaggaatacaagtagaatatgtgccatatgaagaaatcatagcttatttatgtaacatttagtatcctcattagctgtttgactggttttagaattcagcatataatccttggctctttggaaataaaattgtataaatactaatatttattagatctgaatggtaggtacatgggtgttaaactagtctctgtgcttttgtgtgttttttttaattaaactagtgattttaattaaactagtgatttatgactgcctaggaatgtggccattcatatcataccttttcatccatttcttaggttcccagtctaagtgggtgactttccaagatagaggcagatcatttctccgtcaagtatagagagacacatctgctcctcctagagtgtccataagtatgaagaaaatagaaataacttagaagaggctgcaaaaacattaaagtttgaaatttttttgggtggggaataacattttgatggcaatttaatagtgattttcatgtgtgtcttgataatgtcaaaggtaataaccaggtgttttggcagggcaagttttggggatcagggaaacactcatatttgctaagtacctattatgccataaactgtactgaaagctttttatctgttacctcattttaatctgtagtcaatttatgtggtagacctcatttgcctgttatagatgaggacccagggttctcaggaaaaagcaatgtcttcaatctcactaatagtactgccagaataaactattataaagtatatcatacatgatttagattataagaagaaacatttactaatggtgaaaattctgagcattgtggttgcttacctagaaaaatttagtaacttctcttacttctctgaaaattttaagcttattttttatgatgatttaagaatggtcctgcccacaggcagaggagatagactgcatgagctctcaaagttttttctaagtcttatgatactataagttggtatttttatgatctcaaatgtgttcaatttatttccctttcttaaggtggataatattaatgcagctgtgatggatttgaaaaaaaagaagatccgcagtctaagtgaagaggtcaaaataggagcacatggaaaaccagtgatttttctccatcctaaagactgtggtggagtccttgtggaactggagcaagcttgatttatatttgcaagcaactaaattaattgacctgaaaaagcctatcaaatactatcaaaatgtactatgacattgagtccttcactgcttccatcatgtaaaagttcacagttaaagactgaattacagaaagattaaaatatatacatatataaatacataaatatgtatattatttagattaacaaacatatttgttaatttgaatttgaagaaaatcttgattactaattacttagggaacattattaaaatcatatagaaataaattattcctcttctacaa

SEQ ID NO: 1217 - DNA, 12215 bp, Homo sapiens
ctgggcgcagagggccgcgggggctgccgggaaaggcatacgtgcttaatcctggtgcagggggcgagcatggccgctccgcgaggtgagccattggctggggtgtcggcgagtgtgttcgtggagcgcgtcctggggacgactcccggcattatcggccaggttgagtccgctcctggcattccgcggaaagatgggtgggtgccgggcagaggtgtggccacctgcgatggggattgacctccgaggggagggggcccttctagacgtcgtgccgtgggataggtaccttctgctccctccccgccaccctgcctcagatcagcacaaggtccttactgctgcccatctgacagttgggaacatcgaggcctgcagcggaggggggtctcatccaacagcctacaaaacccttatttgactctgtccccagtgagcacccccagctcttgcctggtttcccgggacactagggtggggcctgaggagtggagtggcagctgaccctgtctgtgcccctagtattcccactttcctgtgcggtgcagcagtatgcctgggggaagatgggttccaacagcgaagtggcgcggctgttggccagcagtgatccactggcccagatcgcagaggacaagccttatgcagaggtgagccccgggctgtatttcagcccactttacccgcaggtcaggagaaagggcctgaggcaagtcataagaatcagctgggaagggtgaggcagcaaggagggaggagacccacttggctcttcaggctaatggactagatagtgttatcaaaaagaagagaggttttgtcataataggctgggatttccagcactctccttcccccaaccactcttagcacttagtgaattttaattcagccctctttgacaattaagtttttttactttgactatttttttgcatttttattaacctaaaatatttctcctgcctatttagtggagaaaaagccaaagcataggaaggctttcgcctctgcttctgaaactggaagatgtatgttaacccctgaaagaatcatttaagagtcatagtttttctgctaccttgacagtgcagatgtcattctcctctttggacagacaaagaagatacatctaaagaagggaaataactagtccaagtcttcatagatggctagaggccgagtctggacaagggcctgggtctactgcctccctgtatgtccatgatggcatgaacatttgtatccagacctgggaggcctttcccaggactcagttgccctgtggggagcacagcataacggattgggacaggccaactcagggtggcaggtttcttcccccttcccctcccaagtttcctgtctttccagttgtggatggggactcacccccgaggggatgccaagatccttgacaaccgcatctcacagaagaccctaagccagtggattgctgagaaccaggacagcttgggctcaaaggtcaaggacacctttaatggcaacctgcccttcctcttcaaagtgctctcagttgaaacacccctgtccatccaggcacaccctaacaaggtaaaggacagagtgcggtgcagaggtcagggtacagaagggcttatgctaaggccctcccgtgacttttactgccacttttaccccacccatgccaggctcctgcccaaggccaaatccaggctgacaactcccaatttagctctgcaaagccagatggtagtgacacatgcagcaactaagtctaagcaaacagctcaccggcctgtgccaggggagtttctctaagctcattccaaggggcttgttcctggtcttccctcatccaacccatgtctattcatatctgccatttactcatctgctttcaggaagagttcaacttgcaaggcagggcaggtaccctcagccccacccccatggagtctccctacacaagccggagtcccatcctaagcaactgtggatcaaaactcctttttttttttttctgagacttgagtcttgctctgtcgcccaggctggagtgcagtggcgcgatctcggctcactgcaacctcctcctcccaattcaagcaattcttctgcttcagcctcgcaaatagctgggactacaggcacgcgccaccacacccagctaatttttgtatttttagtagagatggggtttcaccatgttggccaggctggtcttgaactcctgccctcgtaatccgctcgcctcagcctcccaaagtgctgggattacaggcgtgagccaccatgcccagccaaaactccttatttctagatacacaaagtaagacccagagaagggagggatttaccaaagccacacagcttgttagtgtcagagcttggtctggtatttgggtttcctgattcacaggccaagcctcttaaagtctgccccagcttttccctgatttgccccggggttgcccctgatttgcccctgccctgggttggctgagccccaagtttctgcaacatgctttgactgggctccttgccagaggtaggtagtcactgccatcctgcaactggggagggtggacagcaggggctaggtggcactggtgtacctgctaggtaatggctgtaccctcaccatcctcctcttcccctggccaccccacaggagctggcagagaagctgcacctccaggctccgcagcactaccccgatgccaaccacaagccagagatggccattgccctcacccccttccagggcttgtgtggcttccggccagttgaggagattgtaacctttctaaagagtaagttgggcagaatgctgaaggcatgcgtactgggccagggatacctggggaaccaagatgataggaacagtggctgagaacgggtcacatgtcacaggaactgaagggcctcatgaagcagtttttggagccagtgagccaggccagtgagaccaggctcaggtgtggtagtcaagggctggtggtgagtgattggtttccactgcaaagtttacttagcattgccggctctttggttagggctgggatggaaaggtgtcctccaactccccacttgtgtgggttccatcttaccattcctgatatgggccctgggccttgccttcctgtagaggtgcctgagtttcagttcctgattggagatgaggcagcaacacacctgaagcagaccatgagccatgactcccaggctgtggcctcctctctgcagagctgtttctcccacctgatgaagagtgagaagaaggtggtggtggaacagctcaacctgttggtgaagcggatctcccagcaaggtggacacagttatattcctggttgggtgcaatgctctggcctgggcttcccagcagacaccagactctggggacagttctcaacccccttgcccaagtggaacactaaaaggggccccacttagatgacctgttggcaacttagcattgcttgcctagtctttgtggagcagggcccttcttagttgagtgctgcttcccaactggtcatcttctccagatggttggaggcagactggcatagaggactcttaggatgccttccacctaggcattctgagattttccctagccctgcagctgccctccatggatggacttgtatctcggggctaaagaggcaggaaggggacacgagcatcctccctctcctggaaaggactgatgcctccagcactcagtcatttgatctttcctttaccttctgtgtgcccaaccttgtgctaagaagagttcaggaaatgactgtgatgggtgtggtcactgtcaccctaaaggtggggagtcaacacaagcagtaagaaacccaaaacagaacagactcccagcaatgagcttatgtggtgcaggcgatgaggtctcagcttcttagcctggcagccacaaccccttctctaggtggcccagagctctctttttattttacctctacaggtttcccattacctttgagccttagggcattatttatttgacccaagcatatttttttctgttcagtgtgtgtgtgtgtgtgtgtgtgtgtgtgtgtgtgtgtgtgtgtgtgtgtgtgtgtgtgtgtgtgtgtggtctctttctgttgccccaggctggagtgcagtggtgcgatcttggctcactgcagcctctgcctcccgggttcaagcaattctcctgcttcagcctcctgagtagctgggattacaggcatgtgccaccacatctggttaagtttttatattttagtagagacggagtttcaccatgttgcctaggcgggtctcgaactcctgagctcaggcaattcacctgcctcagcctcccaaagtgctaggattacaggtgtgagccaccacgccaggccccttgcctcactttaaagaagcctggctgggcacggtggctcacacctgtaatcctaacactttgggaggttgaggcggccgtatcacttgaggtcaggaattcaagaccagcctggccaacatggtggaaccccatctctactaaagatacaaaaattagccaggcgaggcagaggttgtggtgagcctagatcatgccactgcacttcagccggggcaatagagtgagactctgtctcaaaaaaaaaaaaaaaatgctgggcatggtggtgtgtgcctgtaatcccagctactcaggaggctgaggcgcaagaatcacttgaacccaggaggtggaggttgcagtgagtctagattgcaccactgcacttcagcctgggagacagagcaagactccgattcggaaaaaaaaaaaagaaaaagaaaaagaaaaaaaatttaaaaattaaagaagtccacccttgccactctacccaggctgagctcattttcccttgtcgtttccaggacacattttggccctcagcgcattctgcctcatgctctctggagcagaccgagagagattctctgagacatagaactttcttttttttttttgagacggagtctcgctgtgtcacccaggctggagtgcagtggtgcaatctcgatcactgcaacctccgcctcccgggttcaagcgattctcctgtctcagcctcccgagtagctgggattacaggcacgtgccaccacacctggctttttttttttttttttttgtatttttagtagagatggggtttcaccatgttggtcaaactggtctcgaactcctgacctcgtgatccgcctgccttggcctcccaaagtcctgagatgacaggtgtgagccaccgcgcccagctgagacacagaactttcagtgctaaaaactagaaagtcgccgggtgcggtggctcacacctgtattcccagcactttgggaggcctaggtgggaggatcccttgagttcaggagttcgagaccagcctgggcaatatagcgaccccctctctctgcaaataataaaaaacttagccgggcatggtggcatgcacgtgtggttctcgctactcaggaggctgaggtaggaggattgcttggtcctggacagttgaggctgcagtgaggtatgatcgtgccactgcactccagcctgggtgacagcgagaccccgtctcaaaaaaaaaaaagggaaagctcgggcatgttggttacccttcatgaaactcttttgcgttatctccctagattttgagctccaagggcagtggttctcatacaggggacatttggctgttgtctggagccattttttgattgtcaaaacccagataggggttgctagtggcatcttgtgggtggaggccagggaagctgctacacatccatcagtacacaggacagcccccacaataaagaattacctagcccaaatgtcagtagcgccaaggctgagaaatcccatcctgaaaggaccatactctagctcttttagtggctagtatagtcctgggcatatgaatagtcaagatatgatgaaagatggtatttgtatggactggagtatcaagcaaggctcgacccccaaagggctggaggcgtggccagaaggacagggccactttggcttctggattcctgtggcagggaccttttcctaggactccctggccaatgtggggctatgaacagcactgagtatccccctaagtgaccttggggtgctctgtgaccctcagcggctgccggaaacaacatggaggacatctttggggagcttttgctacagctgcaccagcagtacccaggtgatatcggctgctttgccatctacttcctgaacctgcttaccctgaagcctggggaggccatgtttctggaggccaacgtaccccatgcctacctgaaaggaggtgagccacatttcagcagtgagccccactgccatccctgctgggccctgtttccctatctggacaaaggaaggagaagggtggtcaaggagacccccaaggaccttgcagctctgacctctgagggttcctgggctcagcaagcaacagctggtagggatgatgaatgcatttagcattgaacacgccttgaatcctgacaccaaccctgtgatgccatgctactctgattttaagtcctgccagtcagtgtgggaaccacaatttgaacgcaggctatattggatcaaagctgttgttctgtcacagcctttgtatgtctgtcctacctaccagggatttttacactaaaatatgcatgttgccatggaaggatgccacctttcgactgttggctgcttatccacacatgcctcatgcacaggattctggggtagaagtgggagactacagagttggggctccccaacccccaggggttaacatgactcccctctgacaataatgggtgacctgtcacctgtttttggtatttgatatcttaaccccattctcccagagaatacaattcatggaaatttttacctaacttggcatggggttcatggagctcaggttaggaggcccagaactggagagctaaggcatacttcatcagcttagcacatgacgactgtctctccagactgcgtggagtgcatggcgtgttcagacaacacagttcgtgctggcctgacacccaagttcattgatgtgccaaccctgtgtgaaatgctcagctatacccctagctccagcaaggacaggctctttctcccaacacggagtcaggaagacccctacctctcaatctatgacccccctgtaccagacttcaccattatgaagacggaggtgagtgaggggctatgatgggtgtccttcgtgtgccatgaaaatctctggcaagggtcacgatgtggaggacacctggggctgggtttcctgtcaagcccacttggcggagggtggccccagggcctgcccattccttcctgtaccagggaccaggcctctatgctgactgagcctgggttgtgcgagaaggtggcagagctctccctcgtgccctggggactgtcctgggcccatgagctgatgagagcagagtctgagctgcactgccttatcatttcttcctgcccaggtccctggctctgtcactgaatacaaggtcttggcactggactctgccagcatcctcctgatggtacaggggacagtaatagccagcacacccacaacccagacaccaatccctctgcaacgtggtggcgtgctcttcattggggccaatgagagtgtctcactgaagcttactgagccgaaggacctgctgatattccgtgcctgctgtctgctgtaaaggctgcagcctccccagctctcctctgccagccaccctaaattccagccaacctcacctcctcgggcccagctcaagcccccttccttgctctggaccccttaggtataccctggaagagctggggtgggggaggagggagcgtgaaggtagtgactcctgaacacacccaggtggaaccatctttggggaggagaggcccgtgtgaggggtctgatactccctttgtcttccctctctactcctcgctacacctgagccaggctcttgccaactctgttccagcctatggctttaggctagctgttaaatatgtgacccagcattagctcagcatctgtcagagcaagagaccaggtaatttctaagaacagggttctagcgatgggactgcccatttcctcagctgcagaggaggaaagggaaagggtaggcctgtagactaacgctgtttacacccttgttctgtcaaagcaattaaagatcacttgtgttgaggctgtggggtaatgagcactcagcctttggggtacctgttcctaaagtgggccaaaagagccctccctacatgatgccccagtttttgctttattcctatttcatacagcttctcgggggagtgagcaggctacactccagaacaccggtatgggaaggagtgggagaggaagccagctttggcctcacaggcacagcttgcaagcaggccttgggtctgcccagaggcacagcttgcaagcagccctacagagaaggtgactcaaaggatacaccagtcaccagtgcaagactcttcgctcctgtttttctcttttttttttttttgagacggagtctcggtctgtagcccaggctggagtgcagtggcacgatctcggctcattgcaagctccgcctcccgggttcacgccactcttctgcctcagcctcccaagtagctgggaccacaggcgcccaccaccacgcccagccaatttttttggtatttttagtagagatggggtttcactgtgttagccaggatggtctcgatcttctgacctcgtgatccgcccacctcagcctcccaaagtgctgggattacaggcgtgagccaccacgcctggcccggctcctgtttttcaactggccctagaggaggggtccgcaaaccaggctggcaggccagttctggccatacctgttcatttccatactgtctggctgctttcaagccacagtggcaaagttgaagagttgcactagactgtacggcctgcaaaactgaaaccattgactgtcaaccacttctctacaacatactcaactgttgcagattacagggactcaggaaccgaattagacaattttcatggcgaggagaagcccagttagctttcctaaacgggcaggaagtgtgaaggagggaatctcctgatgccctgctccaggggtggcacacacctgcaagaggctgtcggctgtctgctgctgctgaggtttctgacctgcaatcgtagatcctgtcaccacagactaatcacttagtccactggctccttcctgtgggataaaggtttaaattcatgcaaaagaatctttctgggcttctgcccacactagagtccctatacaatggagttccaggaaaccaccttcaaaaatctcctgggttttcttgcctccaaattttcttcagctaaaaaacaataaagatgagctggaaagaaaaggtctgctaaagggaacccattctacagaagtgacttgcaagagcctatttcactcatgccgtccagtgaaacaggcccgaaagtgatgcccagtgggaacagcagaaaggggagggagtttccagaaggaattgctgtagtcagctgttaagctatttcttcatttcaggatatccaggatattcttaacttttatttttttgagacggagtctcgcactgtctcccgggctggagtgcagtggcgcgatagctcactgcaacctccgcccactgggttcaagcgattcttctgcctcagctcctgagtagctgggactacaggcgcctgccaccacacccagctaagtttttgtatttttagtagagacggggtttcagtagagacggggtgacaggatctacaattccaggtaaggtcaggttggtctcaaactcctgaccttgtgatttgcttgcctcagcctctgaaagtgctgggattacaagcatgagccattgtgcctggccaaggcctttaaaatccactgcaacacagacacagctcaactagtgtgattgcatttattcttataaatgtacagagctgtagaagtgcaagccaagagttctatagagtagtacataaacaccatatggtaccactcctgctgggaggtaagcctggatacacccctctcctcaggaaactgtcacctgcagaacacacagcactcagaattaaggcagtttggccctgggcacattggtggtattttggtatgtggccactggccctaaacaactgaccatttctaccctgcctcactgcactgtcccaccaggtccctccagctttttctacaaggtaacaccctcctacatggggtcagccagctcagaaacctcttcttcagggacagttgcagctgaatatgccagagctgattattacaacaacgatgcagagggccttggttttggggtcctgccaccctcacccctagaagctgctaaacacccaggccattctgccctgaccacctccccaacagagatgtaggtctatacttaccttccacagccacctcccagcacacactgggtccctctacctgtgttgctgtctttctttacactgtgctacatttgatccctttccacatgtgcacttcacctctgcagacacaagaaaggcctggacatggtctctgcagatggggaaggggttctggatggagatgttcttgagctctacaagcatttgcacaaagtgctcagaatgttggccactgcatagagctgcagagtcccattccagaacagagtaaccatctgcctctcttcccaagaccccaagctggcatgactctggtctctgtcctatctctctgctgtgatgctcctagctagtagagtaagtcagcccccagatactgtatattcctctcaaccttccatggtttgagaaaaacacaaagatagatgtccatcaggcactcacaggattaccatcgtaaggatggttgtcagacaaataacaaataaggccgtatctttttattagacttgctcatcttctagtcaccccttgtggtagagcgaaaagagtgtgttgtccctctcatgcctctggtggtcacaggacactgagtaaagcaagagactggatactttcccatgtagaacctataccccaatcccgactattgggctgggaaccctgtctatgcccattcaaagctcaccatgtgggaggactgcttgggcctgggaggttgaggctgcagtgagctgtgattacaccactgcactccagcctgggtgacagagaccctgtctccaacaaaacaaagcagaacgctcaccatggttctgagttaagccaaaaaacaaaacaaaacctgttggaaaaattctagaaagaggcttggtatagagtatagcaagatatactctccaatttgtgggtagggggtgtcacagcagaaattatgcctatttctgctgtttgggctgggggctgaaagaggctgtgtcacacccagaggtctgcttaaagcccaatcctgagtatccagtaaggcccatgctgtgaccagaagaatctggcaatagaatggtccatgctggagtgaagggaggccctctacactggtggactgatttcctcaggcaagggtctaggagctggcttaggtctctcttacccttcctgtctgtaagcctcagtctaggacaaagcccacacagctgtatacccactctcacgagtccattgctacttctcaaaagtttaaaaagtaaacaataggaaggcaccggactgctccctgtagctccctctgctggtaataataaaaactgcaggcttctggggccagccccagtaccttcgacctaatctttagctcaaagactgggtgaagaaactcacccagaccaaggaaatacaaataaataaatatgaacatgtcagagcagtttttctctaactagggaagggcaaaccagaatcactaaactcacccggacggttggaccagttggggatgccccaggtccagggattctggaagccaggatcctgctgtatcattaagcaacctgctatgatccctgtcatagttagacaggtgcaacctgaagagggacaaaaggactcactttatgctgtcttgaaggtcaagcctgcaaaccatcttagagctaggaagaatagagcaaacggaatttctcgaactggtctcaaacagtttcttttttggattgccagctataataaaccataaagtgcta

SEQ ID NO: 1218 - DNA, 4784 bp, Homo sapiens
aatcggctaggagcagcgagcggcgcggctgaggcgcggcggccccgtggagcagcgcagtatggcgggcggggcccgggaggtgctcacactgcagttgggacattttgccggtttcgtgggcgcgcactggtggaaccagcaggtgaggtcagccggcagctgcccccgaggagcccttcgggatctacagtcccgacgttcagccggcctgcctcgtcctctctgcttccccaggatgctgcgctgggccgagcgaccgattccaaggagcccccgggagagctgtgccccgacgtcctgtatcgtacgggccggacgctgcacggccaggagacctacacgccgcgactcatcctcatggatctgaagggtgaggtggtggcagagttagccgatgccccttatttcccttccgcgtgcctagtccttgcgctgccgttatcttcaagaccctcccaccttaccgagctccaggaccggagatgaggagctgagcacaacatgccaacactcgaggggcccacgacagttgctcaagagccatttcgggaataggctgctaggccctggagacagtgaggacttgaactgcagcactcctgtcagacccctggatgtggttccccccgcgtcccacagctaatgactaagctgggaaccgaaagatggaatctagattctcctaagccaaggtttttcccccaactagtgtatatcccagaaagcttggaagagccaagtgctggagagatggtgacagcaggttgtcaggtgatcagaggaaggttagctagaggggaagggtgcccaggctttgacctaacattgtctctgttatttctgtacaggtagtttgagctccctaaaagaggaaggtggactctacagggacaaacagttggatgctgcaatagcatggtgtgtaactgatgtatggataagggtggggatcgtgtatgtacgcagaacgctggataactctgatcagagtgcagtttctttgatcaatctccaaactctttcaggcaggggaagctcaccacacacaaagaggaactctatcccaagaacccttatctccaagactttctgagtgcagaggtgagggcctctgtcctgaactttttaacccggtgccacaacccgagggtctccataggggcaggtaaacggggattttaatcattttaagtgtcttagaatgatattttgggaaaaagcactccttttcctaaggactgcgactcggtgaacagaaaggaggctatgcggtgtggccagccaactcaaggaggacgaagcaacctttgcctctaaactgcctggaactaaatgtcgatttttctgacccctcccagggagtgctgagtagtgatggtgtctggagggtcaaatccattcccaatggcaaaggtgagacttctccagatactgatggatgggggcttgggtagagcagaaacatggagaaaggtacatttcctctgcttgtcttcaggttcctcaccactccccaccgctacaactccaaaaccacttatccctacagaggccagcatcagggtctggtcagacttcctcagagtccatctccatccccggagcatctgtatgattcagaagtacaaccacgatgggtatggggaccccagaggctttgaggcaagaaacatgggtccccaccaatgcaggatgaggctcttgaggccatcttccctgcccttccccaggacaagaggctgaggagttgagggaagagatgtaagtcttggatcatgtttacttgtggcagggaagcaggtcggctggaggcttttggccaaggggaaagtgtcctaaaggaacccaagtaccaggaagagctggaggacaggctgcatttctacgtggaggaatgtgactacttgcaggtagtggcgtggcaatgtgcactccagggtggaagctcttctcatcctgctaactatcttttgtcactcacccccgtccagggcttccagatcctgtgtgacctgcacgatggcttctctggggtaggcgcgaaggcggcagagctgctacaagatgaatattcagggcggggaataataacctggggcctgctacctggtccctaccatcgtggggtgagtggaacttagagaagtaaacagtcacacagtggggagggagaaatcagaatcccagtgggagagctgcttaatacaaactactctttcttcaccaggaggcccagagaaacatctatcgtctattaaacacagcttttggtctcgtgcacctgactgctcacagctctcttgtctgccccttgtccttgggtgggagcctgggcctgcgacccgagccacctgtcagcttcccttacctgcattatgatgtaagtctcggtgctcttgttctgactgcggcaggctacagggcctcctcatgctcccagtcagccgctgtctgttactggctctgttcttgaggcccgagcttgaactcagctgtgatgtggcctctcagatcacactgtcctatgcttgtccagcctggggtcaaacatacccctgattcgtcccctgggtctctctggtgttaatattctgcctccacacattcttttccaggcctgaggccaagtgcccatcttggtgtcttcttacaggccactctgcccttccactgcagtgccatcctggctacagccctggacacagtcactgttccttatcgcctgtgttcctctccagtttccatggttcatctggctgacatgctgagcttctgtgggaaaaaggtatgaagctttgtaaggggttgggtcagtgctgagaaaatgtcctataacgtgttctcttccatctctttaggtggtgacagcaggagcaatcatccctttccccttggctccaggccagtcccttcctgattccctgatgcagtttggaggagccaccccatggaccccactgtctgcatgtggggagccttctggaacacgttgctttgcccagtcagtggtgctgaggggtatagacagagcatgccacacaaggtgagagctgttggtccttaggagtccttgtcagatttttgtctcatatccatcttcccctaatttctctggggcattctaatgatactgttccctccccaccccttaaaaaggaaaaaaaaaagggctttgaatatcttgatccagctgatggcctgagaacataagaattctgtttcttattcatgcagccacagactaatggtggttttggctttgttctggcagccagctcaccccagggacacctccaccctctgcccttcatgcatgtaccactggggaagaaatcttggctcagtatttacaacagcagcagcctggagtcatgaggtcagtgtaacggttgctcctgcccttcttgccaaccgcaaccctcccttgacttcttacgcacttaatggctgttctctgcccccacagttcttcccatctgctgctgactccctgcagggtggctcctccttacccccacctcttctcaagctgcagtccaccgggtatggttctggatggttcccccaagggagcaggtatgtaggaggtgaagaaaactgagatttcaagtatgggagagtttttactatctccattcctggattaaaagtgctgaaaaagtccacagttaaacattcctttattcaccctatggctcccaagaaaagcattcttcctctggagtactggtgtactaaggggacaatacaccaaatttgttgagtttacaatcaagtctactaaggttggacttccttatcagtttggcagagtcccagggcagaataatcatccatctacaggtctctgtttcctctccctccacagcagtggagagcatcccagtgtttggggcactgtgttcctcttcgtccctgcaccagaccctggaagccttggccagagacctcaccaaactcgacttgcggcgctgggccagcttcatggatgctggagtggagcacgatgacgtagcagagctgctgcaggagctacaaagcctggcccagtgctaccagggtggtgacagcctcgtggactaaagttcccagtgtgggagaaaggagctagtttgcaataaaaacagctggatgcaggagcccagtgtcttcatgcagaggagctcaatgtcgcgggactagctacaccaacatatgcactttttacatttagaaacactgtgattagaccacagaacaataaatatgtgccatcagaccaaaaaaaagtagagaaaggagctgaactccactctcgatgctacttacagaggacatctgtaaagtcttcataaaagaccttgaatgatgcctaggatggcagagcccctgggtcctactccatcctccagcctttgtccttgtcctggcctcctgctctccagatctgtaaactgggctcaaggactgtacaagcagagtacaactacccgcctccccggtgccagggcgcctgttgggtttggtcctgtgtagatgattcccagagtctcattcatccagctcctcttcagacagaaggtccccatggtcagacagctggtctgcattgctggtactggttgcatcatcctcatcctcagagctggcttcacaggcagtgtggaagagctgcatgagttctcgaaaatggtgggaaacctaagaaaggaggagggctgtattcactgatccttagtaacatgttaacatttatgaagcactatatattgatttgcaaaatcttttgtttattccacaca

SEQ ID NO: 1219 - DNA, 30039 bp, Homo sapiens
agtgaggaggaggagcgagcagacttgggtggctctgcgccgcggaggccacagccgcagacttccccagtagtaccgcgccgctccgccccggagtgacgccctccgcccatgggcctggccgagggcaaccggcgggcggcgcggaggaggcggcgacaggtggcgcgcagcagggccggagccgggccgggccatggccgcctcggagcggctgtacgagttgtggctgctctactacgcgcaggtgagcccgccccgccccgcgcccgcacccgcacccgcggtgcccccagcttcgcgcgccccgcgcctgctgcacctggcgccccgcgccgctggggccgcgtagccgcgcgcgcgggcgcgcgcgcgcagggcatgctccggctccgcacacacgtgtgtgcccccagcccgccgggtgcctctggcacttatgccttggggacagagctcgcggtcgtgcacttcatagcaacccacccccgcgagcaggaccgtgcagcctgagtctttcttgctagaggagagtggcctgggccgaggcggccggacacttggcctttttacaaatggggaaactgagacctggagagacctggagactggccaggaggctagggggagggggactcaatttgtctatgagctgcctctcccttgggcgcggcctgattgggtggtcgtggccaacgggtctgggggtgtgggccaaggtagggaggtgtgtggaaggggaatgctcccacttcaggtccttcttgagttgcatccccccacaccccagcgaacaggctgtgataagctcttccctgacttgaaatgacccaccccaccccacccccattctgaggggtagacccaggacctctctaggagcagaagaaaaggttttcctctggatgcccagggtgagggtgggtccttgaggccctgagggatgtctgaaaaggttggagggaggcccgttcctcctgagctccccacccatctcagaaaatacttcaggtggagtcagaaggtgaggggagtgactcagacgtgggtgtcccatcagctgagaacctggtatcactcacaccgtctcacacacatagtcccccattttccttctgtacccacagcagggagggatcccagggtaacactcccctccccttcacccagcacctccctccctgcacctgcctggcatcatgctcctggctcaggtgtgccctgggcacaatggaccattgtgtgccctgaacagtttgtcagtggggggaattcatgctcagacacgctggccctccataaggaggctggcccactgtcttccacggacctggagtccaggccagaaggaccacagcctcttcagtccgctcaggttgtgagaggtccaggccccagcaggaggccaggcatggagtagagtccctctttggtataactcagatcgaactcgacttctgagcctctgcttcctgcctgtaaaactgacacagccctggccgggcacggtggctcacacctgtaatcccagcactttgggaggccgaggcgggcagatcacaaggtcaggagatcgagaccatcctggccaacatggtgaaaccccatctctactaaaatacaaaaattagccgggcgtggtggggtgtgcctgtaatcccagctactcgggaggctgaggcaggagaatcgcttgaaccagggaggcagaggttgcagtgagccgagatcgcgccactgcactccagcctggtgacagagtgagactccgtctcaaaaaaataaaataaaaataaaaaactgacacagccctgacctcaggggcttcctggactctgtggagaggtagccattatagctggtccagaccagagaaggctcctgttttcctggccccattgggtcccctcgccccagcttctctgcctgcatccccagtggttgtgaaggagcagagggtttgaagagaagcctaccctagtcctccttcctcggactgccccatagctatgggcaggctctaggtgcatgggcaggtaaagggggcttaaaccagctggtgagtgtgagggatgttaatgataggtcttcagcctgggtggcaggctgctgggagtgtcttggtatctcccaggacagtaactccagcatggttgcctcctgatgccccatctagctgagctctgtacatggccaccccccatcccctcaggaggtggttatggctcatatctgtgctgagcctccccctcccggagctcctcacctcgcagggcaggtatggagcataggctggcaggttgtagctttggaagcctgagcagacagtgggcagcctggggccaggcaaacaaatccaggatgtaacagcaaacccccaagccaggcggggccaggctgcctgggaagaggaagctagggccagcctcccagctcgccttcctgcccgcctgctcctgaccctgatcctggaacccccaatccagggaggagtaggctatgcaactttgagtcctgttagggacctattgtgtgtgtgcttggggagggggagtgcaaggtaaggggcagagctgaaagtgggtgtttagagaccctttagttggccagccacccagccagcaacacctgcacccctcccttcagcagtgagagctgacatcagctggcaaacctgtttccccagttgtgggtctgggtggggatggagaggggggagtaactccttcctgcccttcctcttccttaaagaccccaggtttagacccacccaccccctccccctgggggcccggctcaactgggggcctcatagtgagggagggggctgtgggtggctgctgagggaagagggaagggtcagagcatcccaggacttcactcagttggagctccttagggccctggtggggaaaccaaggcagggtcctactacgattgtcagacctcacatgcagtaggtgctccttgggtattagctgaatgactggatagaggaggtgggtcccatggcagtgaccagtcaggaagtcaccccagaggaggctgagtttgggctttgaaggctgagaggaagaaacagcaggagcagtgggacaagaagcaaattgtcaggagttggggcagggcagagctagtcaagcaggcctggtggacaggtgggggctcatctagaggactcagagcccaccagagctcccccagggtaggcataggaagggcaggagagtcttgggggactggggacagcacctgacaggctggcggttgggcagcccataaaagttaatgccacatagcatgcagatgagtggcccctgttcaggccggagcagcagtgatgttcagcaacccctccagtgaatggggtcacagagtgagggggcactgaatgtggaagggcactcagggtcacaaagttcagggcagaacaaaccctcaggtgacaggagggagcagaagctgacctgtccagctatgccactgaggcctcagaagggttcagggaggttaggtcaggctggaggcaacctcgtcctgcctacacttccctgagagttccctctccctaactgatgatctctactgcctctcagaaacctggtcaggccctccactcccccggtactttacctggtcatattcctttttttttttttttttagacagagtctcactctgtcacccaggctggagtgcaatggcatggtctcagttcactgcaacctctgcctcccgggttcaagcagttctcctacctcagcctcccgagtagctcagactacaggcgtgtgccaccacacccggctaatttttgtatttttagtagagacggggtttcactatgttggctaggctgctctcaaactcctgaccttgtgatctgcccgcctcagcctcccaaagtgctgggattacaagcgtgagccaccgcacctggctttatctggtcatatcctttttgggcttcagtttaccttcctgaaatgggtaaagggaaggtggagtcacttctttggtgcttggtcccctgcctctattaccaaggcacctgaaggagaagggcctgtagtgatagggagatgagcacacagcccaggcttgggtgggcactggtgattcctggagttgttatgacaactggggagctgatggggaagtgtggggtccccgtagaaacagggtcagttaccatggggtctatggggaccctagaaggaaattcccattttccttagtgatagtaaaagggattggtcagctcttgagccgcttgcttgaacctacttccattctgtggagtgtactttcatttcaataaatctatgctttccttgcttaaaaaaaaatagtgtccaggcgcggtgtttcacgcctgtaatcccagcactttgggaggctgaggcgggcagatcacgaggtcaggagatcaagaccatcctggctaacacagtgaaaccccatctctactaaaaaaaaaaaaaaaaaaaattagccaggcgtgatggcgagtgcctgtagtcccagctactcaggaggctgaggcaggagaatggtgtgaacctgggaggcggagcttgcagtgagttgagatcgcgccactgcactccagcctgggccggcgacagagcgagactccgtctcaaaaaaaaacaaaaaaaacaatagtacaaggggatggtcaggccctggggcagggtgggtgtcatggagatcagaaggtccaccctttcagcaccccctctccaggtaagtgggagagactggcccagccacccaggcactcaaaccactatcctcagttgtccctgccccagcaaagtcccatcttcctgcttcatcccatggcctaacatcctccaagcctgacctccagtcctggtgatgtagccagaagtcacgtttagcttgacattgtcctccccgtcctgatactgaatggggggaccccctaggcctgggataggctattccacataaacaccaccctgtcccacttctgcttgtctgtccctgaagatggagtgctcactaccgcccaggcagctctgactgagaggagtcacccactcttgagctgtgctcttctctcccttcctgctcctagctcttccctggggtccattaatgcctcttactgtcactcacagagggggctgggggttgttgcctggaattcagggagctcgggcaggccagagcccctggatctggaactccactcaccttaccctgacctcgagttgggtaggtgtggctggagaacttttacccaagaagcaaagggatggttttaaagaggttaatgttaagtaacaagctactgagagttagaacggggactggactccggaacccatgccctcacctgattcggttggtgagaggcaccagacaggaatgggtcttacaaagggtgctgatgcccctgatgggggcattccagcagagcaaacaagagcaaagcacaggcagacctgtgggggtagagacagtgattcacgcccttgggcccaggcatccagcgggtttggggtatggaggctgcaggtgaggtgggcaccaccctacagggcctcagatgtgagcttgtgatagggcatgtgactggctgatcaagccgtgatggtgacagatgtctactcgaggcccattgtgcaatggccttggggtacgtcaggcagggtctgggagcagcatggtgtcaggcagctcaatgatccctgtcagcttggcaaacaaggtgtactccctgtactccccaccaatgtcacaaccaccagccctcagccctccaggttacttcagaattccagaggagtggcagttccatgcccacccagggactgtttgagcctaagcagccctcgggagcccctcacccccagcactctcaagtgccctcacagctagttgggcataagttggggtctctgtggtggtgcacatgagaccccctcttcccagggacaccggccttccacattcccacaaccttctcccctgctgcaggacctgggcatcacttacctatggaccctggagagggcttggcaggtgtggctgctcccgacctgccttcagtgggggacagggttggggccctgacccagttaggttggggcaaggggctggactgtccctgacccgtgttcctgctcagagctggcacaaccgaccaaggcagaagctctgagaggggcatgggaagcctgagcatcatggccactcctcccaggccctggaccctcacatgcagcactgccaccatgctctcgtcccctgccattctctgccctctgaccctggctccctgagggactcccgtaccccgacacattgcagtctcaagccatggggcctaggtcagagttggcctgaggtcttccagggagaaacagtgagacccagggaggcaggacaggcagccaccccacccctgcctaatactgtgctttggagacctcgtcatcccctttcagagcccctgaaggctgtcttgattgtcccagccctgaacccagctcagcccaatctgctgaaagtttacaggactggacaggccaagggtgtggttctagggacagaaagtactatctacatactctaggagtatgtagagattgagggacccacccctgtgctgggaaggctgatcaaggtgatggccaccaggagggtgggaggttcctgctcaagtaccaaaagcccaagtcacacaaggcagtggggcatagggtgggaaaaggcctggataggaggatgtgaaccacagagggggagaggtggaagctggagaagcaggttctggttggaccagcagcctggaatgctgctcagcagttgagcctttatggggaggggttagacacggtcaaatttgggctttcaggtgctcagtagagctgcagctggcaggaagactcacattttgagtgactagcttgactgaggggcagaagagaggaagacagtattgggacatttttgaaggcagctaggggtctctgtggggccactgaggcaaggatcggggcccgcatggtcctcatgggctggcttgctagcaatcatgagtggtcctggcctagaactaaggtctggcttttagcatcctcaaaggtacactgaagacaaagtagtagataaggcatcccctgtggggcctcctgtttccccatctgcaatgggagaggttcagaagaaatggtccagggcccctggccacctctgctgtctcaggatctgggtattttgggctccttgctgattgttcgggaggaggctgccagcaggagagggtggagaggtcaataaatgtaactgacagacaaaatgtcatggttgtgtgggtctgcaccatggtggccctggcacctctctgagttgtctgggcttcagatctgcactaaactgtaccagggagttccccaatcacagggtggacggctgctctgcctaggttttttggggatctggctcaggtctgctgcagtcaggcctcttgccctggggccattcaggccttgcccgtggtctgggcccataggctgcaaaaattagccatccatccaaagatagttctggaggtccttgggtatgaggcccatggcccctggggagcagcctgaggcctgctgagtgctgactgtgatgtgtcccttgcctcttcatccttttccactctagctccccctgtccacctctctgactctaggaaagaaggctgccttttggactcagctggttaggagctccatatggggccagcctggaggagctcctgtataagccacaacccacccctggcccctgggaggggcttagagattagagcagatacgggctaggctaggatttatcagctgtgttcctgagcgaagagaactgcagagttcagatgaggtggccaggacatggcgggcggcggggcgggacaaaggtatggctgagtcttctacatcgacccctgtggcctgaggccttgcgcgcaggtcagggagctgtgggtgccttaagtgaagggtactgcagcagcaggatcagaaccctcacctggataagagctcttccaggcgccaacctcatgcttgtaaaactagtcttggcccacaagccccacccaggacaggtgactccacccctctgtaacaggtcccaccctctgtgcaggccaggtcgcttgcagcctctctcactggggcccagggtgccccggcccccccacatccctgcggtctgccgggaggaagcggtccccctcccccaccgtgactctgcgcttcctgccccagccccggggcgggaggagacatttcccgttcacaccaaagttttcctggcagcgcctagacctgggcttagccactgcccctcttgcccatggaaccagctctggggcctggggtccaggtaaccagcaagggtgggtggaggttcccggggcaaggcagggccgcacatgaggatgtgcgcatgtctgggtctgcctgtctaatggtacacgtgtgtcctgggatccacagttaaagaaggctactgaaggtggtggctgctgggctgggtgaagatggcagatgaggacccagcccaaggctcttggtagggggtggctgctgtgtgggacaccttctccagccctagcaccagtgtgggccacagccacaccccacttacgcccctcccctggctgtgtcagacctgcctaggactgcaggcattagggaggtgggagcagaaactgggaggctgagagaagcagtggggtgcctggaaaagtggtcagtatgtacctaactctctgatgctgaccttccaatgtcctgccctccctcccccgtcccccactccccttctccacaccctccactctgcctttaaccccttgtccatgccctctgtccacctccattcattcttcgcctctgtctacatccccttgtccctgccctgtttactgcatccctcctgccccccaccactgttcccctgttctgcctacagaaggacctgggttacctgcagcagtggctgaaggcctttgtaggtgccttcaagaagagcatctcactgtcctctctggagccacgaaggtgaggctggatctgcactgagggcagggacagagcagggagattgaggggtcctcagcacccgtgtctcccctttccttgcaggccagaggaggcaggtgcagaggtcccgctgctaccactggatgagctgcatgtgctggccgaacagctgcaccaggctgacctggagcaagccctcctgctgctcaagctcttcatcattctctgcaggtgtctctgttgtccactctacaagcaggggcctagaactgtgggccagagggagaggggacaaggaggggcatggtgtattattgtgacctctctcatcattgactcccccaggaacctggagaacatagaggcaggccggggccaagtgctagtgccccgagtgctggcactgttgaccaagttggtggcggaggtgaagtggcctctaccttggggggcagagggtgtatgcagggaggcaggcggtagccatggcggggctaaccctctctccccacacctacagctgaaaggatgcccaccaccccagggccgaggcacgcagttggagaatgtggccctacatgctctgcttctctgcgagggcctctttgacccttaccaaacctggcggcgccagcgcagtgggtgagacccagcccacaggaagggaacccagaggagggtggggagaggatggccgcgctgggcccaaggaggggtgacggccaggagtggtgagagccgggctgatgtacttggcctcactgcccccagggaagtcatcagctccaaggagaagagcaaatacaagttccctcctgctgctttgccccaggaattcagcgccttcttccaaggtcaggccccgcccctgcccccacttggctccacccccaaacctaggccccttcctgtcgttccttgatcctgccatacacaggaaccacttggtggtggctgcatgcaggactgggagaaccaaagaccaagcaagagtttagggacagagacaagagaagacatcttgggctggagcgagggcctcccatcaggtggaggggtggggtcaacctgcctacccagatttctcatcctctttccccgccatctcctggatccttctagccacttgtaccctactgtgatcttaaaactctctggtccaatccctttgtccccatagcctccacgcatctccacccatcccggagacacaggaggtatctccacctcctgttccctggctgctggaggatctggtgcccaggacagctgtggctgcctgttcacaggtggtcctgtgaacctgttctccctggtgaccctccacccctgggtcccctctctcctctcattggagggagactggccaggactttagataggctcagggtgggatatggcctggacagaggtgggcagggctgtgaaaaggtggtgacctattgggatattaaatgtctcagtgatgcccccatggagctgtgggcctggatctagagttggggcagcaactccaggaggggaggcacccctagggagctcctcgactttattttcccatagcctgggtgctgttattaaaacaaactggatttcatttctcctcccatcatatcccttgatgtcaacctgacgtcctcaagatgaaatcctactcctcccacagcctttctctccacttgccctgctgctcagcctggcttctgtcctctcattcccagactgctaccactgaccccacctcagggtcttagcccatgctgtgccttctcccctccaactgcattctcaggtctcccctcaaaagccccatccccaaggaggcctcccacccatccagccggaatcaagccccagccctactcttcctcctctgccaggcatgtgacccggggctagtcccttctgccctctgagtttcagtccctggcctggcatcctgtccagttttgctggcgcagggccaggtgggcctcctacgtattaggttgtgaaagcccctagaagtcccaggcaaaggcatgggcgtggggggaggtggcatcagtatagtagatacagcagagtccccagagcacggcatgggaagcaccaaccgtcacagggcagaggcagcaagagatttgcatctgagaaactaagccctggtcatcatggggaagtggaagggtatgtgctcatgctggggccctcactttggggcttaaggatctgggaagctggctagactctcagggctggtctttgtcacccttaagtcccccaaagaagggttgtccctttcaggccctctactatacagccataactccttagatgccccccagggcagagccagctcttatccctcacactggatcttttacttggcccagctccctctcccctccaccccagggcactcacctcttgtgcagccccctgggtccatagccctgcaaccttggtgacattaccctgcccacacccccctacccagagagcctacagaatgcagaccacttgcctcccatactgctgttacgtctcatccacctcttctgcgccgtcctcgctggaggaaaggtaggctgggaggtgagcctgtggactagagagcagctctttcagtatctctctgctgggtgagccccttgcccactgcccatctctgtccacacctgcaggagaacgggcagatggctgtaagtgatggctctgtgaagggcctgctgagtgtggtgcggggctggagccgtgggccagccccggacccgtgcctagtgccactggctctagaggcactggtaggtgcagtccatgtcttgcatgccagccgcgcacctcctcgtggcccagagcttcgtgccctgcttgagagctacttccatgtccttaatgctgactggccagctggtctgagctcaggccccgaagaggcccttgtcaccctccgggtcagcatgctcggtgggtatgggctcccaggctcttggggaaggggcaccatgagggaaaagcctaagtgatgatggaaggtctggatagggcagcataggaaggaaggcttaaggctgcctagaggggtctgggcagggcctgacccttgacccttccacagacgccatccccatgatgctggcatgtgaagaccggccagtgctgcaagccaccttcctcagcaacaattgctttgaacacctcactcggctcattcagaacagcaaggtgggtagggcccagcctgggggtgagggtctggaagccagaggctaggggagccacgcataggtgccaggctgctgctgagcaaacatgggctggacagagtcagtgttttgcagctggtgggatggcttgcagttcagtgggagggtgtggggcatggacaagggcccatcccttggggcctctataggactgggcttgaggcttaggacatctttgtgccccatggaagcggggcttgttatggaaggaagggagctgctctggtgccttgtttccctttccgtggccccaagtacaggggctagaggagggcaccactgctttcagatgcagtgcctgctcccacccgctcatccccccgactgcccatctgagcagggcacagggggctcagcaccctactcttccctagtgccgggcagggcacctggcagctgcccctggtcctgctctaaccccaccctctcccatcttcctcctctcttctttgcctcctccaccctgtgcctccccacttccccacagctgtacctgcagtcccgggcgccccccgagggggacagtgacctggctacccggttactgactgagcccgatgtccaaaaggtaccatcctggggctgaccagctcagacaccccctgggactccctctttgagcttttcctgcactatagctggggaaatgagcagatgtgtgtaaggcctggtgtggtctagaaatgggtgtgggtcctccatgctgtctcgcctgccttccaagtccccatcctagggaacaggacagaaggtggtctatcccctgcctggtgtttgattgggtgttgggggtctggctgtgccaagctggatggaaccttcgaaactcagccacctacctcatttctcagaaggggagacagaagcccagacactcaaggatttggctatagtcacagagaaaggggtctccctcatggtgccatttctttctgtagattcttgcacccaccctcagcgggtcactgggtgtcccccagcccctgatgatgtgatccctgattcaccttgcatgtgggctgtaggaggctgcagggtgtcagctggcagcttcacagcgggcaccctttctgggggctcaacctgtgggccccaacctccatagcccctaccctggctctgtcttcatgaggtaaccctatgtgttcaccgcatgtggtcattttcttagagcttacacgtctattcatctgcaaagcaggcagggcaaagtgactcccctctgtttttacagatgaggacactgaggcctggagggggaggactgatgccttaggtcacttggggagtcaggcaaagctgggaccaaaggccccatggagccgaatatgacctagtccctgctgagaaactctccaagccctcccaacccctgaccccctcagggtggggcaggagaggcagcagcatgcctctggctgtcaggttcagccaggctgagcctcagtgcccccacctggatctagggggaaggggcaaggtgggacttaaaggtctcgaaggttcttctggttctaacatcctgtgattgattgtccctaaatctctgacccctgtcaatcactgtgggtgatggggcacttgctggcctgtctgtactcatgtgtctagctttagggagacaggttgggggtagggccctaactccactagagaaagggggactggagggtgcagtcagagtgtccaccattaatctgtcccagtgaggcccttcccagcctttgttagagtgggtcttgctgagctgctcagagagggccctaggtcatgatagggtcacagcagttggggcaaggagtagaaggcctggtgctctgacagagttgctgatccagcacatgccacatgccttggggtgcttggctctgcaccttttttactgcagggggctgccagctgtgacaccctggcccctgcctctcctgatggcccctccccaccccaaggtcctggaccaagacacagacgccattgcagtccatgtagtcagagtgctgacctgcatcatgagtgactccccctcggccaaggtgaggctgctgcactgcagctttagtaggggtgcggggtggagttcaactgaccatatccccagaacaggcctggccggtggccataagcatcctgctccctggagcaaagcaggcgagctgggaggtgactgccctgccctaaagctcactgggcaggtgtggtcgccagtctgtcctgggagctgcatcttctctgtcagggctggatggggaatggacacttgtaggcccacctccatctacagccttctgagatgtactcacgtcccccccatccctctgcagcccactgcccaccagcactgtcacccagaggcagagctacgcaagggaaccccaaaacatgatgcccctccagagtttccagggggtctgagtttgccctccggcccatgtatgtgttcacttcttccccatactaccttacacaggaggtgtttaaggagcgcatcggctaccctcacctgcaggaggttctgcagagccatggtccccccacccatcggctgttgcaagagctgctcaacatggtgagggaaggggcttgggaccagggtcccaaaggcaaccagaactgagtcagggttaccacagatggtgagctctccaccctgggggaccgtattgactgcggccagtacatactgttacctgtagcctggccatgtctgttagtgtcactggaatgaggattctggccctgtaggggtcctggaagcaactgcatgtgagcaagccccaggattatcttaggaacatgcagttaggggttaggccaacccaggctgaaaactaaggttgagggattaacaatgctgaaggactcttagtagtagtgactgtcatctgtgcccctctgactttcctgagcctcacacacaacctgtgggcaggatggagtagatcatgttgctgactgctgccgtaggcaagtaaatggagccagaaagtcccactgttgacagggtgccacagctgaccagggactgtcattctctccacccacaggctgtggagggtgaccacagcatgtgcccacctccaccaatccgcaacgagcagccggtactggtgctggcgcagtggctgccgtcattgcccaccgctgagctgcggctcttcctagcgcaacgcctcaggtggctctgtgacagctgccctgccagccgtgccacctgtgtgcaggcaggcctggtgggctgcctgttggagacactcagcacagggctagccctggaggcccgctgccaagagcagctgctggcactgctacaagcactgggccgtgtatcaataaggcccatggagctgcgtcacctgctgcgcccccggccaggattggactcggaaccaggcggagctgaggctggaaaggcccgacacgcaggtgctgtcatccgcacattatcaggcatggccaggcaccagggtcctgcacgtgctctgcgctactttgacctcacgcccagcatggcgggcatcatggtaccccctgtacagcgatggccagggcctggcttcacctttcatgcctggctctgtctgcaccctatggatacagcacctacccctgcccccacccgaccactccagcgaaagcagctgtacaggtgggtgactgccaggggccagggacctcctgccagggtgagcaggaacaagcagacataactggcttgcctgcccccagcttctttaccagcagcggctcagggtttgaggccttcttcacggcggccgggaccctggtggtggctgtgtgcacacggaaggagtatttgaccatgagtttgcccgaagtgtcctttgccgactctgcctgggtgagaccccatccttctcatgtggcccagtagagagaggggtgctgagtcccaagtatggcctaatgtgaggcttctgttctagcactgcgtggctatcgtccatgtgcctgggcgccggcccttcagccagaacctggtccatgtctacaaagacggccatctggtcaagacagcaccccttcgctgcccctccctcagtgaggtgtgccaagcaaggtttggggaggccttgggtagatgggaggacttggaacacagtgggcaggtgtagcctggagcccttgtgtcccgtgctgccccacaggcctgactttagccactggggtccatgcagccatgggggtcactgtgaggaactggttgtaggcggagccccaggttctgctgtgacctgaccgctcccccaaccccggccccacagcctttctcctcctgctgtatcggctccgctggataccgcacaacgaccaccaccacagggctgcccacaccaccagtccccgccaccctggcctacactcaccccgccctcacccgctcccagtcagtcccagcctccacagggcttggctgggggtccgggctggtggcccccctgcaggagggcagcatcgactctaccctcgcaggcacccaggacactcggtggggcagccccacatccctggagggtgagctgggggctgtggccatctttcacgaagccctgcaggcgacggctctgaggaccctgtgcaccctgggtatgcagcattctccatctctgccacagccccaggccagaagctaggggtccggggggagaaggcatctctgggggtctctcctgtggtcaggcagtctctggatggggtttggccagaggcctagcaaggtctgaagccccctgcccacctcccagggcccaatgagacggcacccttcaagcctgagggggagctgcatgagctcagcaccaggctgctcctccattactcacctcaggtatttgggggccccaggggagtggttggctcgactgtgctacttccccggctcccacactctgcctgccaccccctcctccctctgaccctggctgcctgcccattcccctatccctaggcttgtaagaacaacatctgcctggacctgtcccccagtcatgggcttgatgggcgcctgacgggccacagagtggagacctgggatgtgaaggtctgtgagcacgtgtgggtggtgtgtgcaggaggcatgaatatggggcacatgtgtgttcggagtcagctggggagcagcgctgtgcctggggaggatttggacagtccagctcaagagagcaaaacttcctttctgggtggtctgctggggtggagtagggcaggaaactggctggaaggtccccctcactgccatcctccttcccccaggatgtggtgaactgcgttgggggtatgggtgccctgctgcccctgctggagcgagtagctgcacagcccaaagaggctgaagcaggtccagctgaaacgcatgacctcgtgggtcctgaactgacctctggtcacaacacccagggcctggttctcccattgggtaaatcttcaggtaagtgttcctggtgcctatgttgtggagagggaatcttggcatggtaggggggtggaatgcccaaggtctcctggccactggcaggcccttgacacacatctgtccccttcctgatggctggcagaggaacggatggagaggaacgcagtggctgcttttctgctgatgctgcggaacttccttcagggtcacatggtgaaccaagagagcctggtgcagtgccaggggcctgccatcatcggggccctcctgcgaaaggtggggcccggtgggacaggcatgggggttaggggtatggtcagcctgtctgaccgaggggactgagtggggaaccctgtcagtcatgaagaacctcctgggagagttgccacttgagtggggcctgaaaggccgagcagggttgggtctggaggatctggggaaaggcccagcacaggtcggggcagggacccgcacagcaggcaggaggcttgcgtgtcagaggcggcaggaagcccccaaagggttctgagcaggctggtggccatgtttgtggccgtcatggctgtgcagggaagagtggcagctgaaaagctcagacagcagacaggcagagcctgagccctcactccagctcctgtcttatcccaggtcccaagctgggccatggacatgaacgtgctcatgtccgcccagctgctgatggagcaggtggcagctgagggcagcgggcccctcctgtacctactctaccagcatttgctcttcaactttcacctctggaccctcagtgacttcgccgtgcgcctcggtaggtgtgaggacctgagcaaggggccggccatagggcagctgagcactgagaagttagaactctgctctgggggatctgagggactcacctgttaggaatccagaatgccatggggcggctgaggggactatgaccctgccctggaagtctgacaggcacatggccctggcctggaggatctgaagggcccagctcagcctagtggcctgagccctctgctcattcccgctcaggtcacatccagtacatgtccagcatagttcgggagcacagacagaagctgcggaagaagtacggcgtccagtttatcttggatgctctgcgcacccactacaggtgaggccagtggggccagatgggccatggggggctgacacagtggcctccggccttggggactgggcggtgcgcttccctgactcacctgcccaccctctctccccgcctttctttgggacctggctgggtgtgcctactgacctgccagcccgcagcgggagcgccccctggctgctgacgacctacgcaccgtgcagacctccctcctgggcctggcgagggagttcctggtgcggagtctctcagcagatgacgtgcaggtcacgcagaccatgctgagctttttggcggccacaggcgatgacggtcaggtaggctggaggttggggagcgggaggcttgggtgaggggagtgggggcccgacacagtgtgagaccctgcatccccaggcggtgggtgcgctggacctgctgctggccctgctgcacggttccctggtgcaggagtccttggctgtctttctgttggagccagggaacctcgaagtgctactggccctgctagtgcggccagggtcactgcccctgctgcccgatcgagtctgcaaggtacacccagcccaccccctcccctggcatcccattcactggggcccctgcctggggttcagggaggtacagcaggccttgggccagcggatgaagctgccttcaagggcctcttgagccacacacctgcacggtgacttcccctcctacagtaactccttccacatgatgacagtcctccgatgacccccacacagatcctgcgcagactgcagcagaatgagcggctacctgagcggagccgccagcgcctccggctgcgggagtgtggtctccagggtctggttgcctgcttgcctgaggggactgtttccccccagctctgccagggcctctacaagctgttcctgggggcaggtacaacctggttaaggccaagtggagggggtgacatgtcagaaaaacagggcaggcaggccggaagaaggaagatagtggcataggggccagggctgggccctgccctttctagtctggtcagtccctcaggtccccccaacccatccccccagattgcctgaacctctcagatctgctggctgtggtacagctgtccctccaggctgacctcagcgttcgcctagacatctgtcgccaggtgagcatgagaggtaaaagctttgggggagggggagggtggcttctaccctctggccttccaccttgcctgtctcatgaggggtctctggagccctcctctgcaaaggccctggatgagggtctggagcaggcagttggatgcgtcctcacttgctgtgctctcgcctgcagcttttccacctcatctacggacagccagatgtagtgcggcttctggcccgacaggctggctggcaagatgtgctgacccggctatatgtcctggaggctgccacagccggcagcccccctccgtcttccccagagtcacctacctcccccaagccagccccacccaagccacccactgagtcacctgctgagccttcagatgtcttcctgccctcagaggccccctgccctgaccctgatggcttttaccatgctctctccccattctgcacgccctttgacctgggcctggaacggtctagtgtaggatcaggcaacactgctggtggtggcggcagcagtgggactcttactccagccagccagcccggcactccttcgccactggatgggccgcggccctttcctgctgctcctggccgccacagctccagtctctccaatgtgctggaggacggcagcctcccggagcccaccattagcggggatgatacctcgaacaccagcaacccacaggtgaggtgggcccaccctctgccactgcatggtacccaagggaggacacttctggtacacagggctggcagtgtagcctctccaaaggtgtggccctgtctgaccagggttgcagccactggtcaggcctattgctgtcccctcatagctctcatctgcagttgtgttcccagagggctcctggaacagggtgagtcatgatgagccacagtgggtgacaccagccaggcttcagaagggccctcaagagagcctgtagggcagacacctcacagggtccaagggcagcaaactccaaaggccctgccctgggcttctgggtttggggatgggcctctgcttgttctatgtgaactgcctcatctcctcttgggagtctggcaagaccccaggattctgcctggaactcaggtagtagttgagacccctataccattcttccaggcccttagtgccaggctcactgttagccaaatgctctgactcctgggtggctaccccaggaggggtgctgagtggggatgggtgggcgtcagcctgattccctcccttagccgcccacaacccacgcccacaccacccacctgtgcccacagcaaacctctgaggaagagttgtgcaatctgctcaccaacgtgctgttctcggtgacgtggcgtggcgtggaaggcagcgatgaggctgcctggcgggagcgtggccaggttttctcagtgctcacccagctgggggcctcagccacacttgtgcgcccaccagactgcatcaagcgcaggtgagagggaaagtctggagggggaggggcttcaggaagcctcgggggaaggagagaagatagtcaggtagacccttgagttccccactcacccgccagcctcctggagatgatgctggagtcagccctgaccgacatcaaagaggcccccgtgggggtcctggccagcctcacccagcaagcgctttggctgctgcgtctgctgcaggacttcctgtgtgctgaaggccatggtaaccaggaactgtggagtgagaaggtgcgacccctcagagaggcgtgagccacatgaacactcatgttcatgcaagcctgcagggatctggtctgggaggtggatgggtacacgtgcgcaggtgtgggtgcatcagcatgaatgcctgtgagtgtggacttgcctgtgtgcacaaaccctacctggcccccagcgcaaactttactttgctccctttccatggactcctggcctcccctggtgatgtctgttgggaacctgttttctgtggcagctctttgaaggtgtatgcagcctacttgatcgcctgggagcctggccccacctggccaacggcacagctgatctccgtgagatggcgcagattggcctacggcttgtacttggctacatcctgctggaagacccacaggtgagcacagggtgagcatgggggcagggggcgtgtgagatgtcgggagctccaagagtggctgggtgccactcatctctcttgcgcccacagctgcatgcccaggcctacgtgagattgcacatgctgctacagactgcagtgccagcccgccgcgaggaggcctgctatgtgctctccaagctggaggctgcactggggcgggtgctgaacacctcttccttggagtcagccactgatgaggcagggtccccacttgcagctgcagcagctgcagcagctgcagagcgctgctcctggctggtgccactggtgcgcacgctgctagaccgtgcctatgagccgctggggctgcagtggggactgccctccctgccacccaccaatggcagccccaccttctttgaagacttccaggctttttgtgccacacccgaatggcgccacttcatcgacaaacaggtgcctggaggttggggcccaggaagaggagtgggggctggggcccacatcgagcactgttctcctctgcccaatcctccaggtacagccaaccatgtcccagttcgaaatggacacgtatgctaagagccacgaccttatgtcaggtttctggaatgcctgctatgacatgcttatgagcagtgggcagcggcgccagtgggagcgcgcccagagtcgtcgggccttccaggtgtgccacccggggtaagggatgggaaactgctccacacatgcacccaggagatgactgacaatgtggagaaacgggtagggcaggcagcagccaggggactgacctattacccccaccccaggagctggtgctggaacctgcgcagaggcgggcgcgcctggaggggctacgctacacggcagtgctgaagcagcaggcaacgcagcactccatggccctgctgcactggggggcgctgtggcgccagctcgccagcccatgtggggcctgggcgctgaggtgggccgggcttggggcagggtcgctgtggaggggtggggcttgggagggagggagccacctggagccccagactgcctttggggtgaggccagggagggatgggggtgtctacagccttctaccgacccatgacctgggggacattctgcagggacactcccatcccccgctggaaactgtccagcgccgagacatattcacgcatgcgtctgaagctggtgcccaaccatcacttcgaccctcacctggaagccagcgctctccgagacaatctgggtgagggagtgtgctgagatgggtccacccaactcgattgtcccgtctcctgtcctgccttgcttctgctgagtacccttggccccttgcaggtgaggttcccctgacacccaccgaggaggcctcactgcctctggcagtgaccaaagaggccaaagtgagcaccccacccgagttgctgcaggaggaccagctcggcgaggacgagctggctgagctggagaccccgtgagtggggccctggagagattggactggtgtggtgggcaaggggtctgctccagtgtgtgcatgcctctgtgggatcaactccctgagtgtgtcctcttctgctgcccgactacgtccccctgaagggactgtccaaagccagatggtgagtgggagagtctcctaacagggctgagagttgctcttttaacagccaggcacctgaggacagcactgagaaacacaaaccagagcaggaagggggcccagggagtgggcaggggctgggtgaggggagcaggggacaagggttggcatcctggcaaaatattcagaagcccagtgggtggcaggtgggggacaggggctgggaccagtaggttctggaccctaggcagcccctccccatctctgggagtcatgagagtatataccccatgactcaatggcacttggatgccctttgggcttgtgaagaagggggtcccagagcctacagcgtgaggtgggttgctggtctttaggatggaggcagcagaactggatgagcagcgtgagaagctggtgctgtcggccgagtgccagctggtgacggtagtggccgtggtcccagggctgctggaggtcaccacacagaatgtatacttctacgatggcagcactgagcgcgtggaaaccgaggagggtgcgtcctggtggtgtggtttaggaggatggcagggaatggctgagctctgggtggggctggggtgagtgactcccgtacctgctgttcctccccataggcatcggctatgatttccggcgcccactggcccagctgcgtgaggtccacctgcggcgtttcaacctgcgccgttcagcacttgagctcttctttatcgatcaggccaactacttcctcaacttcccatgcaaggtgggcacgaccccagtctcatctcctagccagactcccagaccccagcctggccccatcccaccccatacccaggtacggaaccaggtgtactcgtggctcctgcgcctacggcccccctctcaaggctacctaagcagccgctccccccaggagatgctgcgtgcctcaggccttacccaggtgagagccctgggtgtgagggatgtgaagtcgggaccctgaatcacggggcagtgctggacagcccacctggctcacatcttgtctgcccctgtccccagaaatgggtacagcgtgagatatccaacttcgagtacttgatgcaactcaacaccattgcggggcggacctacaatgacctgtctcagtaccctgtggtgagggtcccactctgcacccctccacccctgcccctctgacctgtcagcccttggttcccccaagtgtaggtacctgccagtgggccaagctctgagcttggtcaagggtagatgtgccaatgaagacctggcctctgttccctgccaacccccagaggtccccagcctcactcccttcccctccctgcctagcctctattcctcaaaaggaatcctgttccaggacactctgtccttctcccctgtgacccctctaagtggtgctcccccaacctgtgggcaggctctgtgcccgccttcttgagggtgtgggcagggcagggtgggctggtaggccatcagggccctcatgcagcccctgctcgggtgggtggccagttcccctgggtcctgcaggactacgtgtccccaaccctggacctcagcaacccagccgtcttccgggacctgtctaagcccatcggtgtggtgaaccccaagcatgcccagctcgtgagggagaagtgagcatgtgggcagggctgggctcagcgggtagggaaaggcgaggggagggcttctgctgacacgtccaactgtggccccaggtatgaaagctttgaggacccagcagggaccattgacaagttccactatggcacccactactccaatgcagcaggcgtgatgcactacctcatccgcgtggagcccttcacctccctgcacgtccagctgcaaagtggccggtgcggcccaggggctggtgggcagactagggggcagataaggggaggaggctggtcctccccacatcctgggcccacccctggctcccttcttccctccagccacagcatctccctccctgtctccattctccccacctcaccttggccccgtgcccctcccccagctttgactgctccgaccggcagttccactcggtggcggcagcctggcaggcacgcctggagagccctgccgatgtgaaggagctcatcccggaattcttctactttcctgacttcctggagaaccagaacggtaggtgtgaggtgctcacactggagcgggcaggtgtagggatggagagcagatggtggagtggccagggggcagtcgggatggacagggagacagctgacccagtcctctgtgccaggttttgacctgggctgtctccagctgaccaacgagaaggtaggcgatgtggtgctacccccgtgggccagctctcctgaggacttcatccagcagcaccgccaggctctggtgaggaaggaaccacaggcaaacggcaggcagccggggttctgaagatcatggggggtcagctgtccctgcactgattgctgcctccctactctcaggagtcggagtatgtgtctgcacacctacacgagtggatcgacctcatctttggctacaagcagcgggggccagccgccgaggaggccctcaatgtcttctattactgcacctatgagggtgggcagtgcgctggactccagtcagggccaggacaagatcaggtcgggtggatgcagagggcacgcagggagccctgactgctctgcctgccttcccaggggctgtagacctggaccatgtgacagatgagcgggaacggaaggctctggagggcattatcagcaactttgggcagactccctgtcagctgctgaaggtaaggccagcttagaggatagtggccagggatgcccatgccatggtgctgaccagccacttacccacaggagccacatccaactcggctctcagctgaggaagcagcccatcgccttgcacgcctggacactaactcacctagcatcttccagcacctggacgaactcaaggcattcttcgcagaggtgaaaggaagacaagacctcaactttatattctgtgaaatgggtttaaccccactgtccttaccaaccacgtggggcagatgggaatcctaatcaaggtcactgatttcaaggcaccttagaaaatgagctaaacatgggaagagtatgggggcaggaggggtgccttcttcatcagggccaggataaagtgtcgactcaacaagctctgaaagccttagggagatcaggagggagatctgtccttggaccccttccatcgccttcctagacaggaacattcctgaatgttgcccccaggcctgactttttttttaggtttccctctcttcctgcctttgggctagggggacaaggaataacagggtgagaggaccaagttgaaactaagtgtgatactctggaagcatcttccatgtctgtcccagcttctcacccactttctgagatgccctcctaaagtctctgcctgtttcttggagggaacctctgcatctgtgacacctactctatgacccctggggactgacagtaaaggaagggatgatgcttcagggagcagatagtgtaatctgatagtactcaggcatagctaggcctgcccttgcccctgcaggttgtcagtgatggtgtacccctggtgctagccctggtcccccaccggcagccccactccttcatcacccagggttccccagacctgttggtaagtgcattgtgcagagccccagctcagctccactcccccttgcctctgccagaaacccacctctgccccctcctgcctgcaggtgactgtgagtgccagtgggctgctgggcacccacagctggttgccctatgaccgcaacataagcaactacttcagcttcagcaaagaccccaccatgggcagccacaagtaggacagagggctgtgggtggggtgggctacaaatgccctgcacccggaattattcccctccctaatcagaatgtaggccagctgcaggggaaaggtctggccaggctccctgagggcctgggtctcttccatgtggcctggcctcacttgctatccccctcactgggtcaggacgcagcgactgctgagtggcccgtgggtgccaggcagtggtgtgagtggacaagcactggcagtggccccggatggaaagctgctattcagcggtggccactgggatggcagcctgcgggtgactgcactaccccgtggcaagctgttgagccagctcagctgccaccttggtatgaacagccttggagctggggagaatgaggcacacaggtatggggccgggttctgaggctggccagggcggatgtgactcctccgttctgcctgtaccctccccttcccatgcagatgtagtaacctgccttgcactggacacctgtggcatctacctcatctcaggctcccgggacaccacgtgcatggtgtggcggctcctgcatcaggtgtgcctcgtgggcagctctgtggggcccccgtagcccagacctgcagcccatccgtccctcagtggccttccagtcctgtcctcctctagtcttggacaaggccttcatttcctgagcctcaggggacagtcctaagccaaccctggtcctccacagggtggtctgtcagtaggcctggcaccaaagcctgtgcaggtcctgtatgggcatggggctgcagtgagctgtgtggccatcagcactgaacttgacatggctgtgtctggatctgaggtgtgtgtatgcatgtgccctggggagggtgagtttcctgggcaatccccctggagcccagactcctgcccaggaccctaagttgccttcctgcaggatggaactgtgatcatacacactgtacgccgcggacagtttgtagcggcactacggcctctgggtgccacattccctggacctattttccacctggcattggggtccgaaggccagattgtggtacagagctcagcgtgggaacgtcctggggcccaggtatggggaaggggtgcccagcaaagatggaggggcagttgggatcctgtccttgctgacactccctgcttcctccaggtcacctactccttgcacctgtattcagtcaatgggaagttgcgggcttcactgcccctggcagagcagcctacagccctgacggtgacagaggactttgtgttgctgggcaccgcccagtgcgccctgcacatcctccaactaaacacgtaagccccccatttatgggttcatggcccctgaaggtggtggtcattggtgtaggataaaggccctaggaacccacacaccatacatgtttgtgggcacatatttcaaggtttgttacctgtcccttcatcttcccatggggaggtcttgccctgggcctccgcttagccacagttgtgggagatttctttgtgtataagaatttcaatttaaccatccttaaaatgaggacagagagggtatatgggataagggatatctgctggtcgcaaagcccccttgcagtcgcaagttggtgtatatcccctctcccttccagactgctcccggccgcgcctcccttgcccatgaaggtggccatccgcagcgtggccgtgaccaaggagcgcagccacgtgctggtgggcctggaggatggcaagctcatcgtggtggtcgcggggcagccctctgaggtgaggatggggcgggggtggggaggcccctcgaacggggcggggcgtggcgcggcgatcccagctgatcctactcaacccttacgcccaccaggtgcgcagcagccagttcgcgcggaagctgtggcggtcctcgcggcgcatctcccaggtgtcctcgggagagacggaatacaaccctactgaggcgcgctgaacctggccagtccggctgctcgggccccgcccccggcaggcctggcccgggaggccccgcccagaagtcggcgggaacaccccggggtgggcagcccaggggggtgagcggggcccaccctgcccagctcagggattggcgggcgatgttaccccctcagggattggcgggcggaagtcccgcccctcgccggctgaggggccgccctgagggccagcactggcgtctgcggccgcagcagcactttttgcacagtctggggcggggttccccggcttccaagtcgctgtttcgtcaaagcacgagggccgcctgtggccttaattcctaacggcggccccggttctcccttctcggcaataaaccaggcctagttttgtagct

SEQ ID NO: 1220 - DNA, 13575 bp, Homo sapiens
gctctttctcctccacgtggggacgcaggatggcggcagcagtgccggtgggtgtgcgtggatgggggcggggggcgtcgccgcggggcgctagggcccgggtccctgaggcctgagagaggcgaagtggggcccttctgggcgggcgaccagactgactcccgccccacttgctcgcgcaggacgaggcggtggcgcgcgatgtgcagcggttgctagtgcagttccaggatgagggcgggcagctgctgggttccccgttcgacgtgcccgtggacatcaccccggacaggctgcagctcgtgtgcaacgcgctactggcccaggtaagtggctggccagggcggcctcgcatctccacccccgggcggatgcggtgggggaatcatattaccgagggtctgcggttcatggtcccccgctaacggactgtggtgacccacctggcgtgagctcccacctatgtcagagatggaatcagtggcatagcgctttacacgccaaccaaaggggtccacctgcggagaggggcctagctttgaacgcaccggatgctgtatttcattgattctttgtcacagtcccccagtctgggacacgttaatatccccattttacagcgtggcccggagggactcagtattttgcacgatgctatgtagtaggtagcagatttggaattggaacccaaaactatccgaatacccatgcttttatttatttatttatttaccttttttttttttttttttgagacggagtctcactttgtcgccaggctggcaagctggagtgtagtggcgtgatctctgctcactgcaatctctgcctcccaggttcaagcgattctcctgcctcagcctcccgagtagctgggactacaggcgcgcgccaccacacccagctaatttttgtatttttagtggggactgggtttcaccacgttggccaggatggtctcgatctcttgacctcgtgatcctcccgccttggcctccaaagtgctggggattactggcgtgagccaccgcacccggcctttgcttttaacctttaagccagtgtgtttactgaagagctgccctggggacaggggaggtccttaaaattgcagttcctggaccccatcccagccttactaaaccaaactctgggatgaagcagaaagtctacattttttaacaggcgttttgggagctttttacacaaatatagtgtagtgtggtagtttgggaaacactgcataatgctatatgctaatcctatcttggacgtaaagaacctgaattaatcattggcaataggacattgaactaattacttagttgttctgagcctctgcttttgaaaactgtcagtgggaatattagtatctacttcccacggttgttatgagatgcagataaagaatttcaggccgggtgcagtggcttatgcctgtaatcccagtactttgggaggctgaggtgggcagatcactagaggtcaggagttcgagaccagcttagccaatatggcgaaaacagtctctactgaaaatacaaaaattagccaggcgtggtggcaggcgcctgtagtcccagctcctcgggaggctgaagcaggagaattgcttgaacccaggaggcagaggttgcagtgagctgagatctcaccactgcactccagcctgagtaacagaacgagactccatctcaaaaaaaaaagaaaaaagaatttccaagtgctgtgtaagtgtcctgcaactgctgttcagtgacttaaaaggtcttgctaggctgggcacagtggctcacgcctgtaatcccagcactttgggaggccgaggcaggtggatcacctgaggtcaggagcttgagaccagcctggccaatgtggcgaaaccccgtatctactaaaaatataaaacttagccaggcgtggtgatgggtgcctgtaatcccagctactcgggaggctgaggcaggagaatctcttgaacccaggacgcggaggttgcagtgagcagagattgctccactgcactccagcctgggtgacagagcgagactcttgtctcaaaaataaataaataaataaataaaaggtcttgctcaatgggcaatgatgggggtatccctagcacgatggctgaaaagaagaagcttcacctcccacagctcagtggggagcatccctggcagagggtgcccctgcacatccattgttgcgggtttgtcctttaccattgtccttcaggaggatcccctgccactggctttctttgtccacgatgctgagatcgtctcctcactggggaagacgttggagtcccaggcagtggagacagagaaggtcctagacatcatctaccagccacaggctatcttcagagtccgggctgtgactcgctgcaccagctccttggagggtcacagtgaggcagtcatttctgtggccttcagccctacgggaaagtaaggacagctgcagactcatggagggggtatgtgggggtgcagtctttgcctggtttggggagggtctcccagagttataattgatggggcctcagggctgcctaccatagacccaagctctggactcagcttgcaattaagggacttcctcagtagggcatggtccccaaaggctgcttaaggacccctgccttggacaaacctctcctagacttgatttttcaagatctgagctgtgtgacttgtataaatcacttaacctttccgagttaatttttcatctgtgaaactgggattagttgcttctctcaaacttagaaaggtaatgagaagcttcaaaagctggttatagctgtggagaggaaagaaatggcctcctgatgtattctcccagaggacagcatcagtattgtctttctcccttccaggggcgaggaaagagtccagttccatattctattcacagaaagtgattgaataggtggcacaaatgcacatgtgcagtgtcaagcatcctctcttcttccccaggtacctggccagtggctctggagacaccaccgtgcgcttctgggatctcagcacagagacaccacatttcacatgcaagggtcagtatgcaattagccatttagggggtcttctttttttttgagacaaggtcttgctctgttgaccaggatggagtacagtggtgcagtcacagctcacttgaactcctgggctcaagccttgaactcctgggttcaagcagtccccctacttcagcctccagagtagctgggatgacaggcacttgccatcacacctggctcgttttttgttttcatacagatgagggtctcactttgcagattacaaccccttaatatccagttggcggctgtctgttcctaggtagagaccatgtccttgagcccagccagccacttagacacaagcagaaactgcaccaaggagtcaatatgggacatggtgagaggctgactgactgctaccaaggagaacctggtttaaatcctgcctctgccacagtggttttcaaacttgagcacaaatcagaattgccccgcctcaggggcttgttaaaatgcagattgctggccaggcgtggtggcccacacctgtaatcccagcacttcgggaggccaaggcaggcagatcacttgaggtcaggagtttgagaccagcctcgccaacacagtgaaaccccatctctactaaaactacaaaaattagccgggcatggtggcgtgtgcttgtaatcccagccactggggaggctgaggcagaagaattgctcgaatctaggaggcggaggttgcagtgagccgagatggcaccactgcactccagcctgggtgatggagtgtgactccatgaaagaaagagagagagagaaaagagaagagagaaaaaaatacagattgctgggccccacccccagaggtttagttctattgggcctggggtagggcctgggaatctgcatttctaacaagttcccaggagatgctgatgctgctgctctgacgaccacacttgaagaaccactgctataccacagattagttaagtgaccttgtgtgtgtagggcatgttccctttctaagcttcaattttctcatctggaaaatggggatgataattcttgctttgctccatagcttagagctcttgtgagaaataacaagggatgacatgtacaaaaacacttcatagcatgtgtcacataaggagtcattagagagtgatggtgttatccatgcagcaagatgcagagctctaacacttggggtgcattctatccatccccagaaagcctcatcgctccttttgttcaatcattcatttattcaaatggttaaggagtacctggcacctgacaggcactgctgggcacttgggataaagacagatgtagtcccttatttctccctcctctgctttcttaggacacagacactgggtccttagtatatcctggtctccagatggcaggaagctggcctcaggctgcaagaatggccaggtaggtagttctcagggtaactaggcagagactcaagggggccttcctaggagacagttcagaatcaggttcaggagtctttggggagggttgggtgggaagtggtaggcagggattttggtggagccagagacctgttggggaggattattcagtgagcttctgtccttcagattctcctctgggacccaagcacagggaagcaggtgggcaggaccctcgctggccacagcaagtggatcacaggcctgagctgggagcccctccatgcgtaagtgacactgacggagctgggacaaatgagccaggggatcaaagccatcccctttccctgcccaatgcatagaagttttacgtgaggggacaagatgggcagcctgaatgaccgtgatggcttggcaggcatgggagaagggtctcgggcagacctgcattgctgcttgggagaggctctcatcacagggtctgctggttgcagtcaccttgcagtgcagccgggtcttggtgtcagaaaagctgtcaaaagattgtccatggcctttaagttgggaatggggaggtgccatgggcacacagatgttgccaggtcacagatgaggtcacatctcccttctctccaggaaccctgagtgccgctatgtggccagcagctccaaggatggcagtgtgcggatctgggacacaactgcaggccgctgtgagcgcatcctcaccgggcacacccagtcggtcacctgtctccggtggggaggggacgggcttctctactctgcctcccaggaccgcaccatcaaagtctggagagctcatgacgtaagtgctgggagggttcagaaaccagtccagaaaatcgcaagtcacaagatgctggcactcagaatgaccttgacatcagcgagtccagtgtttcccagatgtgtgctgggagccctggtctagggaggtgttttgggaatgaggagttctgtggttggtgctgcaccatagtggagattgcagagtccccatgagatcgtcacactctggaaattcctcctgtaggacagctgttgggctttatcagatctaccatatcccaaatgtattggacaggagccgtttactctgacatccctaactcctcttccatgaaacattttcatgatctggactccattttacaagtggggagagacttgaccccagaggggtagtttgattaagatcacaatgcatgagtgatgatgattattagtcttgtaccacctgtctcctggggctaatcgcccaggcgtggggaggagtgtgtgtgtctgacctgactcgctctcccgtagggtgtgctgtgccggactctgcaaggccacggccactgggtgaacaccatggccctcagcactgactatgccctgcgcactggggcctttgaacctgctgaggcctcagttaatccccaagacctccaaggatcctgtgagtgattgggagaaggaagagcgggggctgattgggaaggagccagttctcaagcttaatggggagtgtttgctctttgtgttggattttcttatcggccttcttcctcatctccttttctcccctccggtacctggtcacagtgcaggagttgaaggagagggctctgagccgatacaacctcgtgcgggtgagtgtgtgccagccacgtgcacccctagctctgtaccagtccttagccaatcactaaaaccctctcagacccttctcccttctagacccagctcagaatgtacctattccaaaaagttgttcttcataatcctagtttgcaatcctaaaatactaatgtgctagagatcattttatttcgttttttgtttagtttatttgcttgtctatttattacatttccaacatgcttcttttttactttaatttgttgtttaagattgttcacacattcacgttcaaaaaatacaaaaggtagatcgcggagtctcccgtctctattgtagcatccagtgccaccagtatcctgaatcaccttccagagatttaatatacagacacgtgtctatatacagtatatatgtataagcacacacacacatgcatacatacataaaatccttcttttaacacattattttgtgcctttttctgtaattatgtatcttaaaatttttttctacatgcatgtagagtttctttttccttttggatgaagtgacttgcctggggtcacatgcgagtgagtggccaagccagtcctcattgctcctagcgctggcctctctctgtccctggcattgagtaatcagggtgtatgcttgctgccaaagtcgggccctcctccttctttctgagaccacacccaacacagtgtgctttctgcctcccctagggccagggtccagagaggctggtgtctggctccgacgacttcaccttattcctgtggtccccagcagaggacaaaaagcctctcactcggatgacaggacaccaagctctcatcaaccaggtgctcttctctcctgactcccgcatcgtggctagtgcctcctttgacaagtccatcaagctgtgggatggcaggacgggcaagtgagtaggggtgggtactgcttctctgtaaggagtgaatggtgggaggggcttggcactgccacttactagctgtatggccttggcaggtgtttggattttctaagccactgtttcctctttggtaatatgcagaccccctacctctcagctttgttacaaggtgtttgtttgtttgtttgtttttagagatgactttcactctgtcacctggtgttcaagtggctcgagtgcagcggcacgatcttggctcattacaacctctgcttcctgggttcaagtgattctcctgcctcagcctcccaggtagctgggattacaggcctccgccaccgtgcctggctaatttttgtatttttagttgagacggggtttcaccatgttgactaggctggtcttgaactcctgagctcaagtgatccaactgcctcggcctcccaaagtgctgggattacaggtgtgagccgccatgcccagcctagttacacggatttaatgagacagtatgtttaggacccgcactaagtggtcactaaaaatgctagttcaggctgggcgtggtggctcatgcccataatcccaggagtttgggaggccaaggcaggcagatcacctgagttcaggagttcgagactagcctggccaacatggcaaaaccctgtctctactaaaaatacaaaaattagccaggcatagtggcacgtgcctataatcccagttaccccggaggctgaggcaggagaatcatttgaacttgggaggcaaaggttgcagtgagtcgagttcacaccactgtactccagcctgggcaacagagtgatactgtgtctcaaaaaaaaaaaaatgctagtttatgtcttaggagagaagtgatcttagagctagctgctgaagaggtagggctgtagccctggagaaggtgaagtggtggtaggtaggcttgtggtacaattgttacttggccctcctcaaagtgtgggccacagaccagcggcatcagcatcacctgggagcttgatagaaatgcagagtcctggccccaactcagaccttgtggatctgattcttcattttaacaaagttaccaggtgactctgctacccactcaagtatgggaacccttggtgtgatgaggcacagtgctcttggggttaatcggattagaggagaggcaaaggcacaggcaagggggagaaaaagagccagggaaaccttgttagggctgaaggggggacctctgcgttagtgacgtcactgtgttttcacacagcaaccctttaagataggtaattgggttcctttttaaaataaggaaaatgagtctcagagaggcctgatggtttgtccaaagagaaacagctagactgtgttgacgtgaaagttcagtgggcccactgttactccatgccacctgtcagcaggcacttgctgtttggggggatgacaggcagatgggctaagcagatggccacgttggagtctaaggcatgcaaagttgtgcaggtatggagggcaagcaagaggcatgctagaagctactcatttggagaagttttacaaattgtaatgactggtaatgattaaaaatggtctgggatggggaccaggcagtgtgattttgtaaaggttcccaggtatttctaacagacagccgaggttgagaaccactgccatgagcgtaggggacccttcagacgtgttgaaagatgtaactcagactaaaatccatcatcgtcttctcctggaccaggtacctggcttccctacgcggccacgtggctgccgtgtaccagattgcgtggtcagctgacagtcggctcctggtcagcggcagcagtgacagcacactgaaggtgtgggatgtgaaggcccagaagctggccatggacctgcccggccacgcggatgaggtagggccaaccctcaggcaaaggagggactgggattggagcctggctggctgtctccctctcaccaccccacctgccttcctctgcctccctttaggtatatgctgttgactggagtccagatggccagagagtggcaagtggtgggaaggacaaatgcctccggatgtgagtgtgggggaagtggtggttggcatacacagccctcctacccctaaggtccttctgtgcacactttcccttacagcatagaattccgcagggccgtccaggtgctcagactgtcttgaggaggcgtgtggagccagattctcagtgggcaagtgggagggccacaagtgggagggccaccggaacaacagaggccacaggacacctcgtagagggcgcgtccaggtctttctgtcagtgggcaagtgggagggccaccggaacaacaggggccacaggacaccttgtagagggcgcatccaggtctttctgtcactagacttcagagtcgcaagacctgagttcaaatcctggttctgccatggagtaatcacagagaacttggttaatcagtctcttgggaattatcaaaccttcacagacaggatcaaaaataggagggtcaacactctggaagacaaagtgttgtgtgcttataagggattgtgactgtttgctggtgggcatcccgagggccaggccctgggtggaggtcctggtggcagcaggcagtgagtgggcagcctgagtttgggtgggcagagcagggacggtcacctggctcttggtgactctgagggtggaccacaggccgtccgtctgttgacactgggattatatgacggcctccctttcctaaggtggaatccccatcctgacacccttcccttctccacagatggaggagatgagacggcccgaagttctctctgacccccacctcgactcggcctctgccagctgccttccctgccagagaacaaaggctgagatggcagtgcacacaccctccccaccagtggggacctgagaatgcgtgtggcctgctgtcctcgatagaccggaatggggttttcccacagatccccgcctgtggcacaccccagagccagaaatcgaaggtcacaggaagttgtcactgaacttggcccgtgtctgctactctgtaccttgctggtacagacaggggtggtgggcagccaggctctatgagtgggcccctagtgtcagctctgtacagggtcagatcccaggttctatgaccaaataagtaacttaagttttgtgtgttgggttctaattccttgtcctagaatccccatgactcaatcaaggactgtgctaaatgagattgtccagcccccgcccttgcactggactacgccaaaaccacactgaccaggcacttgccttccctctcttcccccgtgttggtaagagagaggccagttgtgatagtggccaaggagaatctagggctgtattgttgtccactgcagtaggcaccggccacatgtgactgctggcatgaaatagaagtgcagttcctccatcgcactgggtaaggcctccagtattggacagcacacagaaaggttttcatcatcaagagagttctgctggtcagccctgctccaggggatgcctctgccttcgcatagcacactgcttgaggccctgccaggcaccaagcactgccctgggcccatgggatagagcggggaaggtgatggctcttccagaggattccctcagatggggaggcagcagtatgagctctgagcagaagtgggtattgttgatacagaggaagttctttgccacgagaactttcaagcagtgaaaggaattcccatcaggactcagaccccaggccgagatcttgccctgaatgtaccctgcctctgctttctcctgcatcccatgctaagcagggtcatggtctgaactactcagattggatttccaaaccatccttgtataaactgctcagaactagcatcttgctccttcttaccctcctccacccttgtctgtgcttttgggttttgcgcgtcacctagctgtggtgcttggcctccaccttgcacatatctgcagtgaggctacataagaagcgaacaaaactatcagccactgagctccttggtgccagctgtttgtctgctgtgctctcagactgcaccaggcctggaaggttctcaagctccaaaacttttgatgaggaaacaacataagaaatgattagcccatgccctcacatctagtaagagaaagctgggattaaaccaggccctgccccaaagcttattgtgcactttgtaccacatccctccgtccagagctcaagctagtttgacagttcatgggccaccacgtctgtccatgacagctatttctgtatttttctggtgtaagagccttttagtcttagagcaccagtctccctgttcccctaccccgccccactggggaaggggtgatggcagcatcctattgcctagctgcctgttttctatctccccacccatgtagactctgtcctggtggaagctaggaggtgggtgccagccagcccatctgaggctgtctgcagcataaagcagactttagggtgctggatgacctgcagttctttaatgagggacctagacccagcccagatttggaggaggagggagtctagcagctgtgggcagtggctgagcctggcatggcctggcctgagatgcctccaggtgaatggggcccctatgtagccttggccccagcccaggggtggggtgcccataccactctgccagaccccgggcccgcagggtgctggtggtatggtaggtctcatggctctggtttctgagggcctggggttgaagctgaaagtaggtgaggggtgtcctggggccctcccccttaacagggaaataggtattccagatcctccagcctccgcatctcctccggcccgatggacacgatcttttgccggggttccttgcgccgcacggtgatctggatggggtagttctcaggaaagctgctgaagtcagtggccagggttgcaaactgaagtgaaacaagaaaacccttcagagttccttcccagatctgaacctggctctctctctgtctctatcaccccttttttttctgtctgctgactcagaccttaaacagccttatccaacctagccattgacgcaggaaacaggtgcaaagatgcatgactcaagcctgtacctcctcattatgggatatttccaaccaaagggctgtctgtactcaggcctctatacccccatacccctaccccatacccaggctgttcccttcttcgtccccctttagcctcttgtcttccctatttctttcaatgcccttgacttcccagcctactcacaatcatgggcactgaattgcagagtctaaaaaccaatggctttggaaggggaacattatagtgatgttgaaaaatacattcgtttgcattcctagtgggccccagagtggcttaatccttaaacctcccagaagcatgcattctggaattgatgcttcttgacccaggcagaaggaaagctagccagatgagtcatgtgggcataggggtgttcccaacctccaaagccctggttccctggctttggacttctctccacccccaaggcccctcttttcccagggctcactttgtagggcttgcaccacttccccaccccagctgtgttggctgcacggacactgaggcagtaacacgtgttaggctttagctccatcagcttgacagtagtgcccaaaatcttgttgaagatccatggacgattctttgcctcgggcaactcattctcctgtgtcttggccacctcctgtaacaggagctggtagaaactgaccggctgcttgcccaaggcgtaggtccaggaaatctaggggaagagagagccccgaggcttcctcagatatgtcctgtccttcctgtcccttcaccctcccaactggggtcaggacgtcccatgcccatcccctgctcctgctggggcccaggcaggtcagatggaaggtgcaaggtactgcagcactgagtgtggaacccctgccccgaagcatgtactactctcctgggcagccccacccactttagggtacaccctcattccatatttcttatacgccaggggtcctcaacccttgggccaccaactgatagcagtccatggcctgttaggaactggatagcacagcaggaggagattggtgggcgagcaagcgaagcttcatctgtatttacagctgctccccacggctcagggtaccacctgagctctgcctcctgtcagatcagcagaggcattagattcccataggcacgtgaaccctattgtgaattgtatgggagggatctaagttgaatgctccttatgagaatctaatgcctgatgatctgtcattgtctcccatcacccccaaatgggaccctctcgttgcaggaaaacaagctcagggctcccacagtttctacattatggtgagttgtataattatttcattatatattacaatgtaataataatagaaataaagtacacaataaatgtaatatgcttgactcatcctgaaa

SEQ ID NO: 1221 - DNA, 94047 bp, Homo sapiens
acgtgatttctcggcagcagccgccagttccatgcactggcggagcagctctaggcggcggcttctactttcagtttcgtgcagagcgcggaggagccgcgagcgctgagggtgagtgccgggagctctgagggtgagtgccgggcgtgccgcggggctgcgggacccgggctggggcgagcggaagggagaggatcggggttcgaattctgcacggagaggggtggaggggatgtcagaggccctggagcgggaggtgcgggtggccgggtggctggccgatggatagctgggtaagcggacagggcgccagtggcccggcagcgcgcacagcatgcgccccggcagtttggaggaagagttgccggcccgcagaggatggcagatgagggtcgcctggatggggggacacagtaagcggctgtgctcccctccctgcgcagctcctgtcacctaccggatccacccactctctctgtcttttactttgcaacttttcattgattttaaaacaattacggaagttacactgttcattgtacgcaatttagactttttggcctaaacaactttttattgtggaaaattccaaacatatacaatagtagaaggaatagaattaggttgagccttctgcacctgcgggttttcatataatgaagccccacctatccacgttcagcttggacagtcacgaccccaaggccacctactcacgaccccaaggccacctaggtagcccaatctccaccgctggttattttgaaacaaatggcagacagcatagcatctcaactgaggtatttcagaatgtactaaaagataaggcatcttttaaaaacaaaaccacagtaccaccagcatactacaaacattttaatagttattccttaatgtcaaatctccagattatttctaaggaacatttaacctcataagtgataggtgaatacgtgggtgttgttttgttacttgctttctgcattcccatgtggttttcggtcactattctcacccagaaagccaggacctgaaactggctggggtgatcattcgaggaggtcggaagaggctcctaccttcagtgccgtttgcgtccattttataagttggagttcttatgtttccttttttaaaaggttgaagtttctgcagacctaaaaagcagtttgaaaactggcagttcccagcctctaaaacccgggggtagcaggaggcagagagtaccccggggccagatcctggagcctcattgtcccttcaaatcaccttccgtttctctaagggagaaataaaccttgaaaagccatgggcttttcagatgtatctagatgtatctgatgcttttcaggtgtatctagactcccatccagcgtgctttctgcaaaacttactgaaccatagcccagaatggccatccatgatgcccacccgccttgtctcctgaagcacattgccaggtggacctgcacatggtgtggacggcagacagactggggctctcaacaactggtatttgctggatgaccatgaactaaccattcaatttctcgaaactttggtttctcgtctgtaaaatgaacatatgcaaatctatcctacaaagtgtgttttgtggattgaatgagatgatacacgcccacccagtgccttgatcaaccttaaaatgctgcacaagtgtgaggggagatggatccttgaagaagacagacaagcagaggggaaagatcttggaagagtttcacaatatgctgaactttattcctggatcagatacagagctgtccgggtgtccacagggccgggtcagcctcctcagaccccaacacacataccctcttcccctctgaggaaaattcagcaaaacttcttttgctgttgttgttctttattccttttttttttttttttttttttgacgaagtctcactctgttgctcaggctggagtgtagtggcacgatcttggctcactgcaacctccatctcctgggttcaagcgattctcctgcctcagcctcccgagtagctgggattataggcgcccgccgctacacccagctaatttttgtatttttagtagagatggggtttcactatgttcgccaggctggtgtcaaactcccaacctcagatgatccacccgcctcggcctcctgtgggattataggcgtgagccatcttgcccggactcctttttttttttttttttttttttaatagacatgaggtctcaaactcctggcctcaagtgatcagtctgcctctgcctcccaaagtgttgagattatgggcgtgagccaccacacccagccataacttcttagcatgacttttcccatttgttatgagttcaattgtgcctccccacaaaagatatgctgaaggcctaaccctcggcgcctcctaacgtgaccttatttggaaatagggctgttgcagatataactggtgaagatgaggtcatactggagtaggatgggccttgaatccaataggaccggtgtccttataagagaggagatggacacatgaagacagagacatacggggatcagacaatcatggacggaggaggaagagagtgcggcgatgcatctaggagccacaggacacctagaatggccagcagccggtgggaaccaggagaggcaaggacggatcctctcctccagccttcagagggagcccggccctgaccacacctcgatctcagactctgacctccagaactgcgagagaagaaatctcagttgttttaatgtacgcagcttgtggcactttgtgacagcagatacagcagtactgtgacaacactaggaaacgaatacaccatcccagcatctctgctctgttttccatacagaattgaactaaggaccaggcaagctaatgcaagtccaaacactgtaaaaactttggaggcaatctaaggatgtgagccagatttgtttgccagatcttttttattttatttatttatttattttattttattttttttttttagtgagagggagtctcactctgttgcctaggctggagtgcagtgatatgatctcggctcacagcaacctccacctcccaggtttaagtgattctcctgcctcagcttcctgagtagctgggattataggcacctgcccccatgcccagctagtttttgtatttttagtacagacaggatttcaccatgttggccaggctggtcttgaactcctgacctcaggtgatccacctgccttggcctcccaaaatgctaggattacaggcatgagccaccaacacccagcccatatattcatatttttaatggacttatacatgaaaatggtatctcacttttaaaaataaatgatatggaattatgcgttaaagggaaattaaatcttattatatcatgttttaaaatttttaatttttcatagctaatacatttatgtagttttaaaaatgtaaaacatttggaaagatataatgaaaaataagtctccttccatctcctgtctcccagccacccaattgccctccccgaagacaaccaatgttatcaggttcttgtgtctccttccaaagacagtctaagtgtgtttttacaaacatggatatatacatatatatatacacgtatatatgtgtatatatatatacacacacacacacacacacatatacacatatatagacacacacacacatgtgtacttttcccttctcacaaatggcagtgtactatatgtagtgttctctaacttgggttttttttttttaaacttagtgcaatttggaaatctttctacatcaaaattttaaaatctgccctttccctctttctttttaacagctgcctagtatttcaccgtatgactgctctgtaattgatctaacagttgtagaacacttaggttatttcctgtcttttgctatttcaacagtgctgtaatgaatatccttggtcaggcatcatttttcatacgtgggagtgaatctttaagaaaaccaggagtggatttgcaaggtcaaggggaatatgcagtttgaacttggataaataaggcaaattatccccccttaaatgttgtactaatttttgctcccaccagctggagggggaggggccaaatttccatatttgcaaatctgggagacgaacaatggtgtgttttttatgcctcttattacgaatgagtttgaacatcttttcaaatatttaagagtcacctgtagctcattttccataaactgtcagttcatatcctttgcccacttttttattggcttttggtctttttcctgttgagttgtaaaagcacttttcatgttaagggaatttgctctttgtctattatatggttatactgtcatttaaaatggtggcatagttgcttatagaatgtctgaaccatatgcgtcattgttagatatttatattgggtctcattttcttgtattatatatgggatgttttccctgttttttgtaaaaaaaaaaaaaaaagcaagatatgacattttaattcttccaatagttctcaccataatggtgaaggaaaggaaatacgtttgggaaaatacttcgataggatttggggtggctggaacctgtgtgcaaaatggccaacagggaccaggaccattttgggtgggaagagagtgctttgcatggtgtatgtgtatggggcggaggggctgtatttgctcctgaaagaaaagggggtggagggaggggagaagaaaggaaggagagaaggtggagggaggttagccacagagggagatgactcccagaaacttcttaggggaaggatggcaaaagggcattttcggtgagtccaggaatgccctctgctccgtgtgaggcaggtaccagcactgcagacaccggctctggctcaccacctgccatcatgagtgcattcagcttctccactgagcttccacacaccaggccctgctctaggcactgggctacagccgggaacacaaccaactccctgccttgtggagctgatgaggcagtagaaacagacaaacaagtaaacaaagatgtgcatgtcatatgaggtcaggtggaagtgactgcagtgaagaaggcaaggcaggcgagggtggagcatgctggatagagaggcagatgtagccttcttgtagggatgttgggacatttgagagagaacttgaagggagcgtggcagggaaccatgggccatggcatctggaggaagagggaaccagtcagaggggatggcaagaaacaaaaaagtggggagaagaagaaagcagagaagaggagaggagggagaagaggagaaaatgctgcttaaagtctgcttttgtgctcccagatgctcattgtgaatgacatttttgcaatttttgcaattttgttttgtaatttaataatgggctgggctgggcgcagtggctcacgcctgtaattccagcactttgggaggctgagatgggcagatcacttgaggtctgcagtttgagaccagcctggccaacatggagaagccccgtctctcctaaaaatacaaaaatagccaggtgtggtggcacgtgactgtaatctcagctactctggaggctgaggcaggagaatcgcttgaacctgagaggtggaggttgtagtgagttgagatcgtgccatgctctccagcctgagttacagagggagactcggtctcaaaaaaagcaacaaactgcttgaattaaagcaggagccctcagctagaggagtgcccacccacctcctccccaggaatcgcagagctcccaggagaggccatagcctcctataggtcatggcattgcaggtgggttggtgtcccagctggctgtttctgtctcaagaaaggaagggctgctcccgctgacatccaggcgtaagcaacgccctggtgaacatcctcgtagctagagctttgctcacattctggatggcttccttaggctcaatcctcaaagtggactcctaaagggatatatgaacttttattttttaaatgtttgaaaccgtgttgtcaaatttctctcctaaaagattgtgccaatgtagagaggctgccgaccgctggaagcttcccaatcccccagcacctatcccttgtgggtgggatggatcctgtaccatcgccagaccctcaagaaccccttgtcctgcacggtcccttctgtccctcctggtgaaatggaaggagcatgcatgccttgggaagctggtgctttgaggcattcagatcttaccgtggcatcatgtttgaagagagaaatagcttgctgttttgtgtgtctctcaatagtcttattcactgagttcttgaaggtgtcctgtgtgtttctggactgcagaatccttttattgaaatggacaggtcagtgttttcccagagaaagacctatccagtaggagttcacaagaggattttaggaggtatgtggagagggcatccgattccattgaatcgtaaagtgacaaatttgttcccttttcagttctttttcattcttccagactagtgaaagagaaagcctcagtcaggtgctaacgcatctgtaaacctctcacactcttgatattttcagcaaggggaggccaggcctccggtcagagccctgggtctgcagcaatacccagctacagttcaacagcatcatagtgttttttgttttccttggctttctttctttctttttttttctagacaaggtctcactctgtcacccaggctggagtgcactggttgcacagctccgtgcatagtttcctgcagcctctatttcccaggctcaatcgatcctcctgcctcagcctcccaagtagatgggactacaggtgcgcaccaccacacctggctaattgttttttgtttttatttttgatagagacgaggtctcattacgttgcccaggctgatctcaaactcctgagctcaagcagttttcctgccttagcctcccaaagtgctgggattacaggtgtgagcctccatgccccacccttgagtttcttttcgatgataccttcagttcgtggcaagtggtacttcaaaaaataaagttaaaagtgacatggtttctagaaaagctttaaggaaatggtgttctggctttcagataagtcaaaaaaaatctcaaacatgagtaaagagttttggaaattatacacttacccctagagggtgagtttgtgggggaaatttcataatgtatacttccagaatatttagaactttccaaatgagtacaggttatgttcgtaaacaggaaaaataataaagacataataaaatgataatttagttttaaaagacgaccatttgttgaaagcagtattatatttcagttaggaaatggcctctggaatcagcatagattttattgttttatttattttgtttttgagacagtgtctcactctgttgcccacactggagtgcagtagtgtgatcacagcccactgcagcctcaacttcctgggctcaggtgatccttctgcctcagcctcccaaatagctgggactataggtgcacaccactatgccaggctaatttttttgcattttttgtaaagacagattttcaccatgttgccctggctggtctcgaacttccaggttcaagcaatctgcctgtctcggcctcccaaagtgttggaattacaggtgtgagccactgtgcccggccagcatagattttaaatccaccttttgttgcttgacttcttggagcctgtttcttcatctatgaaatgcaggaaacgtgcctggaaatattgcttgagattctaatggggaggtgcaggtggaatactgtagcctgatgcccagcctatgccgggaactcagtacataacagccaatgagcattggctgcggactggacatgtcccctccttgtgctgtagtattaatgtctccaaccctcacagtgatcctgtgaagtaaatgtaaaatcaccacccagatgaggaaaacagtggcacagagaggttaagaaaactgtccaaggttgcacagcactaaaatgttgaaatcaggatttaaacccagccctcctgaccccagaggatcttttttcaaaaattatgttcttttattttatttcgagatgggggtctttcacagtcacccaggctggagtgcagtcacaatatcacggcttactgcgcctcaacctcccaggctcaagtgatcctcccacctctgtcccccaacccccagttgcttaggagcacaggcacacgacaccatgcctggctaatttttgtactttttgtagagatggggtttctccatgttgcccaggctggtctcaaactactgggctcaagcgatcctcctgcttcagcctcccaaagtactgggatcacaggtgtgagccactatgcccagcattagaggctcttttaacagctccacaattccctgtgagatgggctgcatacaaagcattactcctgcttgacatatacacaaaccatggcccaaagggagctgggacttgtccggatgtcagcctctaagtcagttttgggtcagtgagacccaaaaccaaggctctagccgtctagcccctccaacctttcttctgccccagttttatgggtttggcaatgtctgccaggatgggagggagcagttcagatgatccagtctggaggcaaaattctgctaaattcaaagggcccagcctcaagtcactgatgtctttttttttttttttttactttaaaaaaatgtattaattctaaaccacacaagtaagacacgaatcagtcttccttgcagaaagttaaactttttatacataaagctgatatctattttactcactgcttccagccccatgcctgtcccctctcctgcagtaacccctatttgatatgtttccagaactttatctaaaccttcacataataaaaataattcttatatagggcttactaacttccaagcactgctttaagagctttacatatttaagccccacaataactctgtgaggtaggtgctgctcttatccccattttacagatgagaacattgaggcccagagaggctatgtaactggcctggcgtcacccagcctgcagttggtggaaaggtcagtcccaaatctaggcagccttgctccgaaattcatgctcttagcctctaagttataaaacatgctattatcgacctgtgggaagaaacagtattgctgtttgttgatgtgtattttgagacaagtgatatcatgttgtgcatatcattatacaatgtgtcttgtttattccatgatacatcttgaagatacagccacgtcaacaaaaaataagtccctttcctgtacataatcccacagcgtggttacaccaaactttattatggctgtctagggtgtttaaagaccgctgctggaatttctttatccaagactctgtgtgtcttagcccattggggctgctgtaacaaagtgccagagactggctggattctaaacaatagaaatttatttctcacagttctggagactaaagtctgagatcagagtgccagcatggtcgggttctggcaagagcccttttccgggttgccgatggcggacttttcattgtatcctcacatggtgcaaagcaggctagagcattctcttgggtctcttttataagggcatcaatcccattcactacggctcctccctcctgacctaattacctcccccagaccccagctcctaataccctcctattaggggttagagtttcaacatgtgaatttcaggggagcacaaatattcagtcgatcacattgtgtattctgggccccaaggctgtccattttgctttctgctgagaagtttagtggtaaggtcaaagggtagaagcgcagtaagatctagaagtcactgctgatttgccctacaagatgggcaaaccacttcccagcctgcagctctgagccctggatccaggccttctctcctttatgtctcgagcttactctgtcccctgccttacttaccaaaccaaagcaagactcctctgggacattcctgccaggccccatggcaaggttggagctgaggaggggacttccaaaccttggttttattttcactttggcttgggtgtgccaagccctggcagagccacagagttggggcacgaggtgccaagaaacagctcccagtctgaggaaggtgctctgccctgggaaggggataaagctgagtgttggttatggggagacatcctcaaggtctccatctaaatatggtcaacttggtggccttcctgtccccagggcctttggggctctcagaggacaagaatcactcagctctgatttgctggagaagcagagccccaggtgggaggtagcgaggagcctgtctctccccactgggagtggagagctgggtgccacagcctcaaacagttgttcccagacatcggcacatggggaaccccccgggagcttccaaaagtgccagtgcctgcgttctacctcctgggatggtgctgtgatgggtctggagtgtggcccattgggattttttaaagaccctcttcccaggtgatgccgtcgtgcagacaagcatgggaaccactggcctggaagccccagggagaggcctctggggcccgggacacgcaagcgggagccttctcctagcagccttgctagccacccaccccttcctgtgggtgctagacccaaactgccagggctgagcaggagaagcaaggccaccagctggccacctgctgtcccagccaggctcaggctggcagtagggcaccccagtcctggaggagggtgcatctggaaagcttgggggctcttggtggaaagttcaagcctttagcataggaaggtggctggggtgaaggaggcagtttaaagactagtgatgtgggctgggacccagattgctgggtttccaatgaccagaagaagatggccttgttggactggggacagggaccacccaggctcaggcctgaggctgggagtgcaggcatgaatttgagtgcaggctcaggaacatccccagggccgccaggcagggagacacctcttcaactcctggctcctcgactctagctggtgacctaggcaggtccctttcccactgtgagcctcaatttcctcatgtgtaaagcatcatgactgtgtgttttaagtcctttagggccctatctttgtgagggacaacagagacgatggttttcacaggcaacagtcacccctgcatcatcactgactcacagaaatggatatgccctataaggacatctcttgcttgccctgccagcatttgtgggcgggggaggaaatggccactaaccattcctgaaggcacctcccaagggacccctgaaaggagggtgacgcctcccagaaagagaccagtggcccagcccagccctgctcttagttttgtttcctctgctttgaatgccagcaaggcctttccctcccagggcctcagtttccccatctttacaatgggcacagcatagaccccatcactggggctctttctgctctgccaccctgtgcatccaggctcaggtgttatccgaagccctgacatcatcagccattcccggggggaaggcagaggcgctgggttctctgtgtccccctggtagggcttggtgtaggattcagggaggattggagggcctctgtggcctcaggtcctcccccagggtccccaggccctgacctgtccacctggacctaaagaaccaacaacagcagcactttctgtttctttgaggtatttctgtccaaatgtctgtagtcatgactggggtgcctggctatcaccccacaaactgcatcctttctgatctgcacagatgagaaaactgaggtcttgtttcccctccatcccaagacctaatgggacctcctccttaatctaatcctcaagaggcagaaacaggatggaaagcaaaggaatggcagccagaagtctgtggctccactcctgtcctctctgcatccctcacttccttccttacaccaggcgtcaggggctggagagacggaagaagcgatagcaacgacaaccacactagtggtaatcatagcttgtgtggattgaaccttttttttatttttcatttttaatttttgtgggtacatagtaggtgtatatatttatgggttacatgagatgttttgatataggcgtccagtgtgtaatcacatcagggtaaatggggtttccatcacctcaagcatttatcctttgtgttgcaaacaattcaattatactttttgttatttttaaatgtacagttaaattattactgactatagttaccctcttgtgctattgaatactaggttttattcattctaactattttttgtacccactaaccatccccacctcccccaccctggcctcctactatacttcccatcctctggtaaccatccttctactctctatctccatgacttaaattgttttgatttttagatcccacaaataagtgagaacaagtgatgtgtgtctttctgtacctggcttatttcacttaacataatggcctccagtgccatccatgtccttgcaaatgatgggatctcattctttttgatggctgaatagtactccattttgtatgtgtgccacattttcttttactcttttattcttttctttctttcgagatggactcttgctctgtcacccaggctggagtgcagtggcacgatcttggctcactgcaacctctgcttcccaggttcaagcaattctcctgcctcagcctcccaagtagctgggattacaggcatgccccaccatgccctgttaatttttgtacttttagtagaggaggggttttgccatgttagccaggttggtctccaatgcctgacctcaggtgatccacctgcctcagcctcccacagtgctggaattacaggcgtgagctgccgtgcccagctgccacattttctctgttcattcatctgtcgatgaacacttagattaattccaaatcttggctattgtaaacagtgctgtcataaacatagtagtgcagatatctctttgagacactgattcctttcttttgggtatatacctagcagtgggattgctggatcatatggtagctctaaatttagtttagtttttttttgttttttttttttttttgagacagagtctcactctgtctcaaggctggagtgcagtgcgtgatctcagttcactgcaacctctgcctcctgggttcaagcgattctcctgcctcagcctcccaagtagctgggactacaggcatggggcgccactacgcccagctaatttttgtatttttagtagagacagggtttcaccatgttggcgaggatggtctcaatctcttgacctcatgatctgcccacctcggcctcccaaagtgctgggattataggtgtgagcctccgtgcccagccctatttttagttttttgaggtacctccgaactgtcctgtagtggctgtactaatttacattcccaccagtgtatgaggtctcccttttctccacatagattgaggtgtttgtttgtttgtttgtttgtttgtttggagatgaagtctcgctctgtcgcccagactggagtgcagtggcgtgatctcagctcactgccgcctccgtctcttgggttcaagctattctcccacctcagcctgggattacaggcgcctgccaccacgcctggctaattttttttattttaagtagagacgaggtttcctcatgttgcccaggctgctctcaaactccggacctcaggtgatctgcctgcctcagccttccaaagtgctgggattacaggcttgagccaccatgcccagcctggattgagtttgtatcatgtgccaggttccatgtcagggattccacatgccccatcccacaaccatcttgccaggtgggcattatgatgaccccccatagcagacactgtcagagctcccccaaccccatctctgcccggatgcccccactcactgtgggtgacacctgcatccttcttccggggtcgcctttgcctggtgggcattgccttgctcagagatgcctgggcagtcatgcctccctcccccgcccactgggggtgcagtgacgtgaagtgtgaccgaccacccagaccccttgcacatgcgcaggatggacctcttctatcatcacgctccagttctcccatgtggcaggctgaagcgaggcttttgaaaccatatctttgctcagctgcctctgctaccctatctttcttccaccaccccctcaataaacaacttccacaggaacccccttgggctctgcttctagggacctgacctagaagatcctcattttacagatgaggacgctgaggtacgaagaggctgcgtaacctaccagggtcacacagctttggtgtggagtagggactcaaatccagggccctggtacggaggcatttgccctcaccaagattcaggcactgagagaagctgacgggcctagagaatggcaagacttgagatagcagaaggaaggagagagggtgagaaatggatccccgtgctgaggtctggtctggaaggagaagtctgcaaggtaggaaaaagaggaaaggggacgtgaggtagggaagcaggatgtgcaaggcggggacttgtgaaagagaatgccggggggtggtgagcagcatctcatgggcaggtcagcaggtgcaggagaggcctaggagggccggggactggatgatgaaagggcatttgtttatttatcctttgtttttgttttttgttgtttaaattgagaccagctctcacaatgttgcccaggctcgtctcgccaactgtctgcccactcctggcctcaaacgatcttcctgcctcagcctccaaaagtgttgggattacaggcataagccaatgtttattcgtcctgagccttccctggacacctgatatgtagctgctttgtggtggtcacagttccatggtgtgactttatcctggaggcagtgggatgctgatagcaagttcagacaggcatgaggccagaccagagctgagttttcaagataactccagccagaggtatgcgtgcatgtgcacatgtgggtacatgtatgtgtgtgcacgtgcatgtgtgtatgagtgtggactagagatggaatggctttctgagcaaagggaacagccaaggcaaaggcctgtgggctgcagggagagaacaaggtttgatctctgcactccctcctctaagctctgtgtcaacagcattttcaggacagcaggaaggattcccaaagagcacagcagcgagggcagttggagggaggcgtctgctgggacactgaaaccagggtggggtaaactcccctcgcacctcctcagactcagagcccccataaatcttccaggtgcaccccagcccttttccctctctctgtctgaactggggtggcatgatcccaggactgcaactccacgtgtctggattccccttactgactgcgtgaccctggccattttccctccacctttctctcagcgcccccatttgattactcggcctcaggggtgcactggggattcttagaggtaacacttcgaacggaaagccagaggtcctggtgccaaaatgcaaatgtgagggcttgaaagttcatcgggttttattttctctgttccgtttgcagtagctcttctttcttgttttctatagaacagtaaaaaactttatgcatttgaatatcgtgaaccttgtaattcatatgcaatataaaaactactagctatgcatggagaaatcaattgaagaacagtggcttagcatgtctttctcattctttgatggctacctcaaatcaaatcaatatgaacttggggtcaggcatggtggctcacacctgtaatcccaacacttggggaggccaaggcaggaggatcacttgagcgcaggaatttgagactagcttgggcaacatagcgggacctcatcttaatattaaaaaaaaaaaaaagagaaagaaaaaaagtgaacttgggaggtttgaatgacaactcgtatagctgaagtaatagatatattcaacttttaaaacttaattttcattagataacacatgcatatggtataacattctaggccaggtgcagtggctcacatctgtaatcccagcactttgggaggccaaggtgggcagattgcttgagcccaggagttgaagtctagcttgggcaagatggcaaaaccccatctctgcaaaaaacacaaaaaattagctaggtgtggtggtgtgcacttgtagtcccagctactcaggaagctgaggtcggggaatcatataagcccaggaggtggagactgcagtgagccacgaccacaccactgcactccagcctgggtgacagagcaataccctgtctcaaaaaaaaaaggaaaaaaaattcctttcactggggacaattacctttatgaatttcttccagaaatattaatgtatttgtatacacatttttttttgagacagggtctcactctgtcacccaggctggagtgcagggatgcaatcttggctcactgcagcctggatacccccaggctcaagcaatcctcccacctcaaccttgcgggtagcttggacaacatgtgtgcaccaccactcctggctaatttttgtattttttgtcaagatggggttttgccatgttacccaggctcgtctcaaactcctgacctcaagtgatctgcccgcctttgcccctcaaagtgctgggattacaggcatgagccaccatatttattttttctttacacaaaggaagcatattctacaccctgttttgccccggctctcttttaaaaaacagtgtatcttggataccattccatatcattccataaagttcatcttcatcctctttttttttttttttttttttttgagacagggtttcactctgtcgcccaggctggggtgcagtggcactatctcagcttacctcaacctcccgggctcaagtgatcctcccacctcagcctcctgagtggctggatgctgcttctttctttttgatggctgcaaagaattccattgtatagatgtgccataatttaatcataatatgtcctctttgatcatttaggtttttccaatcttttgctattacaagcaaggccacgttaaatatccctgggcatattattttgcacattatgaagatatctgtaggctaaatacctgtgtatggaattgctcagtgtgattacatggcatttaccactttggtagataaaggttgtatcctgttacatgtccacggatgaatttcttccagaaatattcatgtatttgtatacacattttttgagacagggtcacaaaaccgttaacacattattattattattattattattattatttcacattatttagggaagtttcatttttttgtgagctatcactgataatttcttatttactcatcatcttgtatttctcttccttgcacattggggaaatgtctattctagtttttaatgtaaatgttcttgtggcttttttagaaaaaatcaaaatgtgcacattaaaaagtttgaatggttcaaaaggtcctaaaaagggtccacagtggaaaaggctctcctttcccagcaggcccagatccctcctcagacacaagcctgtcgtcagtttcctgtgtagcttcccagagttggtcactatgtatgcaaatacacacacatttaaaatatacacactccacgtccacgtggaatgatgcaaagcatctaagtgcccgttaattcacaaccttgccaactcagtaatatccttgcgaatctaatagctagaaaatggtgtatctttttagttctaatgtattatatttattctattttctgtgagcttgaacatcttttcatatatttaaaagtcattggggccaggggtggtggctcatgcctgtaaccccagcactttgggaggccgaggcaggtagatcacctgaggtcagaagttcgagaccagcctggtcaacatggtgaaactcagtctctattaaaaatacaaaaaaaaaaaattaatcaggcatggtggctcgtgcctgtaatcccagctattgggaggctgaggcagaagaattgcttgaactggggaggtggaagttgcagtgagtggagatcgtgccactgtactccagcctgggcaacagagtgagactctgtctcaaaaaaaaatttttaaatgtcattggtgtttcccttttttgtaaaccttttatgttctttgcctagttttctatgaggtcattggctttttcagtgttggtttttagtaactctcgatttattaaaacatttatacatttatagctttgtttatgatgtatacatttataaccttgtctgtgatgcagatatttttccaatttgtcatctggcttttgaccttatctgtggtattctttgacaatacaaaaattttaatttatatctgatcagtttcatccagttgtttttttcttttttcatgatttctgagttttgtgtcatgcttagcaagatgctctctactctgaaattattttctgtaaaatatttttttcagccaggcatagtggctcacacctgcaatcccagaactttgggaggtagaggtggaaggattatttgagtccaggagttcaaggccagcctgggcaacagagcaagaccccgcctctattttttaaaagagaaatttttttaaaatactttttcccatgttttgtttgagcacttacattttcttaacttttttgtcgtgaaacataacacatagaaaaatgtaatgtaagtgtacaacttcatgaattgttataaattgaacatatagctttctggtactttcatggtttaacttcttacatttaaattttggtttcatctagactttattttgatataattgtgaaatagaaatccatttttattctaaaagaacactttttaaatgttcatgaaatgttttaaaatttattatataccaagcaagaaaaaatctcaacatagtcctcaaagcagaaattgcacaggacttattctttgtacagtgtaatgcacaaaaactaataagaaagccttaaaaacaaccctttattaaattactccattccaaattataatttcaatctacttagcacataagtattgatatacatttatcgaaattggccaaaagtgttttattattttttaaaagaaaaagcctagcaatggcttaagcaataaagtttttaattttaaagaataacaaacagcctcactaaatcagaggaaagaaataaaaagataaaagcaaaaattacagaactagaaaagggaccattccagcaaaattgataaatgaaaacaaaaatttgtttttcaaacataagagttaccaacggctggtgaatctaaaaagaagaaaaaacaaagtaaactaaattaaatgtgaagccatgaagagatttaaaattataagaaaataggccgtgcacggtggctcacgcctgtaatcccagcactttgggaggccgaggtgggtggatcatgaggtcaggagcttgagacccgcctggccaacatggtgaaaccccgtctctaccaaaaatacaaaaattagctggctgtggtagcatgagcctgtagtcccagctacttaggaggctgaggcgggagaatcacttgaacccaagaggtggaggttgcagtgagccgagaccttgccattgctctccagcctgggtggcagagtgagattccgtctcaaaaaataaataaataaataaagctgggcgcagtggctcatgcctctaatcacagcactttgggaggccgaggtgggcggatcacaaggttaggagatcgagaccatcctggctgacatggtgaaaccccgtctctactaaaaatacaaaaaatgagctgggcatggtggcgtgtgcctgtggtcccagctactcgggaggctgaggaaagagaatggcgtgaacctgggaggtggaggttgcagtgagctgagatcacgccactgcactccagcctgggcgacagagtgagactccatttcaaaaaaaaaaatacaagaacatattatatacaactgtgagctacaccatgtttgaacatcttgacaaaatgagcaactttctcaaaactaaattgccaaatgttcatttttaaaaagccaaaaataaccaaccaacacaatgaggataaatttaaagtgatcaagtttgatttttttaaaaaactgttcaaacatcttggtagtgctgggcaggaagttggctttcattctgggtgagatgagaaggctctaaggggcataggacctgatgtcatgggacctgatgcaggctctgtcttaatagctgactcctgcgtggagtaggttattgggggatgggtggacagagaccagggaggaggctggtgcaggaatcccagtgagaaatgatggtgtccaggctaggccatagcagtagaggaagcaagattctggaatgcacttggaaaatgaagccatctttgggcttgagctcaaggaagcatgaagctgcccctaactgaagtggggaaggtggtctggggagcagtttaggaggagagatcaggagctcagtttcggacttggaaattttgaaacgcacatgaggcatccaggtggagttgggagaattaaataatgctgaaaggtactcacttggcaagtagcaaatattcgctatattgtctgttcaactttgtcaactgcttttccagtagaaatgtagtgtccttatcacacatgcataaatgttaaactcaaaagtaaaatgaaatattttctcagtagatatgaataactttttaatttttttgttttttgacatgcggtctcactctgttgcccaggctggagtggggtggcgagatcatagctcactgcagcctcaaactcctgggctcaagcaatcctctgccacagcctcccgattagctgggactacaggcacacaccaccacgcccagctaatcttttattttttgtagagactgagttgcacaatgtagcccaagctggtctccaactcctgagctcaagctatcctcccacctcggcctcccaaagtgttgggattacaggcgtgagccactgcacctggctgctttttaattgtaatattcatcctccatccatcatacttagtgcaaatatttttccccacctattgccttcctatttctcttttatttcacgtcatttagggaagtttcatttttttgtgagctatcactgataatttcttatttactcatcatcttgtatttctcttccttacacattggggaaatgtctattctagtttttaatgtaaatgttcttgtggctttttttaaaaaaaaatcaaaatgtgcacattaaaaagtttgaatggttcaaagggtcctaaaaagggtccacagtgggaaaggctctcctgtcccagcaggcccagacccctcctcagacacaagcctgtcatcagtttcctgtgtagcttcccagagttggtctctatgtatgcaaatacacacacatttaaaatatacacatgccacagctttttaaaatttgaatttatgggccatgtgcagtggctcacgcctgtaaccccaacactttgggaggccgaggcaggtggatcacctgaggtcaggagttcgagaccaacctgaccaatatggtgaaaccccgtctctactaaaaatacaaaaattagctgggcatggtggtgggtgcctataatcccagcttctcaggaggttgagacaggagaatcgcttggacccaggaggcagaggttgcagtgagctgagatcgtgccactacactcaagtctaggcgacagagggagactccgtctcaaaaaaaaaaaaaaaaattgaatttagactcaggtgcagaggctcacgcctgtaatcccagcacttacggaggctgatgaggggagaatcacttgagtccagtagttcaagaccagcctgggcaacacagggaaactatgtctctacaaaaaaattaaaattagcctggcatggtggagtgtgcctgttgtctcacctactcaggagggtgaggcaggggaatcacttgaactcaggagtaggaggctgcatgagctatgattgcaccactgcactccagcctgggtgacagagcaagaccctgtgtcaaaaaaaaaaaaaaagaaaagaaaattagactaccatcatagatggtacaaacacttcccagtttgttgctttcgttttgtttgttgccatttttactatacagaaaaaaaaggcaataaagaatacattattataatatgttaatttctactgcattatttttaacaacttcattgaggtgtaatttacataccgtaaaatctatccattttaggtgtaggattcagtgatttctggtaaatttactgagttatgtgaccatcaccacaatctggttttgggacattttcattactgccataatattcctcaaacccatttagaatcattcctatttctgctcccaggcccaggcaaccagtaatctacttgctgtttcaatagatttgccttttctggatgttttacataaatagaatcatacaatacgtgatctttagtgatcttttttcacatggcataaacttggttcctttttatgttgaataatattccattgtatagatatgtcacagtttgtttctccattcatgagcttttgggtatttgggttgatttcactttttgactgttatggataatgctggtacaaacattcatatacaagtttttgtgtagatgtatattttcatttctcttggaatagacctaggcgtggaattgctggattagatggtaattctattgttttacattctaaggcaggggtccccaacccccaggctacagatcagtgtcggttcatggcctgttaggaactgggccgcacagcaggtggtgagcggccatcgggcgagtattactgcctgagctctgcctcctgtcggatcagcggtgccattagattctcataggagcacaaacccagttgtgaaatgcgcatgtgagggatctaggttgcgagtttctgatgagaatctaatgataaatgtaatgagcttgaatcatcccgaatccatcccccaaccccaacccccgtccggggaaaaaatgatctctcatgaaatcagtccctaggccaaaaagtctggggactgctgttctaaggaactgccaaaactgccaaactgtttttcagagtggctggaccattttacattcccaccggcaatatatacggtgtcctgtttctttacatcctcatcaacatgtgtctttttcattacagccattctatgtgggtgtgaaatgctatgtggctgtgtttttcatttccatgcagaaatttttaatttaattgcttagttaaaaataattctttaaatttaaaacactcatattgccatatgtatatttttatactacaaagtgatacaatttttgttaattttcttgccttgattactctttacctgtatagtatttaaatctttacataagatcacaattatagtgaatagtaatttattcaactcaaaatcttcataggatttagaaaatttaagtcctttaccaaagggattgacttctaacttcattaaaggttgcgaacagtatcaaatccttggtaaagccacattcaatctttggcactccaggattttgagctataactgtagtgatcactaatatgtcatttctaagctgacggtcataatgactaaaacctctcatagattttaaaatacttccttcaaagtcagtaaacattccaagttactaagctgttgaacaatttcttattttgaagattttttctgataagttccaaagtgtttctgatgaaggaaataaaagctgtccagagaaatctgagtcattgaggtgagcacagattccattggctgcttgtgctttcatcattacagtacaattaacttcagaagtcgagagatgctgcagaattttaagtacccaaagtttctcaacaagttgattttcaagcaaggtcattaactgggccattgtttttgccaatcctccaacttcagccatttgaatcttgtatgatgaactcacttgctggtaacctggaatatgctcctttggtggttgtgcctgataaaagtcaacaatacgtttacaattttttatcctcaattcagaacttggtattttcattaagtcacccagaagcgcaactgaactagcagtatctccagcataagttatttcatccgatactttctttttcaaaaatggcaagccacactattttatgatatcatatgcagattctacaaaatgcggctggttttcaatttttactgcacacagattcagaatttcaaatgtctgtactaaatcccttaagggaagttcattctgataacactgtaccagtttcttgacagatttaagttgcttttcttctaagccttctttagcagtctcttcaaaaagtttgatgacaccattaaggtccacaggcttcaaaacaccagttccacatggcgagggaggccttgggaaacatcatcatgatggaaggcaaaggggaagtaaagaccttcttcatggtggcaggaaagagacagcatattgctatgtattttaacaccacttatttccccccttttttctttcaatatcatggattaaatagtgtattttaaatgagtgtgaggctcacttggactctattccatccctttggccaatttttttccatttttaatccaagaatcttaaagtttgaatgatggtcaccttgttatatattttattatgtttggaagcttttttgctattgtctgatcctcccaacaaatagccttttgatagaattgcctttattcgtttctttatatctaattctaacttaagattagacttaaaagtaacttcagcggttttattatgaaatatttaaggcatataaatactgcctcttttctctaaatgactgctaatataattttaccaagttctgttaaagtatcctgttgtacataaagtgctgttgttttttatctgcctgttaacttagagtgggttttattttctttcactttctgtggtcgaaggcaagtatgtcttagtcagtttgggctgttataatgaaacactgtagactgggtggcttaaacaacagaaacttgtttctcacgttctgaaagccgggaagtccccaatcagggagccagcaggcctggtgtctggagaggatgcgcttcctggtttgcagacggcaccttctcattgtgtcctcacagggcagagagcaaaaagaaagggcaagcgctctccagcctcttcctttttcctttttttttttgtttgtttgagatggagtcttgctctgttgcccagactggagtgcggtggcatgatcttggctcaatgcaacctctgcctcctggcttcaagtgattctcctgcctcagcctcctgagtagctgggactacaggtgcctgccaccatgcctgactaatttttatgtttttattagagatggggtttcatcatgttggccagactggttttagactcctgacctcaagtgatctacctaccttggcctcccaaagtgctgggattacaggcgtgaaccaccgcacccggcctccagcctcttcttgtgagggcagtaatcccatcataaggggtccaccctcttgacctaatcacttcgcaaaggtcccacttccaaataccatcacactgggtatttaggcttcaccaggtgaattggtgggggaggtgggacacaaacattcagtccacggcaagtttttatctcaatttgctaaagcctctctttatttctcctgttacagtgtgataatgttttttaaaatatcatttagctggctgtggtgacccatgcctgcagtcccagctactcaggaggctaaggcaaaaggatcacatgaacctaggagtttgaatccagcctgggcaacatagaaagaccctgtctcttaaaaaaataaataaataaataaataaataaataaataaataaataaataaaggaaagaggctgggcacagtggctcatgcctataatcccagcactttgggaggccgaggcgggcagatcacctgaagtcgggagttcaagaccagcctgaccaacatggagaaaccccttctctactaaaaatacaaaattagccgggtgtagtggcacatgcctgtaatcccactacttgggaggctgaggcaagagaattgcttgaaccagaaggtggaggttgtggtgagccgagatcatgccattgcactccagcctgggcaacaagaatgaaactccatctcaaaaaaaaaaaaaaaaaaaaaaagaaagaaaagaaaagaagcacttaaagaggctgaggcaggcagatcacttgaagtcaggagttcaagaccagcctggccaacatggtgaaacctagtctctactaaaaatactagaattagccagacgtggtggcacatgcctgtaatcccagctactcgggaggctgaggcatgagacttgcttgaacctaggaggtggaggttgcagtgagctgagaacatgccattgcactccagcctgggcaacagagcaagactccatctcaagaaaaaagaaagagagagaaagagaaatatagacatatgttattagtcccccaggacctcttcaaaagatctctcttttcctttcttatttctaattaccatactacataccacctccattatgtcagaatgtgccctatttacgtggatttgtctaaagtcatggaactctgagttacattccccgtatttcacagagacacaatcagagcacacgctgatcttccgcctctcttcatttcctccatgtactctgtagctacctgttctcttctttgttcgtaggaagatctctgttgcgtggtgtgggagtttgtgccagctcatctttttattgtgctttctgtgagcagctatcaatgcctccaggtcttctctttaagaagaatgtttactctcaattgtttaaaaaactaactaaataggaagaagattgcaaatcctaacctttttggggttttatattgggggcaaaagttggcatctgcagtaaggattatttcattttcatctgaataaatgagcagtaataactttgctgacttgcagggctcattgtgatgccaaaggacattgtaaggtgcatatctgaattggaggaggaagaggggcatcctctgagccaggtgtggcaggaggtgacatcaaggagggttaggctgcgtaaacccagggacacaaggagctgcagtcggggaagaacaaggtctagcggatggagttggggggactgtgtctggagccaatgttctcagatgtgtctccggcaggcaggggcaagggctggtgcctggtttacagcattccttttggagtctggaatagtggggaaaactccctgtcttctctccccttaggagtctgcactatggaaacaacctgtcaatccagctcaaggcacacatagcccagacacccatgagaccctctccgtggggaccctagagcacctatcatgaacgaggagaccaagtaggtgatttttctctccccttcacctcctcttttcccctcctatctacttcgtcacttttctcctactgccaagactggtccctacccaaatctgccttactgggctgcccccaacacaacaaacctgcccttgaccatcattcagcatgagaatgtaatgatcagacacagaaaatcaggaagagttttgagacagcatctaatctacccattttagagatggtatgactgaggcttatataggaaaaaggcttgctcaaggtcacactatgagtgtatcagctaggataggccaggttacactgtagtacatgcaccctccaaagtcccagtgactcatggcaacaaaagtttatttcctgctcttgcttcctgtctcgtgtggattgactgggattgctcctccacatcatcctgtctcccacactcaggctaacagggtagccatgatttgcaatatttctggtccctggagtagaaaaaaagaaaaagtactgtcaattacaccttggttcttaaaacaactacaggcatgacatgagtcttttttagcatgtttcattgaccaaagcaagtttcatggctgtgcccaatttcaaggaggcagagaagtgtaatcccaccaaaggcctagaaagaggagaaagagtatctgtgaacagccctaatgcctaccacagagaattagtaacagagctgggccatggatctttcaaccatcgtcctctgtctccaagattattccccatggaaatctcaatgactgataatgatgccatgtgctttttctcctgaggatggttagccttaaagagatttgtgtcatatcctaaggggatagaacactaatgatggaaacaaaggtattgtgttagactggctggaggagaaatttgaggatgagaaacatcaccagaaatcacaccatccaggcactacttacttccatctggtgccatgctgccctggaccatttcttcatgggtagcatggatgctggacaccatagcctggaaaagaagttatgccctaggctatggccacatccttttgccgagatcacacaaaatccagggacttagccttgtctggtgccatctaggcctccaaggccttggaaatttactggcctgggaggcaagaaacctcagttctcctcctgcctctgtcatggacttgctgtgtgactgtgggcacaccctttgcccttccttggccatggtctttccgtctgcttagtggaggtggtgatccctgcctgaggatcatggtgtgagcatgtttcataaattctaagactctctgcctgagtgaggacctattgctattagcccagttgaggagaaatgaccagtggggctgacagtacatccaagtatgtctctactgcatgcccagggagcagctgggctctaaaccccaggacgcatagtactggcctcagcctctgggaattgggaaggctggcttctgggtggacctcctactcttttcagagttagaggtggactctctggagttgtgaggataaaataaggtatataaagcacttagacagtgcctaatacacagtgagtgctttccaagtgtgtactgctatgaggaaggacatagtaccagaaagtacatccggaaatgtgatagcatagtccactagatgatggaccaccatttagttggccaatccccaactgttggacatttaggttgtttccaatttttaataattataaataatcttgcagtgagcatctttgcaattaaatattgtatatacgttcatgatcgtttgccaaggttagagtcctagaaatggaattactgaatcaaaggaactgcacattatttaggcttttgctgtgtaaatgccccgtgccctctattggtacttctagaaggaggtggtttaagagttccagttcggccatcatgatggctcacacctgtaatcccagcactttgggaggccgaggtgggcagatcaccctgaggtcaggagtttgagcccagcctggccaacatggtgaaaccccatctgtactaaaaattacaaaaattagctgggcattgtggtgtgcacctgtaatcccagctactcgggaggctgaggcagaagaatcgcttgaacccgggaggcggaggctgcagtgagccgagattgcaccattgcactccagcctgggtgacagagcgagactctgtctcaaaaaaaaaagagttccagttcagaagggaagaatttgcttagcaaaagaggtgatggtctgtgttagctaggattagagttcactgtgagtagcagaaagcactaaacaacagtggcttaaccagaatggaagtgtatttccctgccatgtaacagaagtccaaagtcagtgagcacagggcagatgggcagctttaccttccaccttcctcagtatgggttccacctcatgattcaatatggctgcccaagatccagccatcccatcaacaatccagacaacaggaaggagcaaagaagaatagacaacatttctacttacattccactggccaaattacatggctacatataactgcaagggagactgggatataataatctattctagatgaccagagaatatttagtagttctaatactgaggaagaagggaagaacagattttgggagacaactagttgtctctgccatgaggttagctcagactgagagcagcataaatggttcatggaaataagaatgagtaatgcatcctcacgggactgtccacaggggatgaacaagaccattccagagagccagggtgcaggcacaaatggagtagggagggggtgcagaagaaacagactgatctctggagctgatccctgggcagagacatcaagactccatggagaggccacttccctgcctattttatgtcgctcaaatgtagggactggttcttgactgcttgacttccctagaaactcccttatcccccaactcaccttccccagatcaccttccccctagttcatctgtaccccactcacctgccctcaggtcacctgccccacaactcacctgttctccatctaatcttcctcccagctcccctgtcccccaaatcacctgcccccaatttgcttgtcctccagctcaccggttccccagctcatcttccttccagttcccctgtcccccagctcacctgcctgccctcagttcacctgtcccccagttcatcttcctcctagctcccctgtcccctagctcacctgtgccccagctcccctgtcccccagttcccctgtcccccagctcacctccccctcagctctcctgtcccccagctcatctgcccccagtttacctgtcccctagctcacctcccccccagtttacctgtcccccagctcacctccccccagtttgcctgtcccccagctcaactccccccaagttcccctgtccctcagctcatctgcccccagtttacctgtccccctcaactcacctatcttccctgtccctccagggctggctcctcatggaccccgttggcctccagctcggcaacaagaacctgtggagctgtcttgtgaggctgctcaccaaagacccagaatggctgaacgccaagatgaagttcttcctccccaacacggacctggattccaggaacgagaccttggaccctgaacagagagtcatcctgcaactcaacaagctgcatgtccagggttcggacacctggcagtctttcattcattgtgtgtgcatgcagctggaggtgcctctggacctggaggtgctgctgctgagtacttttggctatgatgatggtaagggcaggtgtgagagacgcaaagcagccgggccagtacctgcgtcatggggagccgggaggagcccagggacccacctaagtcagagagagggtgtagcccagccacgatctcaactctatatttctggacacttcccagaacaaatttcctaatgcgcccaaatctgctggggcctggaggacccctccttctacctggcttcactcgaattgctcgaattgctgagtgactgcttccagccacaaaatcccacatagcccataatgcccgagagatttatttcttcttttttggcgggggtgggggggtgttttttgtttgttgttgctcttgttgggttttgtttgtttgttttttatttttgagacaaggtcttgctctgttgcctaggctggagtgcagtggcacaatcatagctcactacagcatccaactccaggactcaggtgatccttcccacttcagcctcccaagtagctgagactacagtagaactataggtgcatgccaccacattaggctaatttttcattcttttgtagagacaggacatcactgtgttgcccaggctggtcttgaactcctggccttaagtgatcctcctcccttggcctcccaaagtgctgggattatagatgtgagccatcacacctggctagaggtgtttttgtttgtttgtttgttttgcaacatggtcagaaacagtgacggggagcgccttctgccctctactgatccgtggggatttcttgggcaccttctgtttgcacagcactgaggggaaacacaggacattgaggggcaacagcgtttttggagagaaaatgggaactcacttaagaaccctacttcaaggcagagtgtgggaattgcggggggcggggcggcgcatgcacatatgtgcagacatatgcagatacacacagtgcatatacatgtgggtatgtgcgtaaacccatgtacacatgcatgcaagtgtgcccacatgcataacacatgcatgcctgtgcacacacatacataaacttgcatgcacttgcatatacacacatttctgcccagcactgccttcaaagctcaccaccacattttctccacaacagataactgagtgttccatttagttctcccttgctgggtatctccctgtgagatgagccctgagccaggcgccaggccagagctggtccccagcatccctcgacagccccataccacattatactctcccctctcttgcagggttcaccagccagctgggagctgaggggaaaagccaacctgaatctcagctccaccatggtgaggactggagttggggggtgggaagggggtggtgagcactgtgaagtccccacttccaagctggaggaggctgtggaggctgtggtggctggtcacagccatttctcataggccatgctcttcgtctgtccctgacccatttgcaagtgtgtcaagcccctaactgtgtctcccagccccacctcctcctgcagtgactttcaaggctttagcttgtcccgttaccaattctaaagggtctaacctggaacccctcaggaagcctgttctcactttcctgcccgcaacccgcagggcctcatctcccagccccaaagtgtcaggcttcatggggaagccctaaccaccccctcccgacttgtacaccttggacttgacactcacccacagctgctgtcttcagcgggggagcctttggctgattttctgaaggagctcggaagggccagtgattaaataatgaccacctactgattcgtgggtcacactttcatctcagcaccttgatttctacagaagcattgactttacttatcgctgtgcatggcagtaatgccaacagaaaacccaccctataacctcagctccccagtgaatcaaaactgtccaagtccctggtccaataggcccgcatcactgagctggcatcattatctcatggctgtaaccagatctgattgatatttggccagtgagtccctttttaatataggatttgttaagatattgaagtgctctcgaactggttccagcctcctagctggacaaggagcccagggccctgctccaggggctgttcctattggtcacttagcttagctgtaggaggaccctgcttgacttcttaaaattctttcctgagtcctctttcctttctccctcccttcctttctgggtccccttccttcttgttttccttcttcctttctcaaactcttccagaaaggcattaaagtgattgttgaaaatccatacaatgagacaagactccagaaactattaagggaagtgaggaaatgtgggtgataagaaatcgggatgataaaaccctaacagaggagggaggttgcaggcctggccaaactcactgggaacttcacttatatgaccaccggcggcttccatagagcttggtccttccctgatggacagatggccatttagtgcttggagctgagtgtttctgggggctgctggctgttggccctgcttcctgcatcctggactgcaagactgccaggcccagaacatccaccttccaatgggggtgcctagaagtccactctgcaaatagaagctggtgttgacccagcctctgcctgctgcctgcctttccagtccctgcatgtgggtgtacttggctgcctgccacctgtctgtggactggagttccccaaaggttctgggtaacccctcagcccagatccccagaccccactcctccaccccttcctttgctttttcaggcctgaagcgcccacatcagagctgtgggtcctcaccccgccggaagcagtgcaagaagcagcagctaggtgggtaccagtgtggggaggaacataaacagagagatggggttgcctgggggccaagacccggaccctggaccttgtcccctgccaataagcctccagaggcccagtgactcttgtctcgcaagtttccaggagaaaaggactggaggtcttgcacaggcagaggagaggcctgggctggcagcgaaggggctccccacccatctggctgcatggggacttctctgaagagggctccgctgaaggagctggaagcaccatacaggtctcagcttcgctgtccaggcttttccagggacaccctatgtcctcagtgttgaaggagacccagggaggagaccagtttgggggtgagcagggatggggaggggtgaggaggcctgggagaaaccttcaagacagaggccctgggggcccatggggagacatggagctgcttagggcaggccaggccagtgagagaagaaaggggacttctctcattcttgaccagttctcagaatggtcctcgttctccacgagttgtcccactaactagagccttctctgcccccactgctgccaaccatggctataaccagaggattcacatccgctcaaaatagttcactaccttggcctttccccatagggttcccccaaaagcagccccagccctttccctgggtcacctgagacctctcaatgacccaggaattaaaaggttaacatctggcactgtaggggcccagctcccacagttccgatcggtaatgcctaggcctacaggttgttagtgctcacccctgggcattgcagaactgaaatattgggaagaggcactggggatccagatattacagaaagaggttgtttcaataagatattgcaaagtagctgggcgcggtggctcacacctgtaatcccagcactttggagggctgaggcaggtggatcagttgagcccaggaattcaatactagcctggccaacgtgacaaaaccttgtctctactaaaaatacaaaaattagctgggtgtggtggtgtgcacctgtagtcccagctactcaggaggctgaggcaggaggatcacttgagaccaggagtttgcggctacagtaagctaggatcgtgccactgcactggagcctgggcaagactgagactctgtctctgggaaaaaagaaaaaaaagagatgttgcaaaggaggtgccctattcccctccccccatcttactgaacccttacaccacgtgtactattgcagaatggatagaaccgtgacccacacttccccattcccacctgcctgtttaaatagctaccggagagcctatgctcccttagaactgattccttctggaagttggggtggcacagatccccctatggtgctcttgacacccccaccctcaccccatcatacatacacatctggggctacaggctcccaacagcccaatactggggcaagaagacatgagcagagggccggggggtcctctcctcatgccatgtccctgccccttgcagagttggccaagaagtacctgcagctcctgcggacctctgcccagcagcgctacaggagccaaatccctgggtcagggcagccccacgccttccaccaggtctatgtccctccaatcctgcgccgggccacagcatccttagacactccggagggggccattatgggggacgtcaaggtggaagatggtgctgacgtgagcatctcggacctcttcaacaccagggttaacaagggcccgagggtgaccgtgcttttggggaaggctggcatgggcaagaccacgctggcccaccggctctgccagaagtgggcagagggccatctgaactgtttccaggccctgttcctttttgaattccgccagctcaacttgatcacgaggttcctgacaccgtccgagctcctttttgatctgtacctgagccctgaatcggaccacgacactgtcttccagtacctggagaagaacgctgaccaagtcctgctgatctttgatgggctagatgaggccctccagcctatgggtcctgatggcccaggcccagtcctcacccttttctcccatctctgcaatgggaccctcctgcctggctgccgggtgatggctacctcccgtccagggaagctgcctgcctgcctgcctgcagaggcagccatggtccacatgttgggctttgatgggccacgggtggaagaatatgtgaatcacttcttcagcgcccagccatcgcgggagggggccctggtggagttacagacaaatggacgtctccgaagcctgtgtgcggtgcccgcactgtgccaagtcgcctgtctctgcctccaccatctgcttcctgaccacgccccaggccagtctgtggccctcctgcccaacatgactcagctctatatgcagatggtgctcgccctcagcccccctgggcacttgcccacctcgtccctactggacctgggggaggtggccctgaggggcctggagacagggaaggttatcttctatgcaaaagatattgctccacccttgatagcttttggggccactcacagcctgctgacttccttctgcgtctgcacaggccctgggcaccagcagacaggctatgctttcacccacctcagcctgcaggagtttcttgctgccctgcacctgatggccagccccaaggtgaacaaagacacacttacccagtatgttaccctccattcccgctgggtacagcggaccaaagctagactgggcctctcagaccacctccccaccttcctggcgggcctggcatcctgcacctgccgccccttccttagccacctggcgcagggcaatgaggactgtgtgggtgccaagcaggctgctgtagtgcaggtgttgaagaagttggccacccgcaagctcacagggccaaaggttgtagagctgtgtcactgtgtggatgagacacaggagcctgagctggccagtctcaccgcacaaagcctcccctatcaactgcccttccacaatttcccactgacctgcaccgacctggccaccctgaccaacatcctagagcacagggaggcccccatccacctggattttgatggctgtcccctggagccccactgccctgaggctctggtaggctgtgggcagatagagaatctcaggtgagtaagagtggaggaggaccggggaggggattgggcttttgggggagcagaggccaaccagtctagcaaacctctgccaagaggactggataagaatcttgaatatcagaacataatggcctgcaatgcaagagaggaagctccataccttgacaggacctctggagtccaaatggatcctcctcttgtctgtggtttctggactctcagtctctctgtcaatcatgggctgaaaccacagatccaggctgtctatagaggctggtggactttgggcaagtatatggagcacacacatgcacactgtctaggccagagtttcttcgttcctaaaacgaatctgtaacaatagccaactcatatggtcattgcaagaatgagatgggatggtgcatgaaaaacattttgtagcacagtgcctagcacagagcaaaggctcagtgtgcatattagctagagaaaaggctaggctgcagtaacagagaaacctcctccccaaatacagtaggttaaataatgtagaattttatttctctctcatggaagagtcagaggtaggtggtccaggtcagtggaatggctcagctccacgcagtcatgcaggtacccaggtccctcccattttgctccattatccccttgggaatcctatctgcacagtcaaagctacgtcatgggtatatctgtgctctggcttgggaacaaggaaagagcatggaggaacatgtcaatgcattaaagttcagtcctgaaactaggatacatcccttccactcacattccattggtgagaacatagtcacctggccacactgagctgcaagggaggctgggaaatgtgatctctggctgggaaaccatgttcctcatgatagctctattgctgtagatgaagtggagaatgggctttggtggacgattagaagtctcggccataatatgtatttgttagtactactgtattaagccccatctctctgaggggatggcgatgacttctcagctctgcccagcactgatcctctgacacttcgcttcttcttatggcagctttaagagcaggaagtgtggggatgcctttgcagaagccctctccaggagcttgccgacaatggggaggctgcagatgctggggtgagccaggccttggagctgagaagggtcttcagctggggatgcctggtactctcctccctctccttaatcctacacaaggcagattcctggccccgcccttttcccctcctcgttcctccccaccatctttgcttactctgtaggttagcaggaagtaaaatcactgcccgaggcatcagccacctggtgaaagctttgcctctctgtccacagctgaaagaagtcaggtgagtgatctccaggagggctcactgactggggagatgagccactgcccaggtcccagagtccccctggggcctgcatgttcctccaagtctgaccagtagtttttcagtgagacccagagagggaaggcatcagtccaagtactcagtagggctgagtccaaacccaaggctcccagagtccccagagcaaggcttccttcatctaatattttagactgtcttggaggagcatgagtgttaaggctccctccctctttctgaaatcccaggagaagggatagcagtgcgtaggcaggaatcaggcactgtgggtacacataactacatgaagcaccacacaccttcacatttgttcacacatgtctacacttgcacagaagtacacaggcatatgcaagaatatgcacccacacatgcccactcataggtgtgcacatgtatgcagcgcacacatgcacctttaactacatgtacacattttgatgccagcacactctaactaactaagcttgtatgcacaaatatactcctgccctgtgtctgggactcagtaccatggggaggagtgggaccagtgaccctcctccctggcagaacgctgctagtttatatggcacctttatgacatttagagaaggcaccacttcatccacacagatgcagcctgtcactaaggttcagcacttgttgagtgaaaataataagttggaccacagtccctattgtcgtctcggctgggcatctgtgaaccgtgattaagccaaggttcagaagtactgaacttgttgacatttttcttccctggctattgaaagtgactttaattttgtctttcatcacccaccattgttcttaatcaccctcactcccctcaactcatctgtctccccagctaggaacccaggcaaggctggcttgtgaacaggtggggaaagtgaggtcagagaggaatgcgcttggctcagggctctgggtgagtcagggccacagccgaggctggaagcgatgtctgcagcgtcccagtctagactttactcattgcctggggggcctatcccaggcacatcccaggcataagccctgggagcagggtgctaggtctcctcattgtgcctcatgaagaggccgtcagtctgtcttctagatcccttgagccgccaggcaaaaacttccccataggaacagaatagacccagaattgaggccagcagagggtctttcctcctagccgtgcctgctggaatccggcgagcaggccatcagctctttctgggcccctgtcttatgtctcccacatgagggtggccatcctgtcacttgctaactggggcttgcaagtgccccaaccccagggcaaagggactgggccttggtctcctcgcagttttcgggacaaccagctcagtgaccaggtggtgctgaacattgtggaggttctccctcacctaccacggctccggaagcttgagtaagtgatctttccactgcctctgcagcccagtccctctctatacctgattcaccccactcccttgcaaggcaaggaaggtctggggcccctggggtaggggattccactcctgacacctttgccacaatcttgcagcctgagcagcaacagcatctgcgtgtcaaccctactctgcttggcaagggtggcagtcacgtgtcctaccgtcaggatgcttcaggccaggtgagcagaaggaaagggatcttggccttatgggccttgagaaaagaggaggggaaagtgggatgggaaatggaggaggcccctcgtctgcaggataaatctgtgcataccctactgttttactcacagctttaccttcagaacctagctcaggcttggcacctggtacttggtatatattgaattaatggatggatgaaaagatggatgtatggatggatggctgaaaagatggatgggtggatgaaaagatggatggatgaatggatggctgaaaagatggatgggtggatgaaaagatggatggatggatggatggatggatggctgaaaagatggatgggtggatgaaaagatggatggatggatggatggatggatgaaaagatggatgggtggatgaaaagatggatggatggatggatggatggaaagattgatgggtggatgaaaagatgaatggatggatggatagatgaatggatggatggatagatggctagctgaaaagatggataggtgtgtgaaaagatggatggatggatggatggatggatggatggatggatggatggatggatgaaggaatgagtcaacaagtctacgaagcacaggcatagccaaaggaataattagctgtgtgttgccctccatggtgctgaaccaatatagccagttttgatcatggggtaggttaggtgtcatttttcttactcataaaaatttctattaaaaaaaattcagccgggctcagtggctcatgcctgtaattccaacactttggaaggccaaggcaagaggattacttgagctcaggagttcgagaccaacctgggcaacatagtctctacaaaaaatgaacaaaattaatggggcatggtggtgcatgcctgtggttccagctatttgggaggctgaggtgggaagattgcttgagccgtggaggttgaggctgcagtgaggtgtgaacacaccactgcactccagcctgagtagcagagtgagatctccatctcaaatttaaaaagaaaggaaaaaaaaaaactcacaacattcttaatttttattatatttcttgtgaaaattgtttttctgactttttaaaacactcttgcaggattcatcaagcaaagacataatcagtatttcacatgcctgatttaaaacacttttgctagttccgttatgtttccctgtcaattgcaaaatcagctttatctggatgtttgaacatttggggcagaaaagggtgtgcctgtggtgggtgatgtgctggtttccagtctctgggtttcatggcttggtatctgatcctgcagggaggcggacctcatcttccttctttccccgcccacagagacaactgcagagctacaaaggtaagaagccaagaggcggtgggcctggggccatccttagaagcaacttgggctcaggcagttgaggggaaaggtgaccaagagactaggaagagctggggtatgggaattcttcctgctactgctgcactgaggaatgaattactgcttaggttggcaaaggattttaacttcctctagcgtgtccagaccacatctggtccctgtggaaggaagcatccccagaagactcagaggaaggcaaacccttggggagaacataaagatactgttagactggcattactagatggtgaaaactctggaaaagcccttacaactgaaaaaagacagggagggcaattatggtacctacatcttagggttgttctgagaattaaatgagttactacacttaaggagtttagagcactgttggcatgcagtgggcagtcaaatgctggctattccagctgtgcatggattccagcttggccagtcttggatgggctgagaaaagggagctgcttttccctaaaagaccatcccaactgtgctctaccacactttgctctcctggctaagactcagagacagatgtatgtatgcccctgagcaatctctttcccttctctggatctcgattccttgcttgtataatgacctggtagtgtaggaccaatgttgctgggtgcggtggctcatgcctgtaatcctagcactttggaacgccaagcacgagaatctcttgattccaggtgttcaagaccagcctgggcaacatagcaagaccccatctctaaaaaaaaaaggcaggcgtggtggtgcacacctgtagtcccagctactcaagatgctgacgttgggaggatcgcttgagcctgggagcttgagccatgatcacaccactgtactccagcctgggtgacagagagggactctgtctcaaaaaatgacccactaggaccagtgtcactttcttttccctctaactgcttaaagctgtgatgctcagtaggatagccactagccccatatggctatttcaatttaaataaattaaaattttaatgctatttcaatttaaataaattaaaattttaatgctattttaatttaaataaattaaaattaagtaaaatgaaattttcagttcattagtcacattagctatatttcaactgctcagtggccataggtggctagtggctcccatagcaagtggtacagatgccaggacatttccatcattgcagaaagttctattaaacaggctggcatggtggctcatgtctgtaaccccagcactttgagaggctgagggggcaggatcgcttgaagctaggagttcaagaccagcctgggcaacaaagtgagacccccatctctacaaaaaaaaaaaaaaaatagctgggcatggtgattcactcctatagtaccagttactcaggaagccaaggtgggaggatcacttgagcccaggagtttgaggctgcagtgaactgggatagagccactgcactccagcttggggactgagtgggaccctgtctctaaaaaaaaaaaaatggttagcaccaatccaaaaagtctgtgaaacctggctcatgatgtcctagcttccctgcatcccctaacgctccctcagcccagtgggagagagtctgtggtttaccatagcctggactcactgcatacagctcatgctcctcgccttctgaaccacagacagcacatccacaaatggagaccatcacatcatcgacaatagcagcttctgtttactaaccttcgattttacacctatgctgggtacttggacatacattgtctcattcaatccttcaggtacctatgtgctagatgttgtcatccgttttagaaaagagaaaagggagccgactgcagtgatttgcccaaggccacatggctatacatggcagagccaaaatttgaataaaggttccatttgacctcaaacctgttgcccctcctgctctgctgaatcacatcttgagcatctgcaagcagtctcctttgttaccgactcactttgggttgtgcttcagggtcttcagcctctagaagccaaggaaagaggcttgatccaccaggccctagatgcctgagcccaggccaatgcttgatttgttcttgccagagctccagacctgcaggaaagtgacggccagaggaaaggggctcagagcagaagcttgacgctcaggtaccttggagggatctattgccttaggagagggatatgatatgggggaaagtccgaggcaagggagagcaggggcagggaggataaagggaaaagcagatgagggacagggaaaggattagccgggtgtggtgcccatcctggatagcccatcctggcttgaataaggagcatctgtcataataacaatagctgcaacttaatggaaccggctatctatatgccgggcattgcactagatgttttacatccattacctcactgtaattcctttagaatctctgtgaagtacacattattattcccctttgagggaggaggaaactgagtctcagacaggttaagtcccttgctcaagatcacccagctactaagaggtgtggctaggattagacccaggtctgtgggccccctgactcccccagcattggaagctggaggggccatggagtaggggctgtttgccctgagcccttctgtcccccactcctacccaaggctgcagaagtgtcagctccaggtccacgatgcggaggccctcatagccctgctccaggaaggccctcacctggaggaagtggagtgagtatcacgggaagccctggcgtaggagccaggaaaggaggttggagagggtgggcagggcctcgcctttgggtgggtggtgtgggggaggggcatgctgcctcatgaagaatttgggggaatcagatcattgtaacagctgctactattcagcacttgtcccgggtcaggtgctgtgctagggactgtacatgcctcctcgcattcactcctcacatctctgtgatgtaagcactgttactgtcctcattttatagaggaggaagttaagctgcagaaagataaacttgctcaaggccacacaggtaggaagagtctaggctagggttcaagcccagacagtctggctcgcagcctcatcctcataaccactgctacctctcttgctgagatctgccaagtagaaaccccaccacacctgggtctgccttccaaaccacagtccctcagggctccccccacccccttcatccttctcccagagtagagtgggataaccttctcttttcgggatggagaaattcccatggcgtccagcccctggctgaagccaataagagtagtgcttggggatggacggaggctctgtcacgaccctaggaggggcgcccctccaggaaacctccaagtgaacatgaaggcagatgatggaacgccaggatgtgttctgggtcgagtggccccacctcagggtaagacggataggggtgagggttgtcgtggtgatcacctcttgatcctggacctcgtcccattgggagaaccaggacagaattagaaggtggttttttaacaagctcacacacttctacctgcctcaccagcactgagcatgcccctccccgagtgccatcacctgcagaagcagccccatcacccgcctggttacgcagccacctcctagcccccttgcccttctcccacatttagtccctccagatggacctactggtagcgctcaaaactatcctcttttcctccacctttctagtccaacccaccctcatctcttacctggatgaccccctcgccttgccttccttgctggcttccctgctttcaccctggccacttccacctggcagagagtagatcacttttcactgatgcctgcccccttcactccttcccactgctcaggataaaacccacattctaaactcccaggtggtccagaaccctgcccccagcctcctaaaccccatctgaccccatccttccactcaatctccaatccagacacactggctctctttcaggtcctcatatgtgttatgccacagggcctttgaatgtactgcttctaccaccaggaacacccttcctccatctctcccccaaccttttacctactgaactcccagttatttcagcaagtagcttaagcaacaaataagccatccccgactcccagactaggtcagatgcccccataatcatgaagtttatcacaaaaagcaattatgtaacttgcagcataaaggaagagttgagggtggggccttgaaggcaggctgcctgggttcaaatccaggttctccctcgagcaagtgccttaactttactctgcacttaaccactctgcacttgagtttactcatcagtaaggtgaggataattacagtgcccacgtcatcggcactatgaggatgaaataggccaatagtcatagaagaacctaggatgttgccaggcatgtggtatggagtctgtcgatttcagttattatcaaggttcattcctgagagtgacactttgactaaagttagcaaaggaggagtaagtgatggggattgagggaggactccagccccacaatacagtgcattgggccccccgtctcagcctctcagggaaccagctggaagatgaaggctgtcggctgatggcagaggctgcatcccagctgcacatcgccaggaagctggagtgagttgtccaccccaccgctgggtaccagggaaggccctgtagagccccaggaggtccccgtgttcgtaatcagcagtaagggtgctgatccactgccacccctgcttcctcccaactccagcaaagtcaagatggtttgaccatgccttgccttcacctccggcatgagccactgtcttagtccaatcatctagcacccttacatgtgtaaaatgcgttcattatacatcagtggcttgcattccaattcatctttgtagctgccctggagcacggtggggtggggtgttgcactggggaggtgtcagggtgggtgggatgttgcactgtggaggtgtcatgctggggtgctagggtagggagtggtgtgttcctgtggggatacactgttggggtgaggggtggtgagatggaaaggtaggctattaggctgctgggtgtgctgtggtgttgcatggggtgagggtgatgtttgggtgggggtgtcttgggggtcttaggatcaagtgtgggtcgggtttggggagtgttgagattgggtagcagtggtttggggcctcagctttggatttcaatcttcgctctgtcacttagtagcattgtgaacctgggaaagtaattgaatgtctctgggcctcggtttcccctctgtaaaatgggatcacatgaaaccatatatgtacaaagccttttgtacagagtctggtatagtcagggctcagaaaatggtggttattttacagatgagaaaactgggggtcagagaggtgaaaacactgagttcttgctgtcaagctggacaactttattttccaaatgggatgggggtgtcatgcattttttggcttactcacacgcaccagaatcctttgagatcccctggcaagggacctaggacatccaggagtgacagccagcaagctgctgagccacagggaggggctagagctggctggggctgggtacctcagccacatgccaacggctgccttctcctgctctccacagcctcagtaacaacgggctttctgtggccggggtgcattgtgtgctgagggccgtgagtgcgtgctggaccctggcagagctgcacatcaggtgggagctccctcagaccacggtacccatccccccccccatcatgctctctctgaagcccttggaattccttctgggcccaggccttgggacgggcagaagatgctgctgctgtcccacccagaccccgttacagccggcacccctcttcctagctgctgtggatataggctgctcatggtttatacctctggagaactacccttggctgataagaaccagagacgcctggcagggtacaacccccactttcccctaacctagagtggccaatgacagaggcagagggcacaactctccagcccaaactctccagtgggacaaagctccctgggagactaggccaaggacttgctccgtttggcttccctcagtcccttactgtttctcctgagagcagaccgtcagttcatgatgtgcgcaactgacaagtgacatgcgaccccctaccccactcacagacccaggctctgccactagggaacccaatcctatttctgtaagtctcgccgttgagtatggggaggtgaggacagatgatgattaatgtcaactcagttcccactcggaggaaagcctcattctcaacccagtagggtggtccctgctttaaacacccctcaagggaggagagggaaaccgattcacccaaaaggtagattaggggaccttggttcactgtatatgatgattcaataaagggtccctagtgcattccaagcgatgccctgttcacttccaggaacttatactaaataaattatcacgattgtgcaaacacatttagctgtagggatgttcacctcagtattggttataataggaaaaaaaaagaaaatagctggaatgtttaaccgagggatattagttagactaagttacttccagagagaactcagtggaaccatagaaaaaaaaatgataatataggtgcagtttcaatatggaggggtgacggggagttattaagtaaacataaagaaatttctttagagacaggatcttgctctgttaccaaggctggagtacagtgacacaatcacagctcactgtaacctccaaatcctgggctcagcaatccatctctcttagtctcccaaagtgctgggattacagtcatgagtcactatgcctggcaattttttttatttttagtagagagagggtcttgctatattgaccaggctgttctcaaactcccgagctcatgtgatcctcctgccctggcctcccaaagagcaaggattataggtatgaaccactgcaccaggccaaacataaaaattttaactcattatcttaaaagattataaaagattataataaagcttttcaagatatgcaatggcagaaagaatggtataatctgggccaggtgctgtggctcatgctgtaaacccagcactttgggaggctgaggcagggggatcacctgaggtcaggagttcaagaccagcctggccaataggatgaaaccccgtctctactaaaaatacaaaaactagctgggcatggtggcgtgcacctgtaattccagctactcaggaggctgaggcaggagaatcgctggaacctgggaggcggaggttgcagtgagccgagatcatgccactgcactccagcctgggagacagagcaagactctgtctcaaattaaaaaaaaaaaaaaaaaaagagagagcatggtatatataatctgttcccatcaataatgatcaagtattaataattatttgtcatccctgcttctagcccttaaaaaactaatgtttaaaaagagaatctatagtttaatcccatgtttgtaaaacaaaaattattgcactagaaaatggaaggtttgaaggactcactccaaaggttaccaggggtaatccacacatactttgagcacagacagaacactgactagcagagagaggggtttcagtctggggctaaaagagagaacacagaatttgttttcttttaagacttgccaggaaatggggcttacttaggcaatagatacatttgtgaaatatctgtggtagaaagatttcagccctccaaaagctcagaggaagtcagaggggagtcagaggaagtggctgcagctggaggcagggggatggaacttgagaggtcctcccgggccaggggtaaaaagtgacaggccgggcacggtggctcacacctatcatcccagcactttgggaagcaaaggtgggaggatcacctgagcccagaagttcgagaccagagtagacaacatagactgtctctacatacttttttttttaattagctgggcctgatggcacaagcctgtaatcccagctactcaggaggctgaagtgggaggattgcttgagcccaggaggtggaggcttcagtgagccatgattgcaccactgcacaccagcttgggcaacagactgagaccttctctcaaaaagaaatagtaacagggagccaataacctctcgcttcctcacccctcttttgtcttcacagcctgcagcacaaaactgtgatcttcatgtttgcccaggagccagaggagcagaaggggccccaggagaggtagggcccgatttcaccccaactccatgctcagtcagggacattcccctctctaccctccacagctgggcagtgccagtcagtcaactgccagggtgacctggacaaattcacggaagagcgggaagtgagcaggcttggcaaaggatgcagccccaaagggggagggtccaaatccagaccacctccgcctctcatggtgcctgaaaggagccccagtgtgtaggatatagacagcaggccagggcaggagttgggtagccagagggggattccgggagactagagccctccagcttaaacccaggggattgcctggcctgtagctctggtcctggtcggaacttctgtatccctttcacacaaggacccattagggtcctggattgccccagcctagcgcatgggtagagactcagctctttgctcccggagcccacccacaatctcttctgtagagtctggactactgaaggctcgattccagctggggctgacatctctgaagcacagatgaggaggaggatgagattaatgataatagcagtcaaggtcaattgagtacttgccatgtatgcaccaagcaccaaactaaggcagttcacatacagtctcccattgagaggctgtgatttgtccagggtcacacaaccaggaagtggagaagccaaattggcaccaaggtctgattgactctaggtggaggatagggctcgatggtggaaggccaggctgaggatggattctggagatggcggacatggcctttgctcagcctggccttggtgatgtccctccagggctgcatttcttgacagcctcatgctccagatgccctctgagctgcctctgagctcccgaaggatgaggtacagtgatggcctccagccctgtgtgtgattccagccccctcccttcccctgctcagagcctgctcccaaacctgtgcccaggccccacatgctccctgaaggacacctgacctgctgtgtccaggggtcatggcctggcttccctacctcctacctcccctgcccagcccaccccagacagggctcacaaggcagccccgtcaaccaccttcccaagcccaggagaccccactccccttagctccctgacccccagcagctgaggggttgtggagactctgaaaagaggtgaaggggagcactgggctccttctgtcatgatcctggtgcctgggcctgggggctcccatcagcactcttccccccttctctcttggtctttgtctgtcctaatctccctctgtccctctgcctgtttctctcatttcttccctctctcatcgtgtatttctgttttatcagtttatttaactgttatttcagtcttatctgtcttcctctgatctgctctctctctctgaggtctctgtgccttggtttccttccatctgtgtctctgcccaccctctgcctatatgtgacatcctgtgggtgtcgtgtgtgttggtccctctttgtccgtctgtctaggtgccagatacatcccagtccctcctctcctgcaagcctcattctctgcctctgtgtctggggggtgggaaagcggctccttcccgcctctgttcagtggggcatgcagcactgtgtttttgtccctgggcaggctgacacattgtggcctccaagaaaagcacctagagcagctctgcaaggctctgggaggaagctgccacctcggtcacctccacctcgagtgagtggtttgtgtgttggaaggtgggtgggtggggccaattacagtgagttagtgttggtgtttgggtttggtttttaagatttagatcaactgttctttccctgctgaagtcagaaaccccttggagaatctggtgaaagttgtgactcttcctcccaagatacagatcccccatgtctgacacgctcggaggctcacccctggtccctcagaggtccacgaacctcagaataagaacctgggggagaccccagctgcccgtgccagatctgctgagatctggcctggcagcccagggctgtgtccagtttcaggaagttgagtaactggaatgcagggaccatgctgccagcaacccactccccacctgctaatgttctcccctcccttctccccacccccagcttctcaggcaatgctctgggggatgaaggtgcagcccggctggctcagctgctcccagggctgggagctctgcagtccttgaagtgagtagcccgctaggcagagcctctgaggctggggcagggggggagcattctctgtcccatccccctctttcctggggttattgtaaagattaaatcggaaaatgcatgaaaattgcccctaatacaatgtaagttctcggtgaaggctagctaatagatgattcttactcagagagtctgtgactcaataatcccacttctgattcaaggtttcacttctggaacctgtctccgcatctctgaacaggcttctgaggccaccctggggagggcaggtgtgggtgcgaagtatgactaacggctggcagttgttattctggccctggggtgccgggaggggctggggctgttagctggggtatggtcagggtagacagggagggtttgtaccagagaggacactcaagcagggtgcccagggctgccaaggatccctgagtacctggcagagagtgtgtaggaggaatccccaaagtttgcctgcaatggaccagagttcttgatccctaaatgcccttggtgcttttggctcacaaagcaccccctcctcccaggcacttctgggccaaagccagaggagcccaggggagaggtcacaggtcctatattccaggctgtctctgtgaacacgctttgctgtgtgattctgggcaagttacatcccctctccgagtccctggttcccagtcggtaaatacataaattgcaggcgtggcctctgttggtggctacgatctctgaaatgagtgctggggcctaaggaccccctgctcacaccctgtttttgtgcaatgctgggaaggaagggagttgccttggttcctgttcagggcctgcacctgggaaggaaggaaggtctaaccattgcaggcaaattacatgaagactggaggttttagtatgtcctcatgtgaccttcttattagtgtggactcgtgacctggtgctgtgagggtccacactcgccctaccagtgtccccgtgggaggggagtgtagcattaaatagtaaatagaaaacaataacaagttgacaggagaccctgaaagaaaggagacactttgttcctgctttctgcacaagagaccctgcattttcattttgtcctgggtaccacccctcccttatcaggtggagaaaaggaggcccagctccagccagaaagcactcctcagatccatcacagaccgagggacccactgggtgcccatctcagctctgtcaccaacatgtctcataaccttgggctagaccttgattctctctaggactctgtttccccatctccaccatgaggacttgcaaggggtgctctctgaccatcttgggttcagtgggttccgtcatctggaaccagggatccctcccccgccctgtgccctgaccacaaagaggatgtgtttgggtcctgagtgacctccattgtgccacccctgtgatctccagcctcagtgagaacggtttgtccctggatgccgtgttgggtttggttcggtgcttctccactctgcagtggctcttccgcttggacatcaggtgagcgtgcctctccgcccccagccctgcccctgtcccccatcccacaggtcatctgctcccacgtgggccccttgtccaccagtttcatgccaacctgtcatcctcagcaccttgggcagtaccagatctgcagagcatgtgatgggcgtccactgaatgaatgaatgatcaaatgaatgaataagtatggcctcacggatgctcaaatttctccaaattcaccattagagagttcattgactctgcctcactcgttctttggatagtccttagagatttttttttttaggattttttttttaattattatactttaagttctagggtacatgtgcacaacatacaggtttgttacatatgtatacatgtgccatgttggtatgctgcagagacttttaagaaaactgggggccaggcgcggtggctcacgcctgtaatcccagcattttgggaggccaaggtgggcggatcacgtgaggtcaggagtttgagaacagcctggccaacagggtgaaaccctgtctctgctaaaaataccaaaaaaaaaaaaaaaagtatctgggcgtggttgtgagcccttgtagtgccagccgctcaggagtcaggagaatcacttgaacccaggaggcgaaggttgcagtgagctgagatcgtgccactgcactccagcctgggcgacagagtgagactccatctcaaaaaaaaaaagaaaagaaaagaaaactgggagcttcctagttgccactggggactcagggacctgtcttaattgtgggagctgatgagaatataaaaggggaggcaccagccagccaagccaccccaggcactcagggcaccgcatccatgattttcaggggaggtctgcttccctttcccttccctaaggacccccaagaatgggaggtgccacagcagatggaccaggctcagttacttaactgctgcgagctcagagcaggtcccagagcctctccaggcctcagtttcctcatctgtaaaatggagataagaataattactggcctggcacagtggctcaagcctgtaatcccagcactttgggaggccaagacaggaggaggaggatcacctgagcctaggagtttgagaccagcctggacaacatggtgagacccccccatctctacagaaactttaaaaattagccaagcgtgatggcatgcacctacttgggaggctgaggtgggaggattgcttagactcaggagatcgaggctacagtgagttgtgatcacaccattgcactccagcctgggcaacagagcaagactctgtctcaaagaaaaaaaaatgtcaggcacaatggctcacatctgtaattccagcactttgggaggctaaggcaggaggatcgtttgagccatggagtttgagaccagcctgctcaacatggcaaaaccccatctctacaaaaaatacaaaaattagacagtcatggtggggcgttcctgtagtcccagctacttgggaggctgaggcagtaggatcagttgagcccggggaaggttgaggctgcagtgagccatgactgcaccactgcacaccagcctgggcgacagagcaagaccctttcttcgaaacaacaacaaagaagaatttcttacctcattgtttattgtgagaatcaaatgagaaatgtcgatggtgtgctttgcatgtgacttgatacatgtaattgttgcttaatctattccttgtttgctaagaaagcaggccaccccaggccctccttgccctgaccagtctgggttcttgccactgccagggaagttggtctttgaccattttcaaactgctgcttcctctctgcttccagctttgaaagccaacacatcctcctgagaggggacaagacaagcaggtgaggagggaacgctcggggtgggggagtcccctcccgctctggtccccgtctgttggaggtccccccacccccagacccatgctgaccactcagctctcagttaaaccacccaagtccggcacactaggtttaatcaccacttcagtaaccaccgccccccccataaattgtcagtaatcaactgccctgttttccccttggaaggaggcaatgcagatgggaggaagggagggatatggttgggagaggtcccagagcagggcaggtgcccgcagattgctgctgtgtgggaggagacaggagaacatttgtgcttctgcgtttcggggaattttgtagacccaccgctccatacatgtcactgccctttcacgctctgaaggcaggggccgtgggtgctctgaaaaaacattttccccgtcttcgcagtaaacaaccaatactagtttagctcttcatgatgttcccggctgccctctagtgggaccaggcctcttggcctcacttgggagcagtggcagcggacagggtgggcccatgtgcagctggctgggtggagagagtcacagctagtgtgtcaagaaaaggcactgccgtacagatgggctgtcaggagtcaggggtggctcaagcctgggtggtcttgcttcccaggataggatctctgtttctggggaacccccgggttcttgaggcccaaagaactgacgtacagggaggcagaagtcatgtgatgccaagcagtggtcagagaggctctgtcttgggtcctcctgcctgctcacctggacaggaacaagctgctggcttttctaactcaggcttcccttccctgagcctcagtttccccatctgaacaatgagggactgagctaggatctagtgactgcattgtctctgagatgccttccagccctgactttccaagtctgggagtccaatgtgggtgatctgaactttcctttctaaacgatccccctcctaggggtatatgggctgggctgggagtccgagggggtgatctgaactttcctttctaaatgatccccctcctagggatatgtgggccactggatctttgccagacttcccagctgcagccaagttcttagggttccgtcagcgctgcatccccaggagcctctggtactgtcccagcccttcttgtttgggggtaaccataatagggatgaggcgtcagagggggcagagctggcagggggctagggctggggattgggatagagggaagagagggagtttaagagaaaaggaaaagaaagaggcgtgggtgtgaggggtgctgggagttggggagctctggcccctgacgggcagctcagctggcccatgccccgcattctccttggagagaagattccacatttctgtgaagcaaacagagcagctcagccactccctgcctggggtctccatctgctctgggggacacccactttccagaaagaaaggggttggcctgtctccccactaatacactccccatctgcaagctctgccatgagaggctgtgagaccctgacttggccccacctctctctaggcctccagggaagtggaggcaagtgaggccctgggaaggacatttcaatttcactgttagccccagggcaatggggagccacgggggtaacagggagaggcctggtcagatgtgcagtgttaaaatgtgagacacttgtggggcagagagggattaaagggaggcaagagtggaagcccagagggtgttaaatggtcaaggtgagtgaggatggtggcctgggctctggagggggcggtggggaggacttggagagtcactgacaagggcagctgggaactcagggtcctgcactgtcactgtcagggcaggaggattgggggctgcaggggagactcgagagggaagcgagtgccccacaggggaaggggcctgtggcctcccacttagagtgagggatgctgggagaaggatagagcccctggggctagccagggaccctgggctttctctgattccctgccctgcccattgcccctttgcagcctcagtgagtgtcctctggagcccccaagcctcacccgcctctgtgccactctgaaggactgcccgggacccctggaactgcagtaagtaacgaggacacagccccagagggcaccatgtggggatctgcccagtgacctgggagggggcttcttggttagaagacaggtgagtctttctcgatttcttcccaccagccctgccccatgagagtcccctggcctttggtagaaacttggctgtctctcggcagcccccagccttaggcagcgcatgtctcccactgggagatgctgtgctggactggggaagccttcacctgcaccatccactcaactcagggcacctgggagccctgtccacctccaaccccacccctggagcctcaccagggcacccacttgaacctgcctgcatggctggagcgtagcacttctgaaagcccttcctcaaggcacccccactctccttggggttaccacctcactcgccccagaacatctgggtctgtaaccagagactggacctggaatcaggactcttggctcaaaagggatttaactccccgggcctcagcttcttcatctgcacagtggatggtcagcctttccttttattgtcattgtggtgattctattatagtaattaccttaaaataaagaaatccaagacaaaacctgcctcacctaaacaacctcttctctcatcaaatccatgttgtcatgtgtccacaggactgtctactccttgcctatttgcatattcagtttctacctgtttgcagtcataaactagtttcatgcactgtgttttcatagcatctgtgttttccattttgcttcagtcttttttcttgctttctagcccccatctcaaatgcccttccagcccttccaaccagataatccggtttgaccccctggagtgtggccttcccatgtccttctccaggttcaaacatataaccacaaaaccattatcagacctacactattttttttttctgagacagagttttgctcttgttgcccaggctggagtgcaatggcgtgatctcggcttgctgccacctctgcctcctgggttcaagcaattctcctgcctcagcctcctgagtagctgggattacaggcgcccgccatcatgcctggctaatttttgtatttttagtagaggcagggtttcaccatgttggccaggctggtctcgaactcctgacctcaagtgatccaccttcctcagcctcccaaagtgttgggattacaggcttgagccactgcacctggcccagacctaccctattaatggcaattccttaaagtcaaccaatggtcagtggtccctgattgtctcttacctgttttcacagagtatatactgatgccttttaatactaaattgccacagtacgggacgagctgcaagttactccaccacacccttctagagtctagatcaagggtgtccaatcttttggcttccctgggccacattggaagaagaaaaagaattgtcttgggccacacataaaatacactaacactagcgatagctgatgtgctaaaaaaaaaaaacaaaactccaaagaaaaatctcatagtgttttaagaaagtttacgaatttttgttaggccgtattcaaagccatcctaggctgcatgcagcaggccatgtggcttggacaacttggtctagattgaaatccaaactgcttctaggtgttgtgttttgttttgtgtagcactgcagtcagtgctacaaaaagcactcttacgtgatttgactgttaagtacctattgtataccatgcactgggccagatcctgggaacacaaggagactgggatgcgggctctgctggccaaggcaaatcatctgcagaggaagcttaatataaaaagcccactggcggcccggcacggtgactcacgcctataatcccagcactttgggaggccgaggtggctggatcatgaggtcaggagttcgagactagcctggccaacatagtgaaaccccatctctactaaaaatacaaaaattagccaggcatggtggtgcacccctgtaatcccagctactctggaggcaggcaggagacttgcttgaacccgggaggcagagattgtggtgagccaagactgcgccactgtcctccagcctgggcaacagagcaagactctgtctcaaataaataaataaataaataaataaataaataaataaagcccactggcagcactgggcggtctgagcacaggtgggagtttcaggtccccctccattacctgtggttggggaaagtgcaatagtgaatatgaaagcactttgtcaactgtagagtactgtgatcacttgcaggattattgctataaatagtcatcaaggtactcaatgctgaagtccagtgattccccggggttccaccggggaagccagggaagatagattgtggggctccatcccccctccctgaattcaagcactgcaggtctactttgcctgtgtacacatgggcataccatgtgggatgtggtaaagagtaaagattccattgctttaaaaaaaaaaaaaaggagggtgtaatcacctcctttgccaaccagagcccatggtgtatttgggggtctggtgggacaccatacgggatgtgtttctggaaagaccaccctcaataaaggccccagtcctgactgtgcctcaggggcccatgcccagtccctggggcagaaagggtagagttgggcctccagcctgggccctggcagaggctccaacatgaggctgctcctcccgccctaccctgccccccagctcactgagccagttgatgtagggcccctgtactccatgcctcccctccaaacagccagaggagaaagcagcagagatgggccaggcccttggaggccccggagaggggagagggcagcctgcagaggatgaaggaacagaaagagaggaagggggaggtggagaaggcagaaggagaacatagtagaggtctgcgggggttgggaagtggctccaggccccccaggaaggggctgtaggtaaaccccagggaactcagtgtcttgagttgtcctggtcctccatctagagcagagacagcaaggcaggtatctggagtttctcctaaatgcactgggttctgacgaattatctgaacaatgatgagctggttggtctggtgttaatgggcaactagagacccaagccagtccctgtctccttcgctgacctgttgtatgctgaatttccactgtcatatccactcctctgggttaaggcagcattgttttcttttcttttttatttttttgagatagagactcgctctgtcacccaggctggagtgcagtggtacgatcttggctcactgcaacctctgcctcccaggttcaagtgattcccatgcctcagcctcctgagtagctattactacaggtgtgcaccaccacgcctggctaatttttttttcgttttttgtagtagaggtggaatttcaccatgttgcccaggctggtcccagactcctgacctcagatgatccacccacctcagcctcccaaagtgctgcgattacaggcatgagccaccatgcccagctgcattcttttcttaacaaacatgttttgcggaacactaaccttcatggcccttaaaaattaattctgctagtccatttagtttggggaaaagtctgctgtagctccttggaaattcataatgcacagcagcctatcgcagcctcagagaagccctgcagcaaacaaaaccatttaatttggcttaaccccgtatttcccaaacttaaaagaccttcctcttcttccagcctcacggataacccatggacccagtgctgggagggaatgtttcaggtgaccctggttaggtcccatctccagaaggctctggctatgaggccgtgctccctgctttcctggaaggtttcccccacctcatccacctgctttgtttcacagattgtcctgtgagttcctgagtgaccagagcctggagactctactggactgcttacctcaactccctcagctgagcctgctgcagtaagacgagagtttttcctatttcccggttccttgtgctcgtgtttctaaggctcctccatggcaaagctgtacctgccctctaacccctcaaccccccgcctttaccccctccaaccccctctacccgctccattctttccttaggttgttttatcattttacctggcacaactggggactccaatctgcttccagctccaccctaatactttgtcaacctcagggggcgtcgtttgcctcctctgcgtctcagtttcctcatctgacaaatgggattaatattccccgcccattcccccagagttgggactcaaataagttattctaaaatcaccttaagaaatggaagatctgtgacaaatgagctgtccaacttctccccacccacggagggtcacccactcgtagaaaggggctgtacagatgtaggtcctgtacttatcacatgctgctttttaaaggtcaccgtcaaactcgcaaaaagggaatttaagcagaattcccccaaagtattaaaactattttctaatttcagctcagactggttagaattttaaaagtatttaggccatgtgtggtggctcatgcctgtaatcccggcactttgggaggccgaggcgggcagatcacctgaggtcaggagtttgagaccagcctggccaatgtggtgaaaccccgtctctactaaaaatacaaaaattagcccggtgtggtggtgggtgcctgtaattccagctacttgggaggctgaggcaggagaattgcttgaacttgggaggcggaggttgcagtgagccgagatcgcgccattgcactccagcttgggcgacaagagtgaaactccatctcagaaaaaaaaaaagaaaaaaagaaaaagaaagaattttagaaggatttactttaaacagtcttctagtggtgggaggcggggtgggaagcagctgcagctaagatgaaaaaatacagcaggaaagtaaatcataatgttaataacatcggtgcaaaggctggggctctctgggatgtctaagatggctcgcatcacctccaggatctcgcttatgcttgggttttatctgggagggagggaggagacgtgacaacattccaggggcaagtacagcccagctcacagcaccccatggcaccctgtaatagtcccaccctgcccggagataatgagtcagaaaggactcctttggacataaaaggtggcaggttaaaattgaacaggttggaaacctcagaccggagaggaacttctctttgcctaaatcacacagcttcacccctgactcctcgtccgcctttggagtggcgtggccagcctgaccccttgccagggtttaaactttgtagtactcaacgtgtagtgcttgtggccctactgtgggccaggcattgtgtgacgacacagcagaaaaagttgaccatgtccttatcttcttggagctcctcttacaatagtgggagctgaaaaataagtaaagtaaaatcaaataagatgaacttagccagtgataagagaattttctcgggatgtggtgaagagtggctggagaggtgatttagatgtggcagaagccatcagggaacatctctgaggagggatgctgagctgggacctaaaggaagagagagagctcgccttgtgaagagcagggaactgcattccaggcagagggaacggcatgtgtgaggccctgaggcatgattaagcttggtgggctccaggaacagcgcggaaccgagacagccagagcacagtgactggcagggacagtcctaggagaggaggaagagagagatgggctcgggttgggttgcatggggcctggcacccatggggagagtttagacttttgttcctgggaacatgaaagggagaggaataatttgggttttctttctttcttttttgtgggggagggtctcgctctgtcacacaggctggagtgcaatggcgcaatctcggctcactgcaacctccgcctcccaggttcaggcaattcttgtgcctcagcctcccaagtagctgggattacaggcgtgcaccatcatgcccagctaatttttgtatttttagtagagacagagtttaaccatgttgaccatgctggtctcaaactcccgacctcaagtgatccgcccgcctcggcttcccaaagtactgagattacaggcaggagccactgcacccgttcctcatttgggttttcaaaagttcagactgagtgctgggtagagaatggattgggagatacgagtggaaatgagagtgggaagagatgtgtgcagcagggtgaagggtgctgggggctgatcactgctggggtgggatagaagttggtagactcagggtggatcttgagagtggaatttacagacaagctgatagggggattactggatgaggcaaatggaggtgctgaggctgcctctgagggcagagtggacccatctcactttctctaaggcagtggtttccaactgggggtgattttcacccttgggagtcatttggaaatatctggagatatttttggtggtcatgactgcgggtgaggggtgctgctactggcatcgaatgaatagagatctgggatgctgctgaacatcctatagggcacaggagagcccacaacaaagaattattggacctcacatctcaatagtgctaaggtttaaaaactgtgtctgaagggcctgaagcttcccactctctgtgagcaaggactcgcctgtgaaatctgtgcttgcaggtaaaaacaatagtaataataacagcaagcacaggtcccatgcccggcagtgcacctgcatgatgtaattaaatcctcatatacctcgagagtcatacatgacgagtcttgatttccagataaggaaactgaagctcagagaggtgaagtcacttctccaaggtcacacagccaataagcagaactgggactcaaatccaaatctgcctgtccctcagccctatttgtgcctcttgatcccctgcctgcttccctattgccttgctgagctgctagccctccccaccctccctttccttaccctccaggctagccaggttccttgtccactcatcttgccggatctaccccctttccttttcaggctgagccagacgggactgtccccgaaaagccccttcctgctggccaacaccttaagcctgtgtccacgggttaaaaaggtggatctcaggtgggcattcccctgggacagccaggactcgtcctgaagggttgtgcctggagtctggtgggtatgagggggtaggatgaagacagtaggacccaactagaggctgggcttccggaggaggggtgctggccccgtgggggcatcctgaggctgtggccacagctgtctgacccaggtcctgtctgatccaggtccctgcaccatgcaactttgcacttcagatccaacgaggaggaggaaggcgtgtgctgtgggtaagcccccttgaaccatgcctaggcagctagttgatgttggggaccagtagatctgcctcctgggtggccagagcagtatgcagactgcctaccacaaaacattcccctggaacaaccctgcagagggacttgtttcacccagcatgaagaaacacaggtccgggtgggatctactgtgggggtgggagcagtggattctggacacttccagagggtccaagcttgagtggagacccacctggagcccagaggctgtgccctgggctagccaggccggagggggtctcagtggccaaacgccccatcccctgcttgtcccctttacctccgtccagcaggttcacaggctgcagcctcagccaggagcacgtagagtcactctgctggttgctgagcaagtgtaaagacctcagccaggtggagtaagttgagggaggaggaggaaggagaggagcatggacgcatgcctgaggggcactgaagggggtatgagggtccgtgtgtgcacatacactcatgtgtgcctgcctacacctctcaggaccagctgtcagggatgcctgggtcacatacccaaagcttccctgaatcaattttctctctcccgcccccactctcgccatggtggagctagttccatggtgtgccctctgacttgggcagccctcagcctcaagtatgtgcaagctctgctggcagatgggggctaaaacgcaggattcattgttggcccagcaggtggttaaaagtaccggatgactctgcctgaggagggacgcagagccagccagggtggggtcttgcagtctcttgtattgttgagatgtggtatctgcgtggcctgtcttggatattcaaatagtcagcccctgcatgggtggaataataatagctaacagctactgagcactttctccactgttctaagtgcttgacatgttctttttatgtttcccatatccctggatactagtattgttctcattttacagatgagggaactgagacacagagggtgtaagaacttgcccaaggtcacacagctagtaaaatgcagagtccctgctcagacgcattgggaatccagcctaggaccagtgggaaatagagagagcagtccgccaaaaatgccacacaattttcatttctgttgtgatgtggcagagaagaaaaatgtgactgataaaatcatggatttcttttttttttaagacctggggtctcactctgttgcccaggctggagtgcagtggtgcaatgataggtcactgcagcctccaactcctgggctcaagcgatcctcccacctcagcctctggagtagctgggactacaggcacacaccaacatgcctggctaatagtttagttttgtaagagatgaagtctcaccatgttccccaggttggtctcaaacttctgagctcaggtgatcctcagcctcccaggttgctgagattacaggcatgagccgctgtgcttggaatgtattttaaacagatatgaataagaaatatgtctttgagttttttgtttttcattatagagggaaatttttcttttctttctttctttttttttagatggagtctttctctgctgcccaggctggaatgcagtggcgcaatttcggctcactgcaacttccgcctcccaggttcaagcaattctcctgcctcagcctcccaaggagctgagattacaggcatgagccaccatgcctggctaattttggtatttttagtagagacggggtttcaccatgttggccaggctggtcttgaactcctgacctcaggcgatccgcctgcctcgccctcccaaagtgctgggattacagccttgagccaccgcacccagccaatttttcttattttaaagactattttattaagtggcttcataagacagaccaatttttaaatgacgtttctcaggaaaagatgaaattaacaaacatcaaaaatgtcacagacctaggaggaaaatcagatgttccgggacacactggttatattatttctgaaactgtagttaaaactagctgggcgtggtggctcacgcctgtaatcccagcactttgggaggccaaagcgggtggatcacctgaggtcaggagtttgagaccagcctgatcaacatggtgaaaacccgtctctactaaaaatacaaaaataattagccaggcatagtggcacatgcctgtaatcccagctacttgggaggctgaggcaggagaatctcttgaacctgggagacagaggtcgcagtgagccaagatcgtgccattgcactccagcctgggcaacagagcaagactccatctcaaaataaataaataaataaaaccacagaatgctgcaatgaagggaagtaagaaacttcaggtgaggtttccaatattgatattgcattcccagattaaaagaagaaatctatgggtttaatgcatcctgcaaacatttttttttcctgaatttcctctcattcaaaaactgtggatcccaaatgatgccggccaagggcgtggtgaaggcaaattggtttttctttaacccttgaaagcctgctggaggcacctgagctatgagtggtcacccgatatggaagaggaccaagaggatgggtttactgtggtgctggggaggggatagtagcagagaacgtaggagttgctggtcattctagtggtgatggaagggatggtgatggtggtactgggcttggtggtgtagaattgtggtgataatgaaagtggtggtggtgatggtggtaatactggtggtggtgacattggtggtggtggtgatggtggtgatactggtgatggtggtgatggtggtggcgctggtgaccctgacatggggtccagtagcagtgacagtggatgcaggctcctggtgactgaggagcatctcaggctgaggaggcacctctgatccccgccactgctccttaccccctacagtctctcagcaaacctgctgggcgacagcggactcagatgccttctggaatgtctgccgcaggtgcccatctccggtttgcttgagtaagtggaaagcagcataaaggacagatagcaaggaggaaggctcccctaggccaaaagcatgatgggggctccttctgagggcatcccccagagcaccagaggacaaggactgtggagggcaaggggcaattcttcccttgccttcactcccctggccttgggtcctttcctctgtccctcacacccaccatgggcagatcctccaccaaacacccaagagaggctgtgattcgtggcagggtgacacacccctacagccaaactgacctggggacagggaagcaacattccatccccaaccagctgatgcgggattgcagctgcctggctcctggtccatcccgtccctgaaattcttctgacccaatctgtggaacataaatgtggagatgtccctgtggcaggcaaggggccttaggaagtcatccacatggttgccccatctctcccgtgacctgctggagtgacagccagctccaggacaccacttgttgctaggcaactgagcttcgtgctcgggagtccttgacccatgcggggctagagctgccagcctggccttgccagtgcccagaccccagaccacaggggcagcgggcagggtgagtgcagcgctcaaggactcagggtctggtgccagttctgcctgtgtggggatggtatccttctgggcctcagtgtgtccatctggagaatagatgcttagacatggaggcttctcttcttggaaatgacagctggaagggagatggagggggctgggcagggctccaaggaggtcctgccctcactcccattctcatctccatttcccttctagtctgagtcacaacagcatttctcaggaaagtgccctgtacctgctggagacactgccctcctgcccacgtgtccgggaggcctcagtgaagtaaggggatgttggtccccgaaaagcccctttctgctggccaacaggtgcccctggctgatgatgggagaagcaaggcacccacactttgtggccttccatctgggtggcttggagcaacctctgcctttctctgaatctcagggtttcctgggcatgggatcataatttctatcccctgatgcccgggtgccatggggaccatggaggccatggggtgggaaggccaggtattgccatgctcacagaatgagtttgggggtctcctctggttctgaggcctccatcctcccttgtccttgtgggtgcagccccgcttccctctctgtgccctgtgggtgccctaggtgcctaggaagctggcatgtctgggcaccgtgcttccccaggcccttctctctgcagcctgggctctgagcagagcttccggattcacttctccagagaggaccaggctgggaagacactcaggtaatccctgcagggtgatgggacaggggacagagaggggagaggaggctgaccctatggcggcctccatggccccctcttccctgggccctctcctcctttagagagcagcttcaagctcactgcctgggtctgttcctccagatctgcccccgatgccctggtaactccagtctcagccagggccttggcattgaacttgtgcctcttagcccaccatcctaagcccaactcagcccaacattctcttccttgccatgtcctgactacaggccttgaggcttctgagtgtcacggttaaagattttgaagccaactgaaaataaatccctgatctgccacttaccagctatgtggccctggacaagtaaaatggggataataacacaacctaccccttagggttattgtgaggattaaatgagttaataagtataaagtgccaggaaaaggtctggctcatgggagtgctgtcagcagttattgtaactgttattattattattattattattattattattatcattatcattacccctggtagccctgactcactgccacggccagttcctttacatgtcttacttcagctgtgaacagggcctccaaactgatccctgcatcttatcaggcctcctcccctccattcactccacagcccccagagggatcttcacaacacacatctgacagtgcccctctgctactctgtgcccctcagtggctccccattaaccccagggtgaagttcaaagtccctagcatcttctccctcacagtctgatccaactgtcaccttccaccatgttccttcccacctcccccacaccacacacacgccctacacaccaacccatataccacagatacaccaagcacacccaaacacaccacacagcacgcagcacacacaacacacgcacaccacacagcacacacaacacacaaacgcaccacataccatacacataccacatacacacacatacaccacacacaccacacaatacacacaccccacaaaaacaaaccccccacatacatacctggcacattacaaatacagcacacacaccacataatacctacaaataccacatacacaacacacacacacacacacagttcagccataaccttcactatttgctcctagatcaagccctgcctgaagattctctgcctctgctcacaccgcactcagctcaacattctcttccttgccttttctgagataaaattctcccaatcctttaacacccagctcaaacatcagcccctcctggaagtatcccagcagccctgcctcatcagagtgaactgccccgaggttcactgggccctttcacttggctgggcccgtctgctggccacccagggctgagatgcctggacagcagagccccacggagaatcccaggcacacctccctccccagggagctcagccagtgctggtccgggagagtaaggcagtggttaagagcttggggtctgcagtcagactgacctggatggaaaccagattctgcccttctttcttatctgctgtgtgtccttgggttagtcagtttccccacctctaattggtgctatgagaattaaaggagaccctgcgggtaaggcaggaagtcccatgcacccagaggctggcacagtgcctgacctagagtcagcctccctaaataacttactcctaatactttcttacagggggtgtgggaggttcctccccaaagagacaggaagctcccagagcaggagctgcatatttggcctctcaggccctgctccaggcctttgccctcagaggtgggatgctcccccaataggccctcagggaggctgagatgaagctgagcagcagtgcccacaggcctcacccaggctctgccctggctttctgccctcaggctaagtgagtgcagcttccggccagagcacgtgtccaggctggccaccggcttgagcaagtccctgcagctgacggagctcacgtgagtgacccacccagcccgtgaggacagcagaggggtgggggcaccctgccagagccacctcagtgactgacctctgtctccaggctgacccagtgctgcctgggccagaagcagctggccatcctcctgagcttggtggggcgacccgcagggctgttcagcctcaggtacctcctcccccgctgcctccgggaggggccatggcatgaatgggagcaggggtgggcactggagtaagaggcccccaggatcatggccccagtcatttcctgtacccacaaccctgccatctggaccctgagcaaaccctgtccatctgtcccagagactccacaaggcacacagagaaactgtccttccccacactggaggcctgtgctttgggatttaagaaaaaaagaaagaaagaaagaaagaaggtttcagaggatactgaactgaggacaaaaataaactgaaacgaagttcttgtctgtctgttcactatgatcattttaaaacactcagaaaaagaagataccgaagtagaaagaataattttttaaaactcctattcccagaacctaggtttgacagttgttcatactttttttatatttgcttctatttttatttttatttcagctgaagcggtttcaagtaagttatagacctcataatccatcactcctaaatatttcaccgtgaagctccaaaaaataaggacatttttttcagtaatcacagttccatcaggacacctaagaaactcagttagcgattccttagtgtcgggtactacctagtctaatctaaaatgtccccattgtcccccagataagacagctggcttttgggatccaggatctgtcacatctggtctgcatttgcacgggatggcgatggtcttctgactcttctaacctgcggcatcactgcccccatcccctcaccacagctttctgtttcatgtcagtgtctgttgacaaaatcagcaactgtgtgtactgcagactgtcctgctcctgactctggtggctttctcatgatgtcatggcacgtgttcctctaaccccgactttcctggaaactggacgttagatcaaaaggctccatgacattcagtttcatgtttgtgcccaaaaaacttacgtcaccgacagagctgtgcacttctcattgcagcctgtgacaaggcacctaagaactgactgttccccaaaataacctgtaaaaattattataaaatacacataacaaaatttgccatcttaatcatttctaagtgtaccattcaggagtgttaagtacatccacttttttgtacggccaatctccggaactcttttcctcttgcaaaactgaatctctatccccattaaacaacaccccatttcccccctaccccagcccctggcaaccaccattctgctttctgtctctatgaattggactgctctaaatagtttatatgagtggagtcatttgtatttgtctgtatttgtctttttgtgactggctcatttcattgggcataatgtcctctggttcattcatgttgcagcgtgtgtcactgtgtcagactttccttcctttttttttttttttttttttttgagacagagtctcactcttgtcacctgggctggagtgcactggctcgatctcagctcactgcaccctccacctcttgggttcaagcgattctcctgcctcagcctccggagtagctgggattacaggcgcccgccaccacacccagctaatttttttttgtatttttgtagagacagggtttcaccatgttggcgaggctggtctcgaactcctgacctcagatgatctgcccgtttcggccttccaaagtgctgggattacaggcatgagccaccacacccagccctttccttttttaaggctgcataatattccattgtgtggatggaccacattttgtgtatccacttatccatcaattgacacttgggttgtccattcaagtgcccaattgacagtccctgctttctttttttaaatattattttatttcaaaaacaatagagatgaggtctcactgttttgcccaggatgatcttgatctcctgagctcaagtgatcctcccacctcagcctcccaaagtgctaggcgtgagccaccatgcccagccagaaagtcccagctttcaattattttggttatatatccagaattgctagagcacccaaaataactttttttttttgagacggagtctcgctctgttgcccaggttggagtgcagtggtgcgatctcggctcactgcaagctccgcctcctgggttcacgccattctcctgcctcagcctccagagtagctgggactacaggtgcccgccaccacgcctgactaatgttttgtatttttagtagagacggggtttcaccatgttagccaggatggtctcgatctcctgacctcgtgatccccccacctcagcctcccaaagtgctgggattacaggtgtgagccactgcacccagccaaaataacattttcaaataaaacttttcttagtctaaaaataatattggttgggggaagtggcacacgcctgtaatcccaacactttgggaggctgaggtgggcagattgtttgagctcaggcgttcaagaccagcctggacaacatggcaaaaccccatatctacaaaaaataaaaataaaaaaataatatttaatcattgttgaaatgtgcagaaaatccagaaatacataaagaaaatagtgctttaaaaattcagcataactttaaagcagtaatatttgacttaattctcttttttcctactttcaaattaatgcacatgcattgtagaaagtttagaaaatatagaaaattaaagaagacataaaataaaaatcactcatgagaattctatcatcttaaacaaccaccatgaacatttaatatattttcctatgttttccacacatctctctccctgtttctttccacactttttttctccaaatactttcctttttttgaaatgcaaaattgggatcatgttttatatacagtttggtttccttacctttgtgatgtaacattatgtgaatcttttcttaaatctaaaaatatcagtggcccagtgcagtggctcacgcctgtaatcccagcactttgggaggccgaggcaggtggatcacttgaggtcaggagttcaagaccagcctgaccaacatggtgaaaccccatctctactaaaaatacaaaaattagccaggcgtggtggcgcatgcctgtaatcccagctacttgggaggctgaggcaggagaatcgcttgaacccaggaggcagaggttgcagtgatctgagatcatgccattgcactccagtctgggcaacaagagcaaaactctgtctcaaaaataaaataagataagataaaaaaataaaatataaaaatatcatttaaaaaataatattttctgtttggattgtcacaacaatagttgttggaataagggtgatgttaatttccttttttagattgatgcctacttgtataattttatagttttaaaatgagcaaaaaaaactcaaaaagcctctaggtcccccccttgacactcctcccccggccccgtcatgtgtgctgattgtctgctgctcaccttgggggggccttatctgtgtccccttctgtgacagggtgcaggagccgtgggcggacagagccagggttctctccctgttagaagtctgcgcccaggcctcaggcagtgtcactgaaatcaggtgagtccagagaagaggcccctttggaattcttcatctttcataagcattgggacttttccttgaccttccctcatcctgtggggtaatagctgtgtcaccagctagttttccatgtccccagggtagcaggagctcctggggcatatgtgaggggctacacatttgttgggactagtgcagtagtcaagccacagtgtcagaggaagacatccccagaatcaaaacaaagggctattggatccaggcagacatggctgggagtccacgctggttgcttggaagtggccccccagatgcagtaacacacattatggctcttcaaccagaaataacacaatgacacacagagtagcttatagcaaaggttttagcatcccactcagctatgttcagatcccaactcagtcacttactggttggagcccattactgtgtctctctgacctcaacctcctgctcttaaaagagtctaattacggccctttgcagggctgggaggattacaagaactggagcctgtaaagatgtctgctgtactgtcaccagccacacagcctgccctgcttcttccttctctcctccaggagtgagcaaggggatgctctggggactttataatctcccatagccctctccccataagcaccccatgaacataacattcaagtgaaggcagtgagcttagagcgcaaatgcagactccagacacatcccctaccccacccttccaccacactgtggtccttgtgcccctccctcagaaaattctggaactgcccttggatccctctaatggctttctgtcatggtctgaaaaggcttatcaacttattaactttaaattgttgaaaagggccaggcgcggtggctcacgcctgtaaccccagcactttgggaggccgaggcaggaggatcactgaagcccagagttcaaggctgcagtgagctatgatcgtgcccaccactgcacttcagcctgggctacagagcaagaccctgtctctttaaaaaaaaaaaaaaagaaagagaaaaattgttgaaaaggcactacttggggtattgtgtgtgactcacggaagcacctactttccagtcctaagctggtccctggcaggggagaaggggacccaggcaaagtgagagttcagagttggagccgggcagcccaggtgccagctaggccctccggggaaggctgcccgacctcacgttggttactgctcactcctcagcatctccgagacccagcagcagctctgtgtccagctggaatttcctcgccaggaagagaatccagaagctgtggcactcaggtgggacccagcaccagggaccccaaggcaggggctggtgttggggagggggcagggctgcttctgaccaatattcaccaccctgcccagagaccttaggggttcgaagtctttacacaggctacagaggtctgaccaacccacttctgaggcgtttcagccccactccaggccccagtctcagctccagtcacccccatgaactttcagttccccgaacaccatcttgcttagaccttagggcatttgcacaggctgtgctctctgcccagaatgttctcttcacgcctacctgcttcacctgcctaactcctcctcatccctcaggtctcagcttaaatgccaccacctcagggaggccccctggaccccaaggcttagtcaaacacttccattatccactcttatagatccctggattcacagcacctctaaatccatatggcacagtttgggaaattaaaatgtcacccttttgagtggatgcagccctgcatgtgtacattctgggaaatagagcatggtaggatctcagcctcacctcacctcctcggctgtgtgtccttgtgcggtgaacaacctgcacaaccataccagctgccccatctggactcctgcttcctagcacttctcataagtgaatagcaaactgtaggacttcatttgatcagcatttatttacccctacaccataagctccttgcaggcagatactgaatcccacatactggactagatgttccaaaactgtcgtctccctgtctgtgtccaggttggctcactgtgaccttggagcccaccacagccttcttgtcgggcagctgatggagacatgtgccaggctgcagcagctcaggtcagcgcctggaaactctgtgtggggccctgagttctctggttgaccctggtacctactccaggccatgtgtgaccctggcattctcacttccttgtgcaggagaaaatcacacttggccagtggaggggagggagagccccagggtggctcaggggagctcttgggtggccccttctcctctcttggcacccccttctggatgtgatgacctctgaggtgtgtccagcctgaaatcctctagaatatccttggaccttttcagcttgtctcaggttaacctctgtgaggacgatgatgccagttccctgctgctgcagagcctcctgctgtccctctctgagctgaagacatttcggtatgtagacaagacattcactcagtcccctttgcagctctgccctgccctgacacctcccgttattcccagccctgggctcagaggactcttactctgtgtcttactctgtggacacaaaccacaggtggccctggagatgatttttaggggtacctagtcgtaaacatgaccttaggaacattgagccacatggcaagaaagttgttccctttttaacactctttcattgtttttcttttaaaataactgcgaactaacacaaagtttcaagaagactgagaactgctgtgtgccatttacccaaattcacccttagagctgggcgtggtggctcatgtctgtaatcctagcactttgggaggccgaggcaggtggattgcctgagctcaggaattcgagaccaccctggacaacacggtgaaaccccgtctctactaaaatacaaaaaaattagctgggcatggtggtgcatgcctgtaatcccagctaattgggaggctgaggcacaagaattgcttgaacccgggaggctgaggttacagtgagccaagattgtgccactgcactctagcctaggtgacagagcgaggctcggtttccgaaaaaaaaaaaaaagaacaaattcaccctttgccaatctttttccacatttgctcatttcttccctccctccttctttcccacctcccttttctttcactctctccctctctccttttctgaaccatttagaagtaagttgtaatcatgtccctttacccgttaacatttcagcgaatttgctagaaataaggacattctcttccataatccagtaaaattataaaatccaggaaatgtgacattgatacactactattatctcaactacagtttatactccaatctcaccagttctcccaataatgttgcttattgcatttttttcccagttgtggatccaatccaggatcacacgtctcatttagtgtcatctctttagtgtctccttcaatctggaacacgtccttggcccttctttgtctttcatagcattgtctctgacatttacaggccagttattttatagaatgtccttccacttgggtttgtccaatgtttcctcatgtttagagttagagtctgccctttgggcaggaatatcacacaggtgatgctgtgttatcgtgccttccatcggggcacatgatgtgtcagagtcctcgggctagtgatgttaactgtgatcacctgtgacagtggtgtctgccaggtctctccacttgcaaatttactaactttccctttgtaatcaacatagattatgtggggagatactttaagattatgtattaagtcttcctcaaactctcattggcaaattttagcagccgttaataaatcttacttaaatcgatgaatcagcatgacagttgcaaaatgtagctttcctaactttacattttatttccatctaactgattacaccaagaagaaactcttgggctgggaacagtggctcaagcttgtaatcccagcactctgggaggccgaggaggaaaaatcgcttgagcccgggagttcgacaccagcctgagcaacatagcgagaccacccccatctctacaaaaaataaataaataaaataaatgtttaaaaaggaagaaactctttaggacagagagatctttgacacttcttcagtatttgctttaaagatgcagagtttgtaataaacaacagtaactagctaaactacagtgatacctaatcctggcttaagttgtgaagttgctacctgaatgactgcggtttaggaaatactgaactagtccatgcttctgcttccaagctctgtggtggcttaatgagttcatggtggaagagatttacgaagggaaggaggtctcctcacattgcccgccacatccctaccccacatccttgccctctgccaccagcattcagagctcccaagacccagggcggctcctgcctgacctgttgccctttgacccccaccaggctgacctccagctgtgtgagcaccgagggcctcgcccacctggcatctggtctgggccactgccaccacttggaggagctggagtgagttgcagagtggagggattggggacaagtggcccagctgagggtgaggggtggagaagagagcagggcgtttgggagggcaggcaatgagacttcaaccaatgacccttcccctgatgaagtgcagcagttctgggtgtggcctggggaaggaagagcaccacagttttggtctgaatttcgccactgactcacagaggggctgtgggcatggctgttccactctgggctttgattgccttatctatgaaaatggggctcatgagccttgctctgctgggctggctgtgggagtcaggctacggagagggctgaagaacaagagggtgtgtgtgtgtgtgtgtgtccctagtcccccagcttcctctctgcagccttcatccagggcatagtttctcagctgggccagctgtgactatcatgcctacccagagcctgagccctggagctagggatacccatggggaacctggacagcgagggtggcccagggcatgcagatgcagagttggcctcccaggggacagagcaggagaggggagctgacaggacagctcagctccagggctgggcaggctgcgctaacccttgcctctgcctggtcttctgcagcttgtctaacaatcaatttgatgaggagggcaccaaggcgctgatgagggcccttgaggggaaatggatgctaaagaggctggagtaagtagtgatggtggttgtgggtgagtgagtggtgggggtggttaatggatggtggaagtgggtgagtggtggggttggttaatggatggtggaagtgggtgagtggtggggttggttaatggggaatggggtgagtgagtggtgggagtggttaatggggaatgggctgagtgagtggtgggagtggttaatggggaatggggtgagtgagtggtgatggtggttaatggggaagggtgtgagagtggtgatggtggttaatggggaagggggtgagtgagtggtgatggtggttaatggggaagtgttgtgagtgagttgtgttggtggttaatggggaaggagatgagtgagtggtgttggtggttaatggggaagggttgtgagtgagtggtggcgttggttaatggggaagggggtgagtgagtggtgatggtggttaatggggaagagttgtgagtgagtggtgttggtggttaatggggaagggggtgagtgagtggtggggttggttaatggggaagtgttgtgagtgagtggtgatggtgattaatggggaagggttgtgagtgagtggcgttggtggttaatggggaagggagggagtgagtgatgatggtggttaatggggaagggttgtgagtgagttgtggggttggttaatggggaagcgttgtgagtgagtggtgatggttggttaatggggaagggttgtgagtgagtggtgatggtggttaatggggaagggggtgagtgagtggtgttggtggttaatggggaagtgttgtgagtgagtggtgatggtggttaatggggaagggttgtgagtgagtggtgttggtggttaatggggaagggggtgagtgagcgatgatggtggttaatggggaagggttgtgagtgagtggtggggttggttaacggggaagggggtgagtgagtggtggtggtggttaatggggaagggggtgagtgagtggtgttggtggttaatggggaagggggtgggtgagtggtgatggtggttaatgggaagggagtgagtggtgatggtggttaatggggaagggttgtgagtgagtggtgatggtggttaatggggaagggggtgagtaaggggtgggggtggttaatagggaagagttgtgagtgagtggtggggttggttaatggggaagggggtgagtgagggatgacagtggttaatggggaaaggagtgagtgaggggtgatggtgcttagtgctgcatggtcagtgagtagcatgcctaggaacctttgcatgttttgtgaacacaaaccgccatgtttctggatggacccaggtgagctgaatgcccttacatgaccttttactttctattctggatctcagtgccagcaagaaccttggtcataggaaacagaatacacaactcaaagcaatccaagacagaaatatattggcttatgtcatggaaaattacgaggccaatgacttcaggcacagctggatccaggggttctatatttgtcaggcttctctctcacacacttcactctggcccttactctttctctgtccaccttggcttccttctcaggcaggccatccctgcacctgcaggcttactttctctcagcttagtggaaagggagtaccattctctctgtggttacaacaaaaggtcctagactgagtctcactggactagcttgagtcacctgccccaccctaaagcaatcactgtggctgtgagcacaaaatattctcctcactggccagacctgggcgcatgcacaccctatcttctggacttagaggggtggtatttcaggatgtgagtaacagaagaggaaagaaactctgggcagaaaaaaatctacagatgtccactacatttgtctacagttgtttccttggtaactggcagcttttactactctcccccataatttgaagtcatcaaattcttagaaatgccagaaacagcctcagtctaaaagacaggtccccgtcctgcacagattcctgtttagacagtatctggacagaaaatttaacagaatatcttctgcttttcatctcttaactttttctgatgaccaaaaaagttccatctttctagaaatatgtaacaaataacatgaaatgccccggggatgacaccccctgagaaaacttctgttgaacggtttgtgaatttttctccagatttttttttctacatatgttttgaattcagcttgaaagtagccttttgactttttgccccttaacattgaaattcttccgcttgtccctctttgcttgtcctggggagaggatcaggtaaaaggagaagagggattacagagacctttgaccacagggccctcctgtcgtctcactggtctgtttctttgcccactgtccatgtacctgcatctcggctcagccttctggaagcttttatttaggggattggaggcccagtgaggtcattcattggctcattcatgcattcgacaaatatgtactgagctgggcacctgggccggggacaggacagattcatccatgcccctgggggcctttttcttcctcctgatttcccaggcaccatgtgctgctccttacctcctgctgccttagttgccctatctgtaaactgggcataatatcttccctgtccgaaggaaggggatggatcgtcagtgcccggaggtctcttcccatctcagatctgtcatttccaagtgtaactccccacaggcagttaccctcaaatccagtcagcttcttccagctgtatacctgtgatggagtgggtaggagcatggaccctagttaggagcctcactgcctgggttcaactctgggtggggtaactgacacttccagtttgcttggagctttccccattttggcacccaaagtcccacatccaggaaaaactcttctgttctgagccaaccaagacagttgaccatcttttgcttctgcctcttattttattatttatttatttgagacccagtctctctccgttgcccaggctggagtgcagtggcacagtcttggctcactgcaacctccgcctcccgggttcaagcaaccctcctgcctcagcctcccaagtagctggcattacaggcacatgccaccaggcccagctaatttttctatttttagtggagatggggtttcactttgttggccaggctggtctcgaactcctgacctcaggtgattcacccgccttggcctcacaaagtcctgggattacaggcatgagccattgcgcccagccagttctgtttcttaatgtgtgaactcgtgccagtccctcagcctctctgttctttggcctcctcatcttaactttgaggataagagcaatctcccctgctacggttgttgtgagtattaaatgagataatatgtgttacagtcttagagtctggtcagagttcacactctacaagtgctagctattgttattctcctctcctgcctaggctgggggcctctagaagtacaatcgcctgggtcacatatggttggggctcaggaatgggagttctatagtttttggttctgttcctgaagcagccactttgtgtatgaccttaagcaagttctctaactctctgaaccttggtgttcctcacctgtaaaatggggacgataataaacccacctttccagatggccccaagccctgagtttggcccacattttatgatcaatgtgtgaccgccattattacggatcattagtcttggtccatgtggttcagaacatagaactgctgcctgcctgacctcagtaattcatgcagagaaacagcatttggacctcccagtacagttcattttgtagaatttttacactgtgtggatataagtggctgtcttggaggtccctaggcttgctaagcacagaggcctcagacccccagactggacagtgccccacccccagatgtcaagttcacctggcctcctcttctccagcctcagtcaccttctgctgaacagctccaccttggccttgcttactcacagactaagccagatgacctgcctgcagagcctcaggtgagtgaccgagcggccccatgggaatgagtgggaagaaacacttcccactcagttgggaccacatccagggaagcactgaggccacctcccaggggatcctttgcggatccctcccaggcccatccctgtgccctcccaggtgggtgcccactgctcttgccttctaatgccatcagcttcctcctggttacaaaagtggcctaaagggcttaggcccacgtcgtagaacaacccttgaggcacacacacagttcaccctgggctcttgttaaaatgctcattctgattccccaggtctggaattctgcctagactgtgcttttttttttttttttttttttttttttttttttttttttttgagttggggcctcactgtgtggcccaggctggagtgcagtggcaatgcacaggtgcaatcgtgttgcactgcagcctcaaactcctgggcgaacgtgatcctcctgcctcaccctcctaagcagctgggactacaggcctaaggcgttgcacccaaacttagcatttctttttttgtttgtttgtttttgagacagagtttcgctcttgttgcccaggctggagtgcaatggcacaatctcagctcactgcaacctccgcctcccgggttcaagcgattctcctgcctcagcctcccgagtagccgggattataggcatgtgccaccacgcccggctaatttttgtatttttggtagagacagtgtttctccatgttggtcaggctggtcttgaacgtccaacctcaggtgatctgcccacctcggcctcccaaagtgctgggattacaggcgtgagccaccacgcctggcttcagactctgcattttctaacaagcttccgggtggtatcaattctgggggccacggtcagcactttgagtagtgtgggtctagactcagatggggtggccttcctacactccctttgtgatttcactccctgctgctaggataaataaacatgacacttactttcaatgtgatttttcaaaacatgaaatcttgtgactaaaaacaaatccaagcagtgacacaaagcattgctttgtttatatccaagtacacctcctaccccctacctcgggcagagcagagtaggtaggaaatgaggttagagagttccaggaggttatatcatattggaccatttcacccaaaattaatttactgaaaggtgatccattaaagtgtatttatttatttctattttatttttattttttgagacacagtctcactctgtcgcccaggctggagtgcagtggcatgatctcacttcactgcaacctctgcctcctgggttcaagcgattctggtgcctcagccgcccaagtagctgggattacaggtatgcaccaccacgcccagataatttttgtatatttttagtacaaatggggtttcaccatgttggccgggctggtctcgaacccctgacctcaaatgatccacctgcctagactccgaaagtgctgggaatacaggtgtgaaccactgctcccagccccattaaaatttaatttgcaaaataaaagaaagtaaaaacaacatgcaaacaaatacttcccaaggggctaagaccatttgcctcagctatttattgttttttcctacccaggcagagcaaggtcagggctcagtaaagacaataccctgggtttaaggaaaaacctaccatttgcatggatgagaacacatatgcccctgagaactgatctgcgtgaatcagagaatcccacgtgaaagtggcattcagccgggccagcccggagatccctgacacagaggctgaggtgaagcttggcaaagaaatgtagagactcctcctgggccaggggctctggatttgtttccacccagcctgcaagtccctaagtctctggccagtcacagctcactgctggctctcaagttttctcacctggacactggggacaataattcccaccttgctcaccactccccacctgccatgacccccagaagttttgctaccagcatatgaattcctgggcgtgtaaggctttgcaaactgtagagttcttagcacagcacctgcaaaggcctttaagctcctgaaagcctcttggtctattccctgcttttccagactgaacaggaacagtatcggtgatgtcggttgctgccacctttctgaggctctcagggctgccaccagcctagaggagctggagtgagttgcccattctgcccccagacccaggacaattttggccgggaaagatgacaagggcaaggggctacctgagcacgccctttgcttcttcatctcatctccttcacccacttctacactgtgtaaacaacctggggcctagaagcttgggggacccaaagacaggatgtaagagtgtcaattgtagcaagagggatttaggtcagacaatggggagaacatcctaaacagaagccaagggttaggagctgtcactcaacatggggtgatggggctctctgtgtgagtcgaggcccttcctgggacttcagcctccccttctttttctgggagtggggtgtggacaagatgagacggcagaaggctgatgaagctgttttctcccccaagcttgagccacaaccagattggagacgctggtgtccagcacttagctaccatcctgcctgggctgccagagctcaggaagatagagtgagtagccagccctacagaggagggccacaggggtcacacgatggtcctaggagatactggcccctagctgaggccagcatggtaaaatctcccctgcgccaacctcagtgtccaggcagtggggctcggtgacctcctggccctcactgcgggaccttaagccaccccagcccctgctcttctctgggcctttctgcctcattgtctgggtaggtgtgtggtgtcggggggttgtctcttaggccccctgaagcaggggtggcagacccagcagatgtgctggggtgtcggggagagggggcatcagaggacctgatggctgcccccctcccacagcctctcagggaatagcatcagctcagccgggggagtgcagttggcagagtctctcgttctttgcaggcgcctggaggagttgatgtgagtgtctgcccaggtggcctctgccctctgtgccccccaggtccacctggcctcctctcccgcagtgggcacagggcagggcgggggtcccgagtgggcaggcccagtactcaatgctcattcctctcctcttccaggcttggctgcaatgccctgggggatcccacagccctggggctggctcaggagctgccccagcacctgagggtcctacagtgagtggccccctgcccataccatgcagggctggtggggaggagggtcctcgggagcagtgggggggtccaggcccccatcagttgagctgccctgccccaagtcaagcttggcatatacccactctcctgcctgttccttccctgcctctgatgtctgcagcaagaaaatcaggaggcccagcctagtcctggctctgccactggcccctgcctgaccttggccaaacccctgccccttctcagcctcagtttcttcacatgcaaaagaagtacaatgatcccagttcattgtgccctgtgagcgggtccctgagggcgaatgagaaatcctggcagagggcttcgcaggagcacggtgccaatcaacgtggcctcagcacttcacaaatgacctcattgcagccccatggcagcccccagagtcccagagtgctgggaccttgttttttttttttttttttttttttagatggagtctctctctgtcacccaggctggagtgcagtggtgcaacctcggctcactgcaacctccacctcccgggttcaagcaattcttgtgcctcagctaccagagtagctgggattacgagcatgcccaccatgcccagctaatttttgtatttttagtagagacggcatttcaccatattgcccaggctggtcttggactcctggcctcaagtgatccacccacctcagcctccaaaagtgctgggattacaggcgtgagccaccatggctggctggtgctgggacttttatgtgctcccttttccaggcaagggaatgaaggccaggagaggtgtggagaattttccttactcatacacgaaggacccaggtgttgaatttgggatctcagaccccaaagccagggtccttgatacctacccaggtcctgtgtggatggggaattagccagagactgtctacgggctggcactgcagcctgagacaaggctgagggtggggctctggaaacgccagtccctcaggctcctctcaccctctcctctttccccagcctaccattcagccatctgggcccaggtggggccctgagcctggcccaggccctggatggatccccccatttggaagagatcaggtaagtaggggctgcccagcccaggcacggggacagtcctgggcgggtctgggggttcctctcacaggtatctcccctaccctgcagcttggcggaaaacaacctggctggaggggtcctgcgtttctgtatggagctcccgctgctcagacagatagagtaagtagcctcccctgcctgcctaggggaccagtggcaggctgagggcagcccttctctgactgagcctaacacctggggaggcctttgaagtgatagaagccccagggatggtgggggcctggctcaagaaaggaagtctttcctaaaacgcctagcttaccccagaccctggtggctctggaggcaggacctgctagatcccctgactcaaacaacccccatcccatcccatgcccttctccatccccagcctggtttcctgtaagattgacaaccagactgccaagctcctcacctccagcttcacgagctgccctgccctggaagtaatcttgtgagtgattggaagagccctgagctggctgggaaaaggaaaagtcgggaggggtcgggggagttggctccagcctgctgtgtggcctggagctgctcccatcctctctggccagtcctcccatttgtaaatggggaagatcatccttactcagacatcctctcaaagacattttaacacttgagctgcaggtaatgttgggtaaaacagtttaccttcttctgcctttttccccatttgtagattggtgggaggggaggtggaccagatggtctttaaaggtttttggtccaaccttccttttgggaggcaactggatagaccaccttgcctgcttgatgaaacctccatttatgaaccacagttggtagaaacagtggctaaagccaggagaaagccacccccagacctgctggctggccgtgcttggctgtctcttagcaatcagaatcccccagaccttggggctttgcagtgctgcctcatgagtaaactagaattctaggactagcctgggaccctaaccatggtatggaggacaaagctgtttcctaaagaacaggacacaagtgattacgagaagattttagtttgcatcctaaaggtcttaacccttctcattacaccaaagcgaaagtctcagatcagtggtaattcatctttaacacctaacactggattctccctttttaaccaaaagggttaaaaacccaacatcttaggaagggcatatgttccaactagaagttaataccattgtttgtactatatttatttttgtaactaccttctatatggagtctgtaacacaagttttccattgatagtagcaataaaagtttcctttcaagatttttttttttttttttttttgagatggagtctccctctgttacccaggctggagtgcagtggtgcaatctcggctcactgcaacctccacctgccgggttcaagagattctcctgcctcagcctcctgagtagctgggattacaagtgcccaccaccacacccagctaatttttgtatttttagtagagacaggatttcaccatgttggttaggctcgtctcaaacacctgaccttggcctcccaaagtgctgggattacaggcgtgagcaaccacgcccagccaagattaattttttaaagtaagaaaaaagagggggccaatttaaagaaaaatatgatgcatcttaaatacaggaggtacatgtatgtggcaaaaatggcaacatcttgtgaacaacgtcatgattcaaacttgacggggaggggagcagggaggaaggtaacctgcaccctgacgtcttcaggggaggacacacaagcaccctatcaggtggcctctcttgaaaacccttgcccccacgactggcaccctgctttccccattcactgccttgtctccacccctcgacctccttgctctcctgccgctgactttgggacccctaccctgcaggctgtcctggaatctcctcggggatgaggcagctgccgagctggcccaggtgctgccgcagatgggccggctgaagagagtggagtatgaggggccgggggaggaatgggacgggctaaagggggacctacatcccgggaacaccaagaggccactgggtcagtcccctgcctcccagaaagcccttccttgagttgcacactctggcctgttccaagcccctgccaggcttagttccccctgggttctagccttcagccttcctgctgcacctgccaccagtcccctgttgtcttttgggttccctgagaaggtagtgtgggagactgtgtcccctgaccttggcctgaggaagggacctaggaaactctcacacccattctcatggccgtgtttctctttcccctcccctcactgtccactgagaagcctggagaagaatcagatcacagctttgggggcctggctcctggctgaaggactggcccaggggtctagcatccaagtcatccggtaacagaggcctgcaggggcagggatggtgggtgggaggctacaccaacccccagatctaatgggactccctggaggaggcggcagggcctgggctggggattatcaaaggagacttggaccactccaccaagaatttggcagcaagcagacttggatcaaaccccagctctgccacttgccaactgtgtaactttgtagccataactcaacctctctgaaccccaattttctcatctgtgaaatggggatactgatagtatctacctcagagagttgtgaagactaaatgagcatataaagcactgaacccaatgcctggcacatagtaagcacttaaaatggcagctataatcagagccatcacatacagttgtataggttgtgcactgcacaagggcattaaacctaaggggcaccattcacattgtcaacctgctagatttctagcagatgagagtaaagtaccttgttctaccaaaatcatatattatgacaatttcagacagatggaagtaaaacatcttgaagaaagagggtcttttccttatttgcacaaatgtgtcatatgagtgtggccttagctggcatcactatctcccagggaggaaggttgagttggaggactcaggaggcaggtgtggggtacaccctctccctaggtcagctatgctggtctaacacctgcctctgccaggtaactctaggcacagctctacctttttgggcctcagcctcccaatctgcagatacgacagatggcaaagatgggaggatgaatgagtgcctatatctgtgccccacagcctctggaataaccccattccctgcgacatggcccagcacctgaagagccaggagcccaggctggactttgccttctttgacaaccagccccaggccccttggggtacttgatggccccctcaagacctttggaatccagccaagtgatgcacccaaatgatccacctttcgcccactgggataattgactcaggaaagaagagcctcggcagggcgctctgcactccacccaggaggaaggatacgtgtgtcctgctgcagtcctcagggagaacttttttgggaaccaggagctgggtctggacaaaggagtaccctgcattacgtgggatatgtgtgatcaattggggacatgcgacacacaatgagggtgtcatgacaatgcatgacacgtacggttatatgtggcagtgtgaccccttgacatgtggcgttacatgaaagtcagtgtggcacgtgttctgtggcatgggtgctggcatcccaagtagcaggatacatgattgttggtctatatatgacacatgacaaatgtccatgtcacaggactcatggctggccagatgacctcaggctggcccaagatctaatttattaatttttaaagcaaatacatatttatagattgtgtgtatggagcagctaagtcaggaaaagtcttccgcccgagctgggaggggagagtgtccatgcactgaccagtccaggggctcaagggccagggctctggaacaagccagggactcagccattaagtcccctcctgcctcaatcctcagcctacccatctataaacttgatgactcctcccttacttacatactagcttccaaggacaggtggaggtagggccagcctggcgggagtggagaagcccagtctgtcctatgtaagggacaaagccaggtctaatggtactgggtagggggcactgccaagacaataagctaggctactgggtccagctactactttggtgggattcaggtgagtctccatgcacttcacatgttacccagtgttcttgttacttccaaggagaaccaagaatggctctgtcacactcgaagccaggcttgatcaataaacacaatggtattccacgtctagcgtg

SEQ ID NO: 1222 - DNA, 23465 bp, Homo sapiens
agtcgtgcgtccacgcgtttcgaaagatggcggcgtccaggagcgcgggagaggccggcccgggcggctcccagggacgcgtggtccgcatgaagcgcagaggcgggcgcgggccgcgccgcggtcctgctggcggtggggagaaggccctgaagaggctgaagctagcggtggaggagttcgtgcacgcgacttcggaaggcgaggctcccgggggttgcgaggggcgcggcgccccggtgagctttcgcccgggagggagaaaaagccgtaaggaactgaggaaggagaagcggcacctgcggaaagcacgccggctgcagaggacggcgggccccgaacagggtcccggcctgggaggccgaagcggagccgaagaagccagcggtcaccggcaggacacggaggagcgcgcccgcccagcccctagtcgggacccctcgcctcccaggaagccgcggccgtcccgggtcaaggccaaggccacggccgccaccgcaaagaccagaccctccgcagccgccaccgccgctgcccggaaacgggcgcttttagcggcgaacgaggaggaggaccgagagatccgaaagctggagcgttgcctcggtttgaacaagcgcaaaaagaaggacggcagcagctccgtgccgctgagctttgcacgcgacggtcttgactatattctgggagccctggagtctgggaaaaatagcggcttgtacgacagcagtggtgaggaggaggaagatgccggacagacactccccgaaagtgacttagagagtgactcccaggacgaaagtgaggaggaggaggagggagacgtagaaaaggaaaagaaggcgcaggaagcagaagcgcagagcgaggacgacgacgaggatacagaagaggaacagggggaagaaaaggaaaagggagcgcaggagaaaaggagggggaagagagtccgttttgcagaagatgaagaaaagagtgaaaattcctcggaggacggtgacataacggataaggtatcgtgtgaacactctctaggccctctgggatttccttcaaaataacgggacagggaatggggcgtgaggcagaaatgacacagacttggtgtcttgataatggtttcagctgaatgtgagtaaatcgagtacgttactctattcggtcttctttcatgtttttaaattttcataatgtaaagtttaggagaaaagcaatatagagacatttttatcccggggacttaagggccatttccacagtgcagcatcttcattctgtgtttaccagcccaggtctctaaacctgttaaccctacctcatctgttaaggcctctttcgagtatccgaggacatctgccgtgcccgacttttagagtgaattttctaaaactcgaagctaatttacagcactcccttagataaagtccaacattgaattaaagataaaggctgaggcggggcagatcatttgaggtcaggtgtttgagaccagcctggctaacgtggtgaaaccccgtcattactaaaaatacaaaaaacagccgggcgtggtggcaggcgcctgtaatcccagctacttgggaagctgaggcttgaaccagggaggcagaggttgcactgagccgagatcgcgctactgcactctagcctgggcgagagagccagactctgtttcaaagaaaaaaaaaagttcagaatctaggacgtagcaatcaaggcattcatgggctgtcatcttgcatattttatctcagcgttcctttgcatgtagctcatggttggaggcagctgtgtggaattgcctgcatttccttctccccacatcgcactagttctatgtatgtaaatattcagcttctatgtatacaaatattctttattgaaccaggtttaaactacctagcagtgaggatcgtgccttgcaaatgtttgtgtccttaatgatttgcaaacaccaccaccccccttgataatttaggaaatagcagtgagttggttttgattttttttttttgagactgagtcttgcactgtcgtctaggctggagtagagtggtgcagtctccgcccactgcaagctccgcctcccaggttcatgccattctcctgcctcatctcccaagtagctgggactacaggcgcccaccaccatgcccggctaattttttgtattttcagtagagatggggtttcactgtgttagccaggatggtcttgatctcctgacctcgtgatccgcccgcctcagcgtcccaaagtgctgggattaccgacatgagccaccgtgcccggccggttttgatttttatcatataaacttagatattacttttaaacaagtttgaaattgtttttaggacactttccctccaaaattagcggtttgtttaatttaggttcttgtatgctactgtgcctgcagtaagttaaggccgagcaaaagcgcagtagatagggctctgttggagttgagcagataccagaggtgcacagctgggtctgaagagctacacaggggaaaacgagatggtgaaatgtattattaatagcattaatgggaatagtgacaggcacagcctggtgagtggaatgtttacccatatactaagcactcaataaatctgatgtatttaagcagcaatgatcagtagcagcttccaccagttcttggaagtttaatatttaaatacacatatggcaaagaaaaaacacaggatttggtcagtgtaaattttttgtaatttatttctcttttcaagcagagtctttgtggaagtggtgaaaagtacatcccacctcatgtgaggcaagctgaggagacagtggacttcaagaaaaaggaagaactagaaaggctgaagaaacatgtaaaaggtctacttaacaggtgaccttgtagtgttgttacactgtgtcacttagagaggttgtctgtttcctaaaatgtaggaattatcccagcaattcaaatagaagtgatggggacagtcgattggatcctttctgttcttggcttgatgcaccgagacccatgagacccatacctcgagaaggagaggatacccgactgttggctactttgaatccctttagggtttgagagcagcccaaatgctcacattgttattctgagaagcaggaaggaaaggggcagaggttctttgtccgtctaaggacagtgttggaaggactggcttatgtcccctctctgcagaaacacattcacctggtcttccatcccccttactcattgctcatgtctgcattttgttgttacccactttaagaacagaacatttaaaaaactgattggaaaccatacaggtggggctttgtcagttacacgtgcccatcagctctttggttttgaggatgtgtgtgtgcatgtgattctgtgtaggtttttttgttttgttttgttttgttttgagatggagtttttgctcttgctgcactggctggagtgcaatggcgctatctcggctcactgcaacctctgcctccacctcccaggttcaagcagttctcctgcctcagcctcctgagtagctgggattacaggcatgcgccaccacgccaactagttttgtatttttagtagagacgggatttctccatgtaggtcaggctggtctcaaactcccgacctcaggtgatccgcccgcctcagcctccgaaagtgctgggattacaggcatgagtcaccgcaccggggcagttctgtagttttatcacatgaagattcgagtcaccaccgctgcaattgagataaaactcaccaccatctctcccctgctgcccctccatggcctcacccacccccttcccccttgtattgctttttgtttcctgttatcctgggaatttatataaacctctgtttcagtgtcgagttcagtattagcacaggttcacagtgagtaaccttccacgtacatatgtgtgtagtgtccccactacccgttcaaacagagcagccttttctagtgttaggaactaaggatttttgtgccacctaagaaataaaacgttagcattttttctaacaacacgtcctaaggctggaccctgcctatgggatatcaggtcagaatattcaggggagtatcctcacgtatgtttctgtagacttaatccagggtatgcctcagtgtggccacatttcatcttgtaaagacagcaattacattgttttgggattccagaatattatctggttatgaataatatatgctgggttattggggcaagataagaatagttaaggggtcaaaagtgtacataaaaatagaatatattgttggtatggataactctttaattttttaaaattgaactgaaaattcctaattggaaacattgttgctctctgtctttacaattctctgcaggttgagtgaacccaacatggcttccatcagtgggcagctggaggaactgtacatggcccacagcagaaaggacatgaatgacaccctgacctccgctctcatgggtgcctgcgtcactgcctcggccatgcccagcagactgatgatggagcatgttctcttagtcagcatccttcaccacacagttggaatcgaggtacagttgtaccttttctccaggctgtcactagtgtctcatggtgattattttaatgataggcttgataagtgcgtaattgtgtgctgtgggtggttcttgtgtcgattcctttttgttgtgaataaatactctattgtctatgtcatgtagttgtaaagagcattcaggaagtacttgattacttgattttgcttaactttgcttttttgttctgtccattcttttttttttttttttttttgagacagggtctcgctctgtcgtctaggctggagtgcagtggcacgatcacagctgcagactcgagtgatcctcccacctcatcctccagagtagctggaactgcaggcgcacaccaccaggcctggctaattgttttggtgggagcagaagtggagtctcactctgttgcccaggctggtgtcaaattcctgggctccagtgatcctcctgctttggcgtcccaatgtgttgggattacaggcgggagctgccatgcccagccctgttctgtccagcctagcatgtcttttatgttagttaattttcttctcgactgacatctcagacgtgccttcatttcctttgcacttctcccttaacactgatttatttcagatgtttggaagataatggttggtgtggtctcactactgaggtgttggtattgatgggagatgtgagagcactggggcatggaactgcctggacatgttcagggagacctggtgccctttctgtgtcatggccctttctcatcagtgaagtgggcttttgttgggattgaactgaacagtgtacagaaagcatctggcacccgacaggtgctaagtaaatgtccaccccacccccacatccctttcgtattcttcttgctccacaacccttgtggttaaagtcagagaggctctttggtgatggccttggttccacagtcactgccctcttctgggcctgttctctcttaattgaatacaggaaagtcataacactcccagtcagtatcccagttcccccaaggtagctgatttcagatgtgttgaagtaaatccgtccaactaaaggagattgttgtgaggttggtgaacgaatggagggttgggtcagtgaggcttagttttcccgtgatacagtatttacatgcaaatgcagtgtttaacccatttggatctttaaatgatagtctcttttaatggtggttctcttagttttttgccttctgacagctctactccaaaaaataggccacagcagcacagcatccctaaaagtctaattacctggtgtacgtttatatactttcgtctcctcctcacctttaatcctaaagtgtcccggtgagatcagggcagacctttactgaagcttgctttgcagtgcagcaggcaaagccgctgaagcgctatgtgaaattcccaagatcacgtcttgttaaaagtacacagaacttgttttctgggctcctaggcaagcatgctttctactgcaatgctagtcacattcatttcatttttatattactttctctcaattataatcttaacagttatttagagtcttaccaagtggggctctccaaagcttgctttaagatgcacatatttgccggccgggcgcggtggctcactcgtgtaatcccagcactttgggaggccgaggcgggtggatcacgaggtcaggagatcgagaccagcctggccaaaaaggtgaaaccccgtctctactaaaaatacaaaaaaaaattagccaggcatggtggcgggcgcctgaagtcccagctactccggagactgaggcaggagaatggcgtgaacccagcaggcggagtttgcagtgagccgagatcgcgtcactgcactccagcctgggtgacagagcgagactcagtctcaaaaaaaaaaaaaagatgcacggatttgccaaaatgaagtagccttcttgtcactggggcttctgtgctgaaggcggcatggggtgggtggagatgctgcctgagtacaaaacatgctgtaacgcgcacggtctgtgtcacttagatgaacttgtgcctccgagtcttcctgtgtccagtcgttaaggtcaacgagttagttcatgtaataggcataggaaagagctggcccacaataagcgctcattgaaggctcattatttatgtacagaaggagattttcgtgttttaattctgttcttcctctggctggcttttcctaccactgctgatttctttgttgttgctagataatgttctgatccacatttttccatgtctagcagtagttgcatggtggcagctttttgaaaggcctgtggggcattaggaagctgagggctggagagaggggcacaggcctgagcatctgagtgcgggactcttctgagctacatgggtcatctcagatatgaaaatctgcaccagctgctttgggaaccctcttgttattttttatttctaagagctgtcctcattttcatgtatgagcatgtgggagtctgttttcttgtcattacaaagtgatggaatcactgggtgccattcctgggccctgtgattaccataatcagggccattctgtgactttcttggtacctccctgtcctcctagaggacactggtatgcttcagctgacttaatcatcagaatgatcttagtataggcagtatctcagtgagttacaggaaaagccacagaccgtgaccacccacagcacatcaggaatttacttgattggaaaacatgagataattgggcctactttcatttaaacctttgctaattgcatgaaggacaatgaaatgacttgttccgaagggaagtcattacagtactttagttaatgacatccacagaaacttctgccagcgtgtgatgagctttcagggtgctggctccattcagctgctttcagtcctgtaccgagaaaaacattctgtgttaaagacgatggtgtcagctgctgaattgcttctgtaagtcctttaaaactcaaaaacccaatctatgtagattcatgttaaaatttccacatcagagttaacgtacaggatgtgcttgaataactttaccaacgtgaattttacttatattcttaaatgttatgctgttatattttattttgaagacattaaatggaacttcagatttagaattttgagaaattttgatgtaatatacataattgaaaacatacagccgggtgtggtggctcacgcctgtaatcctagcactttgggaggccgaggcgggtggatcatgaggtcaggagattgagaccatcctggctaacatggtgaaaccccgtttctactaaaaatacaaaaaattagccaggcatggtggcaggtgcctatagtccctgctactcgggaggctgaggcaggaggatggcgtgaacccagcaggcggagcttgcagtgagccgagatcgcaccactgcactccagcctgggcgacagagcgagactccgtctcaaaaaaaaaaaaaaaaaaaaaaaaaagaaaaagaaaatatacatgaatatgttttatgcctaaatttttattgacgtctgcagaattctaatttacttttaaaaattatatttgactataacatggttgccataatagaatgtgtcttccagtttatcttcattgaaggggcttgaatggaaactacaggttggcttggttaagtctcaggtctttacaaactgaagtgtatatccagtccatcagagctggcctccaggaagtcactgtggcctcccgccagtctgttgcctttctctggattcttctagcgttgatttctttgcagtccagcaatgatgtctgtgtacttccccatacactcaagactgtctggtggatctcagccttgcctgcgattttcactgacacccttagatctccatccagtcctgtctggatggcccctgttgaagcttaataacccctgagctggtcttgtccagccccactagcttgctgcccctcacgtagttcctggttacccagaccagaaacctgggagtcacagatccttcagcttttacagccggtgtcacacactgccatgcgttgctgtgttacccaggcccttcatccctggtccagcgcagctgcgttatttaggccatcgtctcctggctgggctgtgggggtcactctttgtcaccaccatgtccctgcttccgccttctccctccagtcccagcttaagttgagatttgacggaaaatgatgacacggtagtgttgccagcaagactgaaaacgactgttttctgccttcaagttttattatctctcttttacacagtgaaaaaacagggttccaggaacttgctgaagaccacacagacccacatgcaggtcttctcatccttcagtccacagttacggaattcgggataaaatgtaccagaacagcacaaggagaacacttaggccttgcttagctccaccaggcccggcagttcctggccccacttccgcccctcagggcagtgtctggtttacctgctggtccccatcagggcccagtgcccctcaaaccactggctgagccaagtgagtgtattcacaagctaccttagtgccagagactcagccctgggaaagtagggcgtctcctccgtgccacctggagcccttccagagattattaagtacctgtctatttggcaacctctgatattcagaatgtgttgcgtttatctgttttagaaatcactcgtattgcttccttgtaagaaatgaatttggggtaaaaatctgcaaaaaaatcttttaagaaatgaatattgttaggtagtggaactttttttttttttttacacagagtcttgctctgtcgcccaggctggagtacagtggcgcaatctcagctcactgcaacctccatctcctgggttcaagcgattctcttgcctcagcctcccaagcagctgggattacaggcatatgccaccacgcccggctaattttttgtatttttagtagacacggggtttcaccacgttagccaggatggtctcgatctcctgatcttgtgatccacccacctcagcctcccaaaagtgctgggtttacaggcgcacaccaccacacctggctaatttttttttgtatttttagtagaaacggggtttcaccgtgttagccaggatggtcttgatatctcctgaccttgtgatccacccacctccgcctcctaaattgctgggattgcaggtgtgagccaccgcacctggccagtagtggaatattttgagagacataggtgtgtttttaacatcatttttaacagttttatttttccaaggagtcagaatggctgctggccaaacagtgccccttggttgttgattttaacaagaggaaggtgcccttgcgtccaggctggggcactctggccggctgctctgggttgccgagggatgccttgttggaatgccctgccttgtggcactttgttaatttagaaagtgccagttctgtgtgttgaaggagaaaggaaggtttctaggaataacataatcttttttctgtgtggttctttcaggtcggtgcccactttctggaggcagtggtgaggaagttcgatgccatctataaatacggaagcgaagggaaagagtgtgacaacctgttcaccgtcattgcccatttatacaacttccacgtggtacagtctctcctcatcttcgacattttgaaaaaactgattggaactttcaccgaaaaagatattgaactgatcttgttaatgctgaaaaacgtgggtttttcattgaggaaagatgatgctttatcacttaaggaattgatcactgaagcccagaccaaagccagcggggcaggcagcgagtttcaggaccagaccagggtacgcgtgcgacgcttgatctgcttcctaagtccctaaagctcacaaactggccagaacctaaaaatcagtatctggggtaaatattacacttgctttcctagtgatttctgttttttctgtctcatcctgttttctggctttaatatgtgaatggaccttattcctttaccagaaaaatattttgtgaatttaaaaactgatttatttaacattcatccgttaaaaaatgcttaccgaggaggccacaggacatggggctctagggtcagcctgggttggactttgggctctgccacttgacagcagcataacctgggtcttctgagcctcagtttccccctctgtaaaacagggactgatcacagctcccacattgtgtgccgttcagatgatgagatgtgtggaaccgcgtgttcctgggaagccgtttggggaagaacccgaaaagggttagtttgagagcctggagggggcatcacaagagaaaaaggcagagttcaggtctctggtcccttgttaattactgcagggaattgagggttttatcctagaggcatctgaagggttccagcaggtgaatgacaggttggagttttccttctgatggtcactttgactccaaggcagaaagaggcatgaggtggtcgaagtcaggaggagttttgcaggagctggggagtaggtggtggcaaatgttgggatcgtggcagtgggtgtggacatgggcgtcagaagtgaccagacctcatgtggattgggatgaagggaaggagggctcagggtcacccatcaggggcacaggggaccgtgcaggaggagatgaggatttaggacaggcacctccatttttgaaagactgggttagctgtgaacagagtgggctgaagggatatggggctgctctcgtagagggggtcctgggagccatggaaatgggtggacttgcctggcagcaggtgggctgtgaagaggaccttcaggttaaggagcactgacgtctagctgcaggcaggagggagagctggcaggtgagaaggaaatgaggatggtcccaggagccagggaacactagtgtccccaggaagaattcacgcccgtgtgggatgctgaggaccagcaagaggaggaagggatttgcattttgggctgaattgtgacggcggtcctgactggcttatcctggtccccggagaagccagtctgaagaggagggggctggagaagggaatgggagcagcgggctcaatggtggtttcaaatggagaagagacagaaagtacattagtgggctggggagctggctggggagttggggaaatggggaatggttgttaatgggcttggagtttctcttctggggtgatgagaaagttctgaaattgattgtggtgatagttgcacaactctgaatgtattaaaagccacataattatataccttacatgagtgagttttatgctatgtgaattctgtatcagtaagaagttgacatttggggacatctcagagggtatgtgggaattctttgtgctgttcttgcaacttttctgtatgacattacttccagttttaaagttaaaaaaattacaaggccagtggtaggagagaggatgtccagagcaggtcgcggggggccagggtgggagcaggagcgtagtagaggccggggtggccgagtaggtgtggacggtgcggaagggtgaggcgtgtggcgagcagaagggaaaagagatctctggggagtttgggttcccacttgacgttgggggacacatttccattttgaagtattatgtagccctgagtaagcggctgagactagtttagactgtctctacctaaaggctgtcctgactttgtatcgtggcggtggcggccatgtgcatcaggtgtggtagatttcttgccaacttgaatgggccgtttagactgtttgaaatgatggactttccattttttcatttttcttgaagattcggtttatgctagagacgatgttggccctgaagaacaatgacatgcgcaaaattccaggctatgaccccgagcccgtggagaagctgaggaaactgcagagagctttggtgagtcaaggaactttcaattctgttttgctcagagcttccgtgtcggcatgagcctgtcatgaaaatcaagaaatagtcagacctgcacgtcagggtggtgtctggtgagtgagagtgctcagaggcagagtgaacgcggctcggttttcctcaggggctgtcccagtggtctgggcgtgctcgtgcagaatgtccgtgtgtggggaagcccatgttgggcgagcgtcctctttgcctcaccccgggtgctaaacttgggctgcaccattggatcatccgatgctttcagagaaggccaagtccccatccggaccaaggaaattgggatgacgtaggtcctttgactctctctgacatgcagccaggatggagactggggcagcctccctgttggagtgagtctttcagcccctgtcatctcaagtccaaatcattgctgacccaggctcttccaggcatgtgctcacctgccactgagcctgaggcagctctgttactctctcctgttgggacagctttccaaacacagcgtgtttggggtgatggactctcaaacacaaaacactgagtttaccgctagttttggcatttttccaaacaggctaaccgtcccaattgccagtgacccattccagtattcatgcaccagaaatgtcatggtcaaaaacaaaaagccaccggtgatggaaggacggaatatgaaccaattaaaagcatttcattagctcttctctcttcatcaggtccgcaacgccggctcaggttctgagacgcagcttcgcgtctcctgggacagtgtcttgagtgcggagcagacgggtcgctggtggattgtggggtccgcctggagtggggccccgatgatcgacaacagtcaccatacgcacctgcagaagcagcttgtggggacggtagggacacccatgctcaaggctgccaggcagaggcacccccctgtgtggtgtgtggtcctggctttacctggagcagctctcttactgttcttgaatggtcactgaaatgtacaaggtttatctggaggccttacagaaattgctattaatattacattgtgatataattattccatttctgttgtatctttttattggactttaaaagatctaaaagttgaatggcacggggcaggggagcgcatgaggacctgaacgctcacggggcaggagtccgttgctgagacccctcaggctgccccccgggctgtgcattctaggctacaggctatggatttcacattgtggaaattcaagcccatttttcatccagacttccctcgttatcccctcatgtccttccctgtcccagattctgtgtcactcatggtcacggtttcccaggctctgccagtgactggttctctgttttattcatcgtcgcttgccctgaggttgaaccacgactgagaagcctcccacatgagtgttttctcccccagcggctgtggcttcactatgtgttccccttgcacagaggggcgttgcccgagagtggacttggtgccatccgcccacgtagacctcacagttctattcagtgacactgaagtacagtttggcacctctcgggaggcagtttgcatggagacatgcgtatgacttgtccattcatcgtgcttccaggtcagttcaaagatcctagaactcgcccggaagcagaggatgaacacagacatccggagaaacatattctgcacaataatgacaagtgaagattttttggatgcttttgaaaagcttctgaagtaagcatttgtgtgcacattttgacctattaatgagatgctgtaaaataagtaagttgatttgctttttgagttttggacgactgagtctgatgctgcctagggaggactgggctgttctcatgaccatccgctcacgctgttggattcgtgcatctctgggttagtcgtcatgttcctattaatttgcctctagtagttcctcattagaacattttatgatatataaagattgggggtttggggtttttttttttgagacagggtcttgccatgttgctcaggctggagactggggagttttgactgaaagtatctgatgaccttgtcagtggctgttggttgtcacgaattgcttaaaaatacataaatcttcataataaagctattctgattcttcatttaaaacatcctggtatagtttgtataattagttgtaataagattttaaagatcctgtaatcccagctacttagaaggctgagacaggaggatcactttagcccagtagttcaagaccagcctgggcaacatactgagacccccatctcatttaaaaagaaaaaaaaaatctttaaatgtacctgtgtagttttatgaggtacttctaaacaatgtaatgttaatacatattcttttatttgcttcaaactaggatgaaatacagggagaacatggttccttttaggattctgataattagggttttattttctaaactagagtttctagttggagtggaagtcctgagttccctttgcctctctgtggccttgccgttttgccgaaaacctcccatctccctagtcacccttggtctctaaaagggctcttttgaggagaactcttattctctagtcagcgggtctagcttatcctttgtactcgaaggacttcgtttatttttcctctggttgacttcatgtgttgaaaattttggcctatcaaactacgtgtattaaacaatagtttttcccattcttattcctcaaaatcatgagttatgagtctaagcttttaatcaacatgaattgataatcaatgcagctgaaactcagttggttctttgggccgccttcgccgcctgcgctgccttcacctgagtgctctacgtggggctgtgctgtttgcagtggagctggtgctcctctcctgaggtacagagtgtctgcctctgtgcagaggtggcagcctcagccgtattcggatctcaccagaaactggaagcagcccacatacccctcagttggggaaaggataaaccatgagacgccgtctaagggatacttactacttggcatcacgaggggcaaactcccaaggccccaagagcatggtgactctcgagtgtattctgccgtgcaggaagccaccttgccctgaatctgtgtgacagaggcagagtcaaaactagagggacagaagcagattagcagtggcccacggcaagggtggctcacggccccaggttctcacgggtgatggagagttctgtttcggcattgccggtggtgacctgaccatatgggcttatccacactcaggactctacactacaaaggataggttttactgtgtgtgagctctaactcaagttttacaaacgacggcaggcaccgtggctcatgcctgtaatcccagcactttgggaggccaaggtgggtggaacacctgaggtcaggagttcgagagcagcctggccaacatggcaaaaccccatctctactaaaaacacaaaaattagctgggggtggtggtggcacctgtaatccagctactcgggaggctgaggtacaagaatcacttgaaccggagagatggaggttgtagtgagctgaagtcatgccactgcactccagcctgggtgacagagcaagactgtctcaaaaaaaaaagtaagaaaatgtgaagtcatcgccatagcaggaaccagctctaagggcacacacgattgagtcagtttattgtcagccgggcacagctgtcgacttttgcagcgacgggggaccccctagatggtcttgtctcctctgacattttgccacattgtaggagaacctgaggaccagagaggttgtgacagggctgggcccctagctggtgtctgccgctgcctccacctcctttacgtggctcgcctctaaccagacccttccaggcgggaagatgttcccctgaaaggtatcagccattaaactttggaagtcgagtgatgttccagtcattgctgttctgttttctaggcttggacttaaggatcagcaggagagagaaatcattcacgttctcatggattgctgccttcaagagaaaacttacaatcccttctatgctttcctggctagcaaattctgtgaatatgaaaggagatttcaggtagcttagtgcggaggcaccagttacgtccgctctactattttttctacacaggctacctggctcaacccacctgcaaaggagttccccaagtcaggaggcccctgatatccccgtcacctggtccacgctggctgccaggccaccttcactgggagcggaagtgggagggctagaggggagtgtcaagggtccaccatgtcctcatgtcacctgcttctgccacagatgcaggcagtgtggccaggccagcaggagcacctcgtcggttcacagtgcaccagtctgttctgatgccccttgctgtggccttttccttagaatgttctgttagtatctgctgatttggggggaagaactgcaccagaaggagattcttgtgaagctgtttgggactatgctctataggcaagaacagtgaggccaccactaaaagtcttgatgtttagaatattaaaaataagataataagaaaatacctttaggttatgttgttagtgatatattatagtaatttgtggccgtttgccttttttctccttttaactatgatactagatgactttccagttcagcatatgggacaaatttcgggacttggaaaacttgccagctacgaatttctctaatttggttcatctggtggcccacttgttgaagacaaaatcgctttccctttccatcttaaaggttcgtgtaacgtgtgaaaatattgaaagcaatggaaatgggagtgtaattgtttagtacctggtaaatcaggtcctgttttaccagcgtattttcttcgattctgattcatctgaaaagtgcttgcattatcctagccaggacagaaaacggccagactaacatgtgctacaaattgatctggtaaatgaaggcaccgctgcagttcttttgctaatctgaatgaatgtgttttggagcttgaggttaatttgctggtcctaattataaaatcctgaactggtcactgttagtgaggagaagggcggatgaagtagggcctggtctccttagaggtgaggtgagtttgctcacgttgatgtaaggtgttttaaaactgtaggctttctcctgccctgctgtgttttgggactttgcagtggaccatgaaacacagacatcttttttcttccccccccaagatgggagttgctctgtcacccaggctggagtgcagtggtgcaatctctgcaacctctgcctccgggattcaagcgattctcctgcctcagcctcccaagtggctgggattacaggctcatgccaccacgcccagctaatttttgtatttttaatagagacgggatttcaccatgttggccaagctggtctggaacccctgaccttgtgatctgccctcctcagcctcccaaagtgctaatattacaggtgtgagccagtgcgcccagctgaaacctagacatcttaccaggtggagttggggttagatgtgggcctgtaaggcttggatggtgggaccaacagactctgaatagccaaaaaaaaaaactggagcgcctggggggcaaagggaagtgaaaagcagagatagttgaggggcgttgactgcagtggcccagacccacaagacagccgcagccacagcttcccgtgtgtttctgtgtgtcgtgtgcagttcatcagcatgccggctccagttcaccctgcgtcccttgctgtgtggtgtccaagtttggccactgtactgaaaatgagggcaccgagccttacgccaaatcctgacaactggaataacttagctcatggaggaggcgttgctccccctccgctcccctgccttgcctttcgctcgcccaggcattgcgctcatcctggaacagcacagatgctaccaccgatgagcgggagaggcgtggcaggagcacaccctcaggcgtagagctttagagatgccccccgccctgcccctccgggctgctctcattccgagtttctctgtgtttcgaccatgcttttgtggtctcgccgcgtcctcgggtccgcaagcgcctgtgatggtgtttggctgcgcacctccctgtgggtagcattcccgtcaccatgcgtttagtcccctcctctagctcgctgacattcagctaagattgcagtgggtccacgttggcgcccgtgagtctgttctgggtagcatcctactgtatacgtatgcctcagtttatatacttacttatcctactgatccgtgtttatttctgattttttgatagttttctagggcagagatatatatggattagtcttctagaagtaaattttatatatatatatatatatatatatatatatatatatatatatatagttttaattaggggatgggtacttttgggaatggaggtaatttatggttcagttctagatactgaatttctgattcataaggtgtatgacccgggaattccacttacactgctgagttgttctcaacggtggctgtggccggccacacctctgccagcagtgtgtaggaattcccaaggcccacatccttgccaacaggtgttcatttcttagctctggaaatagcttcttaaatcgggtagagtgggggaaggggggagattaatttttactctaattaactatattacaaatcattgaaaaagttggctaaatcagtgtaactttatttttctccatgtcctgaccattaggtagttgaattcagtgaattggacaaacccagagtccgttttttacgaaaagtattaagtatcctattaatggaaacagaagttgaagacctcagtttaattttcacaaggtatgtgccccaccctttccgacgagacatggaagagaaatgaagagattgttttcacttgtgttgatttacaaacacaaggttgtactatacgtgtagcttaatcttttcggttttatttttaagctggtatgcattagatctggggaatagaaacttgtctgctagcaaactaacaatgattgttaataataaaatatgttaagaagttcttaattgagaattttatttttaaaagaaactggttatgtctcactatgcgagatacccaggattgagatctaggagaggccagctcagccctgacatgtgtttatacgattcctttccagagtatctgacaacccaaagctgggggtgttacgtgagggtttgaagcttttcatcagccacttcttgctaaagaacgcacaggcccacagaagcgccgacgaagccaacgtgctgagagagaaagctgaccttgcaacgaagtgtctgcaaggaaaagcttccctgagaatgtagtcagggaaggaaggagggcaggtggccctttgactgtaaaatgtccttggtaaacccaaaggcttattctgttgcctgcgtgtgaatgtttggtagagctatatcattgtctgttaatgtattatattttgagattttttttgatctaaggttttattgtttgtatttcaagccattttcaaataactatcttgggggtgagaggagaaggagggagggaaaaggggtcaggcacactggacagggttctctaagcagtgaggctggtgtgtatgattgtcttaaaattttttaatagatatggccgagcgtgatggctcacccctgtaatcccagcactttgtgaggccaaggtgggcggatcacttgaggccaggaatttgaaaccagcctgggcaaaaccctgtctctactaaaaatataaaaattagccaggcatgatggcacatgctggtaatagcagctactgaggtggctgaggcacaagaattgcttggaccctggaggtagaggctgcagtgagccaagattgtaccactgtactccagcctgggctggacagtgagacttttgacagtgagactgtcaaaaaaaaaaaaaaaattaatagataaaacaggccactagagggtgcagttataaagaaattgatgaggtttttacctttttaaaatattggttagaagttcaaaaaccatcccttaaaggtgattgtttttttgagacagagtcttgctctgtcacccagagtggagtgcagtgtcctgtaatctcagctcactgcaacctctacctcccgggttcaagcgattctcctgcctcagcctctttagctgggactacaggcgcacgccaccacgcccggctaatttttgtattttagtagagatgggtttcaccatgttggcaaggctggtcttgaactcctgacctcaggtgatacacccatctcggcctcccaaagtgctgggattacaggcttgagccaccacgcccagcttaaatgtgattcttgatactgttttaagtatttaggttgcaattaactttggcaaagtcagtcgacataagccctgtggatatggccttatgtacactgtaatgcagacaggtgcttttcatcattcatgtaacattctcacacagttgaggatattcatctcctcaccaattccagattgtaaatgtaccatcttaaacaactctgaggtcaccaaacagtagttatttgactgttaataggtgctacttgcttgcaaggatttggagatgtaaacatgaagaaaatatagttactgcctgcaaagaattaacatccgtctagtgggagaaacaaacacaccccactcactaagtatggaaaactgattctgggaggaagcagaaatgtccctagataacagcatgtattgcagatacccaaatgtttattgttttctcagcccttcaattttgcttttctctctcaaatgctacagactcaatttaaatcttacctttgattgttgaaaaaagtcactaagatgtgaatacagaatagacattgagaggttatatatgtccaaaactcatctgtccagcagtcaccgtcctcttcagagtggtcacgttgggcagatgggcacaggtgctggtgatgcctctcctgggcaaaacgccccatttgtggcactttcagatactatttatttactttttaagagagagacaggctcactctgtcacccaggccagagtgcagtggcacgatcatagttaccgcagcatcaaattcctggactgaagcggtccttttgcctcagcctcgcggatagctaggaccacaagcagtagagacaagatctccgtatgttatacaggctggcctcaagtgatcctcttaccttggcctcccaaacaccgggattataggcgtgagcccccgtgcctggcctcaaattttattttagctcgaccctatggcagtttgtgtttggaaatcgtgatgtgaagtcatcagtatctgtgcatatccctaaactaatggtttaagctttgaagcatgcgcaagcaacatgaacaactgaatacagaaagtaactgaaagcagcacagagactgtgtcgtccctacagacttctaaccctgcattcagcaacatcattcgacccgaagccagattcaaaccctatgtcttctagcaggttctgaatttagaggacaaataaggtgacaggtactaagagaagagtgaattaagtgaaaatcttccctttgttaaggagctttttaacaagagtgtctttgctgggtggtgattgggatgtaacagatcagttctactggacttgtagcttgatagtgaaataaggagcttgggctaaggtataaatcaacacactgcttccttcctccagaaggtcttactgtgaaggaaaaaatgtcagttgaactaaattgtgcttcacgcctcggtagatttgcattctgatgcaagcccccaacctcacggaccaagaggatccctggctgcctgtgaatggcccacatttgagtggtgctaacttgatgtgagtaggcattaattatgggtgcggctactaagatgggaaaaactatcacgacagtggcaccacctgatttcatgatgtaccatatgcagtaacccatgtttgaggtacagaattgaagctgatttttctgcaaaagatgaatttctataaacaatcccatttttatattttattattaaaacaaaaatacctctctttgctagagagttatatgtatgacttaaattattagctatggtttgcatttagtacatggcagattgcctgtaagtctgttcattttaacaacatacagggctgggcacggtggctcacgcctgtaatcccagcactttgggaggttgcgggtggatcacttgaggtcaggagttcgagaccagcctggccaacatggcaaaaccccgtctctatgaaaaatataaaaattagctgggcatggtggcaggcacctgtaatcccagctactcgggaggctgaggcaggagaatcgcttgaacctgggaggcggatgttgcagtgagcagagatcgtgccattgcactccagcctgggaacaagagtgaaactctcaaaagcagaaacaaaaacccaacatatatgggctgttagatagtaattgtaatttcgtataaatagtaaatgagtacatcttgattaaaagctatgaattcagaattgcttttaaatatatagggggttttttgaaatttattacagtgcaattgaaaatacacttaaaatactgcaggatgcttagtgctcagtgttatgtatgaacttgtggactttacaatgcaggttgagaactgctaatgtatagaatgactaaacagctgtctttcagggtatcatttttaaaggtataaggaacaaactttaatgtattgaaatgcataaataaaatttattttttatattttg

SEQ ID NO: 1223 - DNA, 37926 bp, Homo sapiens
agagaaggagtagcgcgttcgtgcgtcctagttccagtacagcgtggagggtttaggcagcgtgttctgattctttgcgggacggcgagcgcatttgtgctttgcccgccgcggcctaggaggccttttgaggccgcgtagtcggtgtttttgaactgactctacagcttctggcaggccgtgcggcgccctgacccggcctcaccatgttggtgctgtttgaaacgtctgtgggttacgccatctttaaggtaggtgggagagcgagccgttaaagggggaaggcggatgctggacagacgaggagagggaaagacttaagcacggaactactcagagtagcgtgggtgcctgttatagcccgggctctgggaggagggagaaggcctttacacctgagagccatgttacgtgtaacacgtggccccgccgtttggggagacccgttctgcattagaggattttatttcctcccgttgaaggggtgggcaggaggcgtgttagaatttaacagattatagggaattcggactttattctagatgttttgaggaatgatcgaaagattttttttttttttgagatggagtttcgctcttgttgcccatgctggagtgcagtggcgcaatcttggctcactgcaacctccgtctcccgggttcaagcgattctcctgccttggcctcccgagtagctgggattacaggcctccatccaccaccacgcctggctagttgtttttgtttgtttgtttgcttttagtagagacggggtttcaccatgttggccaggctggtcttgaactcctgacctcaagcgatccacctgcctcggcctcccaaagtgctgggattacaggcgtgagccaccgtgctcggccaatcgaaaggatttaagcagaggaatgacctgctaatttgtcttaatacggttactctgctgtgtggagattagactcgaggagataagaacggcagcaagaatacttttgcattcatttggacaagatgaaattgcctggtatggagagaaacaaatatcgatagaaattgtgaaggtagaacaggaaggactggctaatagattgaatgtggggttttggtttaaataagatgttaagaaagtttcttggggaaggactaaagatttccggtttgggctgtgcgaagcttgcgttgtctattagacctgataatgcagttgtgtagatcgggcagttcagtatttcagatttgaagcttaggggaaaacatctgggctggtgatgtcagtttgaggtttggttgttttcgtggggaaagtttgacaagttcgtcagcactgaaatggttgaatggtaagacattcgtatcgcaagatgctgttgagatgttaggaagaatgagtgagattgagtgccttttcttgtgcggtgcaactcttctgaggtctgtgaatatagcaatgaaaaataaagtttttatgtatattctacatatatatatgttggtagaaagcaaaaacgctaggtaaaaataaatgtaatacaattttagctatgaaccaaaaaaccatttgtggtgtggatgcaagaaagtctggatgggtgcagagttctccatgtttcacttctgacatttgaaaatacgcagtttgcatttgatacgtcaaatgttatttttaagaaaaccaataaaatcattaaaaccgaaaaggcagttttgcttgtttttaccttagttggagttatctgcaattgccgtattagtgttttaaggaacttgtaagtaagctccttagtcccctttagagctacgaaacatgtcaattttacttttctccagctttttggaatcttatctaaattaccatgtagagttctgcatagcttcaaattctcttagccaatgtggtctgtaagtgtctatcgatgaatttcaccgttaattgccgtagtatactgtcctgtaccggatgtgaagaggagcaactctgcacagtgcactggttgtctcccatggtaggaaggaattggcttatcaatggtcggatttctagacctgggtcctaaaatactcaaccgtgtctcgatgaattactgatttctattaatgaaaagtgtcctcctccatgaaaatgtctttgagtattccgttggagtttgcagtgctatttatctgcaagttactgttcaaaatgattaaattgtggtttatgtaacctagtactaaagaaataactagttaagctcgaatatgttgacattgattagtttgtaattattggaattaacattgatcgtttctgagtataaaagacatacaaacgttctggaactagtgatggctgcacatttttgtgaaaatgcactactaaaaagtgaattgtacactttaaaagggcaaatattaagatacatgtaaaattaatatgatatatggtgaattttatctcctaaaaaagtagacatacggttcaaagttattagtttcctttcccataatctttcaaaatgctagggtataaaattatgttggttgccaggcatggtggctcatgcctgtaatcccagcactttgggaggccgaggccggcggatcacaaggtcaggagtttgagaccagcctaaccaacatggtgaaaccccgtctctactaaaaaaatagaaaaattagctgggcgtggtggtgtgcgcctgtaatctcagctacttgggaggctgaggcgggagcattgcttgaacccgggaggcggaggttgtggtgagctgagatcgtgccattgcactccagcctgggcaataagagcacaactccgtctcaaaaaaaaaaattatattggatgcatataattcatgctttgatgagaatgctttaggaagttttttgaagttttttgtttttttgttttttttgagacggagtttcactcttgttgcccaggctggagtgcaatggcgcgatcttggctcaccacaacctctgcctcccaggatcaagcaattctcctgcctcagcctcccgagtagctgggattaccagcatgcaccaccacgcccagctaattttgtatgtttagtagtgacagggtttctccatgttgaggctggtctcgaactcctgacctcaggtgatctgcccgcctcagcctcccaaagtgctgggattacaggcgtgagccactgcacctggccttgaagttttttttaaacttccatttacagtgaggaaaacattttatgtataacccatgtacacatacaaattcatgtttatgtatttaaaatttattttgaggcagggtcttgctctgtcacccaggctggggtgcagtggcaggatcatggctcattgcagccttggcctcctgggtcaagtgatcctcccacctcctcccgagtagctgggactacaggctcaagccaccatgcctggctaattatttatttatttgtatttgtatttatttattttttgagatggagtctcactctgttgcccaggctggagtgcagtggtgtgatctcggctcactgcaacctccgcctcctgggttcaaacgattttcctgcctcagcctcccaagtagctgggattacaggcgtgagccaccatgcctggcctaaatttttttttttttttttaagaggcagagtctcactatgttgcctaggctggtctcaaactcctggcctcaaggtgctgggattacagccatgaggtacggtgttctgcccacttatgtgtttagagcgattcaaaaggaaaacacttccaaaaagttattgctcattaacagggttatatatatataaatgtaaagacattgtgtaaaggaactgttgtgattaattctaggatattataaaaattcagcctgtggccgagagcagtggctcacgcctgtaaccccagctacttggaaggctgaggcaggacaatcagttgaacctaggagcagaggttgcaatgagctgcggtcgcgccactgcagtgcagcctgggcgacagggcaagactccgtctcaaaaaaaagaaaaaaagaaaaaaagaaattccacctgtgtccttgtgtcacgtggcacacagcataagattttagtcttgctcataccagacttccttcagctgctcttccatgtggtagccattagtacgtataaccatttcacatgagatgtaactgataggactgaggaagtgaattttaacttacttgaattttaatggttatattgtacagtgtagctgtgtagcatagcattttgtgtcacttcattttctcaaggtttggagaaagatttttgatgtacataccaaatgtctatataaaacctaagtactgagcaatatattttttctaactttattgggtgtactttacatactgtataactcacctataggttttagttacaatccagttttatagtacactttgttgcaaaaagttctcatgcccattttcaagttagtcctgctctagacaaccactgttcagctttctttttgcataattttttctagaagtttcatgtaagtggagtagtattttagtcttttgtgtttggcttttttcacttagtgtaatgcttctgaagctaaccgaagagctttttcacatttgttgcgtgtatggatttgtttctttttgagcagtgcacattttaaactaattatcagttttatcctgtatttaaacaagtttcataaaatattaacttgctcatattgtctgtggaagtgaaacttaaaagttagcatcaaataatttacacaaaacatagaggttgggtgcagtggctcacgcctgtcaccctaacactttgggagggtgaagcaggaggattgtttgagcccaggagttgcagaccagcctgggcaacatggcggaaaaaaaattagctgggcacagtggtgcttgcctgtagtcccagctgctgcaggaggctgaggtgggagggaggtcacggctgcagtgagctgtgattgagcctctgcactttagcctggacaacagagtgagacctcatctcaaaacaaaacaaaaaccacacaaagtctcaagcaatcaattaaaaatgaaaatgaggaggctggacatggtggctcacacctgtaatcccagcactttggaaggctggggtgggcagatcatgaggtcaggagtttgaaaccagcctggccaacatagtgaaaccccgtctctactaaaaatacaaaaattagccgggcatggtggtgtgtgtcgccaaatctgtagtcccagctgaggcaggaggatcgcttgaaccagggaggtggaggttgcagtgagaagaccgcgcctctgcactccccagcctgcgtgacagggcgagacactgtctcaaaaaaaaacaaaaaaagtgattaaaattcttaattccatataccctcaccaatattctgtatcagctgcccaagtattagataggatgggctcaatcctaaaaggcacaacccccatatttaacatccctaaaattgggatgtcttacaattgatgacaggtcaattgggagtgtaaaagaataacataagctgggtgtggtggctcacgcctgtcatcccagtactttgggaggctgaggcaggtagattgccagacctcaggagttcgagaccagcctgggcaacagggtgcaaccccgactttactaaaatacaaaaaaaaaaaaaaaaattagccaggcatggcagcatgtgcctgtaatcccagctacttgggaggctgaggcaggagagttgctttaaccagggaggtggaggttgtagtgagctgagatcacgccactgcggtccagcctggccgacagagcgcaagactccgtctcaaaaataaaaaaaaaaagaatagcatgttaaattttgtgaaatagagtatgcacagatattatgcatatatttttatttaaaaaaccagctggatcaggcgccatggttccttcctgcactcccagcactttgagaggccaaggcaagaggatcacttgagtccagaagttagagatcagcctgggcaacaaagcaagcccctgtctctacaaaaagatttttaaaagagctagatgtcgcagtgtgcacctatagtcctagctacttgggaggccgaggcagaagaatcgcttgaggccaggagtttgaagctgtagtgacataggaccacaccactccactccagcctggacaacaaagcgagaccctgtctctggaaaaacaacacagctagtaaatttaaaactatactttgctaataagcattatttatcaagtccataatatagcacatctacacattaagacgcagttctagtctggttatatattattttcagtaagagaaacacaatgttgcaagttgtataaaacttagatgagtgacaagatgattttaggggtttgttctgatgtataattttttttttttttttttttttgagacggagtcttgctgtcgcccaggctggagtgcagtggcgcgatctcagctcactgcaggctccgccccctggggttcacgccattctgttgcctcagcctcccgagtagctggaactacaggcgccttccacctcgcccagctaatttttttgtatttttagttagaggcggggtttcaccgtgttagctaggatggtctcgatctcctgacctcgtgattcgcccgcctcagcctcccagagtgctgggattacaggcatgagccaccgtgcccagcctgtataaatttaatcacacatggttgaattagatatgttggtaaaaataacccaaactagaaaaacttagagtcacacaaagcaataaacaactacaaagcctagagttggtattaacaatttataaactaatagctctaactttgtatatcatgaagttttagaatccagagacacctcaccaagtctcatgactatactgaaaacactgattaaaattttttgaaattgttcagagaatgcagctaaccataactgaagttcactatttttaagaggacatgtatcaaataggggatatgactcatgagtaaaattcacattttttctagctgaaaagcaagtatatttgaagataacatttgggtaacaaaattgccatatttaaaagatactttcggcctggcggggtggctcacgcctgtaatcccaacactttgggaggccgaggtgggtgcatcatgaggtcaggagatcgagactatcctggctaacacggtgaaaccccatctctactaaaaatacaaaaaattagccaggtgtggtggcaggcgcctgtagtcctggaggctgaggcaggagaatgacgtgaacccaggaggtggagcttgcagtgagccgagatcctgccattgcactccagcctgggcgacagagcgagactccgtctcaataaataaataaattaattaaaaaatactatcaccattctaaaactgaagttaaaataacaaaggaaatgtgataaaatcagggcaattcatgagcacacaaaggtcttcaaagactatgttatgtcagccaaaaccattactatgacaaataaaaccattgtgttcccaactgcaacatcttgaagaaaacattgctaataaagaccatctaaataagaaagttagagatattgctacattttctgtattacatttgtctcaaagtttttatttgtctcaaatttttaatcatttcttttcagccagggtaatgataaatatttgtatacagaaatccattttaagttttatcattttaagataatttccatttctaagtagaaatagtatacaactattaccattgcaatctttagcattgttgttacaacagtactagttttaaaacaagtctttatattttatagatacaaactgaaatattaacaggtaaaaattaaatgtctaggtcttgcttcaaaacaatacaaggcggctgggtgtgttggctcacgcctgtaatcccaacgctttgggaggccgaggcaggtggatcacctgatgtcaggagttcaagaccagcctggccaacttggtgaaacccagtctctactaaaaatacaaaaactagttgggtgttgtggtgcgtgcctgtaatcccagctattcaggagactgaggcaggagaatcgcttgaacccgggaggcggaggctgcagtgtgccgagattgcgccactgcactccagcctggcgacagagtgagactccatctcagaaaaaaaaaaaaaaagccatttactgtgattcctaaaagtatgcatgaacatgtgttgcacagacattcaaagtcttggagaatatatacctaaatgttgataagtatattgttgattaaagtaccctatgtttcttttgcatttaaaaaatttctcacatctagatgtgtctcacaattgacgatagttttagagaaatccataatactttcatgttaggatgatcatagcagtaaataacgaatataatctattgaaagtagacaaaagttttttttgttttttgttttatttttttgagatggagttttttgctcttgttgcccaggttggagtgcagtcgcgcaatctcggctcactgcaacctctgcctccgggttcaagcaattctcctgcctcagcctcccgagtggcggggattacaggcatgtgccaccacgcccagctaattttgtattttttttttttttttttttttgtagagacggggtttctccatgttgatcaggctggtcttgaactcctgacctcaggtgatccgcctgcctcagcctcccaaagtgctgggattacagatgtgagccaccatgcttggcgcaaattaaagtttttaatgattacaatactttactgtaaagggattaatggctcttttaaaagaaaggttctcggccaggtgcagtggtgcacacctgtaatcccagctactcaggaggccgaggcactagaatctcataaacccaggaggtgaaggttgcagtgagccaggattgctccactgcactccaggctgggctacagagcgagactccatctcaaaaaaataaaaagaaaggttccctgccctaccccctaggaccccatagctccagctacggcccaaggctggggcaggaatatctcttgaggccaggtagattctagactgaatagccactgtactacagctgactggactagatctgaattccatttagctgttaaatgggcaattcgaactagtaatttgaccaaaattacatgcagggtaagaaaactagttcattatcttagtgaaagaaatagcttctacaccttcattttacatgtaaaattgtatttgaagaatgcagctgtatatgcctcacctgtaccatttaaataaaactatttaaacattttattacaggttctaaatgagaagaaacttcaagaggttgatagtttatggaaagaatttgaaactccagagaaagcaaacaaaatgtaagtactcttgaaatcaataatttagcagttaacatttagggcttgttttattttttacatttttccctgatttatataatgttacattcgtagttttctgttttgaaatctgtttcaggaataattttggtatgaacctaattattacaaatgttttacttggaatataggccatctcaattaatttgaaggcagtagtctcccccttacccacagggattatgttccagaagaccctgtggatactttaaacctcggatagtaccaaatgtgattgctgtcagtaggaacacatttgtcttcgtgtcttccacacacaaatgtaataccttttttatcttaactaagcacttaccgcacacaggggttgtaacctgctttttgagttttgcaacatcaaaactagcatgaactactttttctttcatcacaatttcatggaagattcattcttagtgtagatgttaaatctttggtttttttgtttgttttttgagacagagtcttgttctgtcacctaggctggagtacaatggcgcaatctctgctcactgcaacctccgcctcctgggttcaagctattcttctgcctcagtcccccaagtagttgggattacaggtgcccaccaccatgcccagctaatttttgtatttttagtagagacagggtttcgccatgttggtcaggcaggtctcaaactcctgacctcaggcgatccgcctgcctcggcctcacaaagtgctgggagtacaggcgtgagccaccacacctggcctaaatcttcgtatttgtatgtatatttaagggaccacactagtatgttcccttaccagataagaaaaccttgcttaagatgacactgttgcctggtgtggtggctcatgtctgtaatcctagtactttgggataccaaggtgggtggatcatttgaggtcaggagctcgagaccagcctggccaacatggtgaaaccccctctctcctaaaaacacaaaattagccgggcgtggtggcacatgcctgtaatcccagctactgggaggaagctgaggcaggaaaatcccttgagcctgggaggcggaagttgcagtgagccgagattgcgccactgcactccagtctgggtgtcagagtgagaccctgtctccaaaaaaaaaaaaaaagatgacactgttttaggcaactagaagactagttttccttcttaaagggttatatgctttgttgggttaatctgattcgttgttgtcaatgatgtattcttcttggaactgaatctaagtgatctgactcaatattcgtcactaccactgagacaacgatgaatcaactatatgtttctttctggataaaatactaccctgaggctgggcgtgatggctcacacctgtaatcccagcattttgggaggccaaggcaggcggatcagttgagcccaggagttcaagaccagcctgggcaatataggaaaaccccatctctaccaaaaacaaaaattagctgggtgtggtggtgcacacctatagtcctagctgcttgggagactgaggctggaagatcctttgagctcgggaagtcagggctgcagtgagctgtgattgcaccactgcattccagcctgggtgacagagtgaagtgagaccctgtctcaaaaacataaagggggccgggcacggtggctcacgcttgtaatcccagcactttgggaggtcgaggtgggtggatcacaaggtcaggagtttgagaccagcctggccaatatggtgaaacctcttctctactaaaaaatacaaaaaaattagccagccatgggggctgggcacggtggctcacgcctgtaatcccagcactttgggaggccaaggcgggcggatgatgaggtcaggagatggagaccatcctggctaacacggtgaaaccccgtctctacgaaaaatacaaaaaattagccaggtgtggtggcgggtgcctgtagtcccagctacttgggaggctgaggcaggagaatggcatgaggcaggagaatggcatgaacctgggaggtggagtttgcagtgagccgagattgcgccactgcactccagcctgggcgacagagtgagactctgtctcaaaaaaaaaaaacaaaaactagccaggcatggtggcacaggcacatgcctgtaatcccagctacttgggagtctgaggcaggagaattgcttgaatccgggaggcagaggttgcagtgagccgagatcgcaccactgcactccagcgtgggtgacagtgagattctgtctcaaaaaaaaaaacaaaaaaccataaagggttaggatgtaacaagaatgagacctgacaataagctattttttttaatggcatttgtacaggatagacaaatgaatatcatgagattcctaaaaaggactcacgtacgttttcttgagtcaattctatgctgtataataaagtcatctctgtacagctttatgcaacaggggtttgtattaaagcttcaacatctttactcttggccaaaatttcctccaaagcctacaactttcttttaataatccaagcattactagcctaacatttagaaaaactagtaattgtatgaagaatatctaacttcacaccctgatacacaatggtaggcatgttttattggtgtgtgctttggaaacagtcaagcacttctttccaagttatgtggcttttgaatcaacgcactgcccccaataacatgtttatctcttttttttttaattctagagtaaagctaaaacattttgagaaatttcaggatacagcagaagcattagcaggtaaagtaaaaaattagaagcttgcttttttgaaaaaattaagtcttagccgtttgtttttcttgtttaaaaggttgtttgcttcagttgcctgtgttaaccttattcaatgttgtcaatgatgcattcttattggaactgaatttaagtgatctgactcattcgtcactaccactgagacaacattgagttagcttttttcaccatagggctggttttccccatgtgtgaggagaggtgagaagtggttaagttgatctccctgtggaaaccagcaacataatgctgaagcacaattcagtaaaaggtgttctacaagggaccaaggtaatgtggtcaagtatacagctctctcctcattttaatccaagggtagagttgtaatcctgagaacagccaggattcacagttgaaaaataatttaaaaagctcttctgggggtatagatttttagttcaaaaaaacatatcaatattcagagttatacagaaactgacagaggtgttatttttaaaagattcagaagaatggatgactcatactcttcaactagatttcatcacgggacaacagagtgatcgggtttatttactgtaattgactgcagtaggtcttacagttttgtttttttaagtgttagggaaaacaggaagagcagatataaagcccaaatcattaaattttcaactgcctgaattctttatcacaaatcagccaactatttggcggtgtagtttgaaaatgaaggaccgtgaggaagaatatggcttaaagctgggcaagaatatgacagatgcaaaaaattttgttaaataaccacaggagaaaggtacagtttttgtctgaaaatttggaatccaactaaacatgctggaacataacagaccaccctaaccttggcagaggggtaggctgaaggaagacccatagggccagtttctttgttttataaacatagttctagggctgcttcaccaactcttcagtaattagagttatatacagccataaaaaaaactgtggtaatattaacttggagaatttttaaaaagatagcctgttcatcacagcttttaagtatgggtaaacatttggtaagattccaagcaagattgtgttagctgtattcaaactctagggggtgttgttgacatagactgggatatgaacagttcctagtcctgatctcaagtagcctcttctgaattcctttttgcatacgatctttaatctgcttgggatatatctggccagtccttattaaactgtattaaatggacaagccaagcttttgctcaaacaagcaggtttttactattaatacctaatatattgagcacatactgattgtcagatttatgcttatgatttcataattgttatttaattcttgaatcctgtgaggcagataaccatcatctctatgttacagatgataaaacttgaaatttaagcagtatttccagattcatttacctagcttctttgtattatttaaaataatgtacaataaggctgggtgcggtggctcatgccaggaatcccagcactttgggaggccaagacaggcggatcacctgaggtcagttcaagatcagcctggccaacatggtgaaacctcgtctctactgaaattacaaaaattagccgggtgtggtggcacacaccttagtcccagctactcgggaggctgaggcaggagaaacacttgaacctggtaggcagagatagcactgagccaagattgcaccactgcactccagcctgggcaacagagcgagactccttctggaaaataacataaaattaagtagtgtacagtaaatggacaaaatgccatagtagttgagaatttaaagtcaattccccccagtctaagctccatgagggcagagactgttctgtactgtcaaattcctagacgctagcaaagtatacagctatagaaggtttataataaatattttggggaaaatgaatgaaaatagtgaattttatcaggaatgctgtcatagaaacatttacaatgccttttcctatctgttttcaccagaaagttaaatgaacatcagctaattaagaaagcagaatccttcccctgggaattcagttctcactgcctattataaggcagttttgacatgacagaaccacaactaaatggctgtaaatgtcacagtgtacattttaaacctcatagccttagagtttgatgagaccaggcacagtgactaacacctgtaatcccaacactttgaggggctaagatgggcaggaatttaagatcagcctgggcaatatagcaagaccccctctcaaaaaagatttttttttttttggagatggagtttcattttgtcacccaggctggagtgcagtggcatgatctcggctcactgcagtctccacctcctgagttcaagtaattctcccaggaggctgggttcagcctccaaagtagctgagattacaggtgataccaccatgtccagctaatttttgtattttttagtagagacggggttttgcctgttggccaggctgctctggaactcctgacctcaggtgatccacccgccttggcctcccaaagtgctgggattacaagcatgagccaccgtgcctggccatcattttttttttttaaataaagaaatagggtctgttggggtgtgatgttgaatttgtattggtctcagacattcatatatgctatttgcatgaagtggtttatttttattcttgattgtgttttcaacttgcaagtctttttttttttttttttgatactgatcttcggctggagtacaggggcgcgatcccagctcactgtagtctctgcctcctgagtagctgggattacaggctcatgccaccacgctcacctaatttttgtatttttagcagagatggggtttcaccatgttgcctaggatggtcgcatctcctgacctcgtgacccgctcacctcagcctcctgaagtgctgggattatccatttgatcataattcgaatggatatacgatcaggagggaagagcaagacctgacttattaagcacaaactgcctgaccttggaaattgttgatagaccttcattcctgccaagcatttttcttttctttttctttttctttttttttttttagatggagttttgctcttgtcacttaggctggagtgcaatgtcacggtatcactttaacctccacctctgggttcaagcgattctcctacctcagcctcccgagtagctaggattacaggcgtgagccaccagggccagctaatttttgtatttttagtagagtgtttcgtcatgttagccaggctggtctctcgaactcctgaccttaggtgatctgccagcctcagcctcccaaagtgctgggattacagacttgagccaccacgcgcagcccaagcatactttttatgttttttgtttttgttttgttgagacagggtctgtcaccaggctgctggagtacagcggcatgatcatgactcactgcagccttgaactccctgggctcaggtgattgtcccagctcagcctccccagtagctggactacaggcacatgccaccacacccagctaatttttgtatttttagtagagacagggtttcgccgtgttggccaggctggtggtacacaccaccatgcctgggtaacccaagcatacttttacctcagtcaaatgtcagataaatttcagaagaggtattagttcgtgtgggtccagaaaaagggaatataggtctaaggaagggtgagaaatataaagcagctgatttagaacttgccagaaataccagcggtctcaaaatagaataggcagcctttgctactaagttttacattgctggaggtgtacaagtggagatacaagcaaagctaaggccttcactcaaacatgtttatattatggcagaactttgaaaatgattacactcatttttactagttttgatgtgattttaggatatttcaggacagtctatttgaaatgacaaaggaaagtgagtctgttttgtcttcccaaaaagattgtttctaagatttcatgattctcccttgagttcatgagaagattcttgtgagaaggaaagaaaccctggacctgattttacccctggctctgtagcaaaaatgagggtgggaagatcaaatgaaattgtgaaacatgtaacttataaaacatatatcatttcatttcagaagtaacattaaattcaagccctttgaaaggcctattttatttttttaagtgtcaactagggcaaggtctcaaagttaaaaatttgagagttaatgcttttgtttttctttttcttgaaaagcattcacagctctgatggagggcaaaatcaataagcagctgaaaaaagttctgaagaaaatagtaaaagaagcccatgaaccgctggcagtagctgatgctaaactaggaggggtcataaaggtaaagtcacgatatttttggtcatgcctgctagtcagatctcacagcataccaactacaaagcctagcctttgcaataagttgcttatcataaattctcaatacatttttttcttttctctaagctacatgataatggatttcccctaacatcagctgaactgagcaaataagtaatacctatttgttctagaagatatagaagaacaaaaaatgataaaaattgactttaacaaatctgctacccatatataatgttaatgttctatgtatatcatgccatatttttgtctagccacatttttttccaacgaaaatggggtccttatattttttagaaatatatttattagaaaacttttagtaggggtgtattgctggagatgaaataaaatgtgagagtggaaagaaagactaggaaaatagcctcccaaatacagaaagcagaacaattcgggcggggcgcggtggctcacacctataataatcccagcattttgggaggccaaggtaggagtatcacgaggtcagcagatcgagaccatcctggctaacacagtgaaaccctgtctctactgaaaatacagaaaattaaccgggtgtggtggcaggcgcctgtagtcccagctaattgggagtgcagtggcgcagtctcacagctcactgcagacttgacctcctgttctcaagcaatcctccctcttcagtagctgggactacaggcacatgccaccatgctggctaattattttattttattttatttcatttatttgagacagagtctcactctgttgccctggctagagtgcagtggcatgatctcggctcactgcaacctctgcctcccgggttcaagggattcccctgccttagccttccaagtagctgggattacagacgcccgccaacacgccctggcctcccaaagtgctaggattacaggcatgtgccaccacgcccaacctgtaatttttttttttttttaagacggagtctcactctgtcgctaggctgaagtgcattggctcagtcttggctcactgcaacctccgcctcctgggttgaagtgattctcctgcctcagcctcccgagtagctgggactataggcacctgccaccacacccggctaatttttgtatttttagtagagacggggtttcatcatgttggccaagatggtctcgatctattgaccttgtgatccacccgcctcggcctcccaaagtgctgggattacaggcgtgagccaccgcgcctggcataacctgtaattttaaaaagaagctaaataacaggtagtaaaagatctccttaaaccaactacttggtcaaattatattaatctttttatagcttttaatttatatagccaagctgtcttctggaagcttgtatcagtttttacttccaccagtgatacagtcaagtattctacaaacacactggaaattatgcttcttgtccaactgagaaatgcgtatatttaaattagtgccactttaatatttaggaaataatttcaggctgggcgcggtggctcatgcctgtaatcccagcactttgggaagatgaggcgggcggatcacttgaggtcaggagtttgagaccagcctgtacaacatggtgaaaccccgtctctactaaaaatacaaaattagctgggcatggtggctcatgcctgcaataatcccaggccgagacaggagaatctcttgaacccaggaggcggaggttgtagtgagccaagattgcgccactgcactccagcctgggcgacagagtgatactgtgtctcaaaaaataataataacaacttcaggaaagtctttttttttttaatttaatatagatgttcatgttcttgtaggaaaagctgaatctcagttgtatccatagtcctgttgttaatgaacttatgagaggaattcgttcacaaatggatggattaatccctggggtagaaccacgtgaaatggcagctatgtgtcttggattggctcacaggtgagaattactggaaaataaagtcaacttacttttatttgataagcgcttaacatagatctgttctaagaatgttacaaatgctcatttgaaccacatcagaaccttatgaagaagatgatagtaatatcctcatttacagatgaaactgaagcccaaggtcaatacagctggtaagtggtaaagccaggatttgaacccaggcagtctggctctattgtctggattcttaaaaccttaaaacctcatcaaaggaattctctactactctgatcttggatgccctgtttcttgggctttccctcctttatctctgctaagtcatgccactcctccatctacttagtattcccccaaattctctcatctgctatggtcttatgggataggtgtgtatttgtgttttcattgctttactctgatttttaataaggcaaagaggactaggtgcagtggctcacccctgtaatcccaactctttgggagaccaggagtttgagactagcctgagcaacatagcaagaaatatgtctctctctgtgtttttttgtttgttttgtttttgttttgttttttttgaggcagattctcactctgtcgcccagactggagtgcagtggcgtgatctctgctcactgcagcccctgcctcccaggctcaagtgattttcttgcctcagcctccgagtagctaggattacaagcgtgcaccactactgcccaactaatttttgtatttttagtagagacgggctttcaccatgttggcctggctgatcttgaactcctgacctcaaatgatccatccgccttggccttccaaagtgctgggattataggcatgagccaccacacccggcatttttttttttttttttttttttttgagtcagggtctcactctgttgctcaggctggggtgcagtggtgcgatcttggctcactgcaacctggacatcctggactcaaacaatgccacctcagcctcccaagtagctgggactgcaagtgtgcgccaccatccctggctgattttttaactttttgtagagacggggttttgccatgctgcccaggctggaactcccaggctcaagtgatccacttgccttagcctcccaaagtgccgcgactgcaggggtgagccaccatgcccagtcttctccctatttttaattgcatgttaaccctatcatatttcattagaagtcccttagaataggcattattgctatgttgtgatacatctgttcatgaaaagcttaatactttggaattgcactacagttaacagggttgtgaagaaaataatggtaggtagttgctcaaaacctgtgcaactttgtaatcagtactgtcaaatagtaatcctaataaaattattaccacagttcaaaagacattttaagctaatattaaaagaaacactacaggctgggcacggtggctcacgcctgtaatcccaacactttgggaggccaaggcaggcagatcacaaggtcaggagatcgagaccacggtgaaacctcgtctctactaaaaatacaaaaaattagccgggcacagtggcgggcgcctgtagtcccagctacttgggaggctgaggcaggagaatggcgtgaacccgggaggcagagcttgcagtgagtggagatcgctccactgcagtccagcctgggtgacagagtgagactccatctcaaaaaaaaaaaaaaaaaagggagaaagaaacactataggccaggcgcagtggctcacgcctgtaatacatcccagcactttgcgaggctgaggcaggtgaatcatgaggtcaggagatcgagaccatcctggttaacacagtgaaaccccgtctctactaaaaatacaaaaaaattagccaggcatggtggcgggcgcctgtagtcccagctactcgggaggctgaggcaggagaatggcgtgaacccgggaggtggagcttgcagtgagtggagattgctccactgcactccagcctgggtgacagagtaagactccgtctcaaaacaaaacaaaaaagaaacactacaatttaaaaaggtctattttaaaattaaaaggtgggcatagattgaaagggttgaagctgctaagctagagttaagagcaaaaatgcacaaaggttagggagagctttgtaataagcatttctaagagagaacaaatagtgaaactgagtcaaaaatccaaacctgggtaaatctgcattgtgtatagcagtggttccctatcaagggcaatcagatgtccccccagtaggcatttgtctatgtccatagacatttttggttgtcacaattggaggtgggttggggtctgccatgagtatctggtggataaaagttagggatactgctaaaggtcctataatgcacagggcagcctgtacaacaaggaattaggcccaaaatattaattgtgctgagatgaaaaaacatttttatacagacaatattgttactccacagctttctgttttcagatgttaagagtcctgcaaagttcctaactggtagtataaagcttaatatgtgctattaaaaattgcatgaaccaatatggctttttttttttttttttttttgaggcggagtcttgctttgttgcccaggctggagtacagtggcacgtgatctcggctcactgcaacctctgcctccccggttcaagcgattctcctgcctcagcctccagagtagctgagattcaggcgtgccccaccatgcctggctaatttttatatttttagtagagacagggtttcgccatgttggccaggttggtctcgaactcctaacaggtgatctgcccacctcggcctcccaaagtgctaggattacaagcgtgagccaccacgcccagtccaatatgacttttgtattacacagcttatcctatttgtcattcatacataaactcattcatgttacagaaataaaggtcgtagcagcacatatagtttttttttttaatgtgtattttctgttctcgtatggtgcatttctacttagctgatttttcttcttagaaaaaccaattacagctctgactacaggctgatttgagtaaaaacaaaaacaaaaaaaaactttaaggtgttaatttaaatgcttttcctagatgctatcttgctaatttattttcccctttcttcccagcctgtctcgatatagattgaagtttagcgctgataaagtagacacaatgattgttcaggcaatttgtaagtatagtacatgcaaagtccgatttgttgctctgtccttcatgcgttttcatactgttgaaactatcttttatgattctgtctgttgagaaagagaaaggaggccaggtgtggtggctcaagcctttaatcccagcacttgggaggctgaggcaggcggatcacctgaggtcaggagttcaagaccagcttggccaacatgacaaaactctgtctttactaaaaatacaaaaaaaattaaatgtgcatggtggcgtgtacctataatcccagctactcaggaggctgaggcaggataattgcttgaacccaggaggcggaggttgactatttggagattatatgaatcacagaattaacattacgttaattaattcatttgtatttttccatgaaaatgttaaaaacataagtgcaatctttgtagttgtgtattctgctgtgtcattaaatggtttttagaaagctcaaaagctgccaggcacagtggctcatgcctgtaatcccagcactttgagaggctgaggcgggaggatcacctgaggtcgggaatttgagaccagcctgaccaacatggagaaatcccgtctctactaaaaatacaaaattaaccaggcatggtggtgcatgcctgtaatctcagctactcgggaggctgaggcaggagaatcacttgaaccctggaggcagaggttgtagtgagttgatcgtgccattgcactccagcctgggcaacaagagcaaatctccatctcactaaaaaaaaaaaaaaaaaatcaaaatcttaatcgtttttctattttagaaatgcattcggccgtggctcacgcctgtaatcccaacactttgggaggcagaggctggtggatcacctgaggtcaggagttcgagatcaggccaacatggtgaaacccgatctttagtaaaaaataaaaaaattatctgagcatgatggtaggcgcctgtaatctcagctattcaggaggctgaggcaggagaatcacttgaacctgagaggcggaggttgcagtgggccgagatcgcaccatttcactctagcttggacaacatgagcaacactccgtctcaaaaaaaaaaacaaagtattcggctgggcgcagtggctcacacctgtaatcctagcacattgggaggccaaggcgggtgaattgcctgagctcgggagtttgagagcagcctggctaacatggcgaaaccctgtctttactaaaaatacaaaaaagtagccagtcgaggtggcgtgtgcctatagtcccagccacttaggaggctgaggaaggagaatcacttgaacccaggaagcagaggttgcagtgagctgagatcgcaccactgcactccatcctgggtgatggagttagactctgtctccaaaaaaagaaaaaaaaaagcgctcaaccagcgattcctttcctagatttatacccaaaagaattaaaaacagaactgagttgcttgtacacctatgttcataacagtgttatttacaaaaccaaacagtggaaacaacccagataccttttaacagatgaatggataaactgcattgtggatgcagcttgaatgtccctaatctgaaattcaaaatgctctgaaatctaaaactttttgtggtaccacacaaatccacaagtggaaaactccacacctgaccacacgtcaaaactttgttttatgcacaaaattatttaaaatattgtgtaaaattaccttcaaggttttgtatataaggtatatgtgaaatgtagatgcatttcctatttagacttcgagttccatcctcagcctcatacgtgtttgcaaatactctgaaatacttctggtcccaagcattttgggtaacgtacacccagccacttcacacagtggaatgttagtcagccttaaaaagaaatgaaattctgatacatatttcaacatgataaaccttgaaaatatgctaagtgaaatagtcacaaaatactgcatgattctgcttatatgaagtacctaaaataggtgaactcagagacagaagtataaagataactagaggttggggggaaggtgggaatgagttactgtttaatgggtacagaatttttcagtttctgatgataaaattgctctggcaatagatcctggtaatggttgcataacatcataagaatacttaatgctactgaatagtacacttgaaaatggttgaagtgttattttttattcttttttttttaaattttttgcgacggaatcttgctctgtcacccaggctggaatgcagtagcacgatctcggctcactacaacctccacctcctgtgttcaagtgattcttctgcctcagccctccagagtagctgggactacaggtgtgcaccaccatgcctggctaatttttgtatttttaatagagatggggtttcaccatgttggccaggctggtcttgaacttctgacttcgtgatatgcctgtctgctgggattacagacatgagccaccgtgcccagcctgaagtgttaaattttatgttgtgtatgttttaccacaataaatccctttaagttttgtttgtttgtttttaatctactacagccttgttagatgacttggataaagaactaaacaactacattatgcgatgtagagaatggtatggctggcatttccctgaattaggaaaaattatttcagataatttaacatactgcaagtgtttacagaaagttggtgagtaatttgttcatcctttaaggcattgaaagtaaatgaatttgattgcatcctaaaacatgacgtatagcattttgttaagcaagattcccagggtttttgcaatttctgtgtatttgggaagtgtagcagtttagtgtcttaaatttaagaaacaaaatgaattttaacttagattttgatggcctataacatgatattagtacctaatgctaaatagcagtattgccgtctgtactgttaatatacagaggaacttgattgttgattgtcgttaacgtacagaggaacttgattgattgatggtttacttgccttacgaattactggccccagcttcagtataaaattgtctgtgacattattattagtcctgtcttttttaaatttttgccacttatattctgtaataagtgttgtggcatattttgtcctctttttactctgattattttttggaagaaggtggtggggagacatttaatgtctaaacttaaacccttaaatgaggaaaactgttatactaggtcaaacttcttcattttttttgttttgtttaggcatccttttcattggctttctactttttcttttgactatttgctggattttatataatttgttgaagagtgattctccctcatcctctgcaaacattccataggcgataggaagaactatgcctctgccaagctttctgagttgctgccagaagaagttgaagcagaagtgaaagcagctgcagagatatcaatgggaacagaggtttcagaagaagatatttgcaatattctgcatctttgcacccaggtaaattttactcctggagaatctagttgtggtgttaccagctctatagtactaatttttctgatggcaatgatgatttttacacttattgttgttcacctgataacataaatatgagggtgttcagtcactacctcatctgatgccatcatgatttgtatacttaaaagggggaaatacatattaaaaggaagtaatttacaatcatcgtctgaataatgaattaaccaaaaatcaattaagatggcagagaaggccaggcgcgttggctcacgcctgtaatccccgcactttggaaggccgagtcagggattgacctgaggtcaggagttcgagaccagcctgaccaatatgatgaaacccccatctctactaaaaatgcaaaaattagctgcgcgtggtggcgtacacctgtaatcccagctactcgggaggctgagacaggagaatcgcttgaaccagggagggggaggttgcagtgagccgagatggcaccattgcatccagcctgggcaacaagagcaaaactccatctcaaaaaaaaaaaaaaaaaaaaaaaggatggcagacaattatggattgagccttttaattctgagtcttatgtctatatcttgtgatttttttttctttcagatttgaaggtagccatataggaattaaaaagagcatgatacaaatgtttattgctcagaatcttttttttttttttttttttttttttttttttttttgagacagagtctcaccctgtagcccaggctggagtgcagtggcacgttctcaggctcactgctacctctgcctcccaggtcccagttcaagcggttctcctgcctcagcctcccgagtagctgggattacaagcacgtgccaccatgcccagctaatttttgtatttttcatagagacggggtttcaccatgttggccaggatggtcttgaactcctgacctcatgatccacctgcctcgacctcccaaagtgctggaattacaggtgtgagtcactgtgcctgggctgcttagaatcttttaaaaatacagttacgctgactaagattttcaggcagtggaccaagtagtttacatacattatataacgaagtcctcattacagccatcttatagaaaactgatgttaggatcatgaggtcaagagatagagaccatactggccaacatggtgaaaccctgtctctactaaaaatacaaaaaattagctgggcgtggtggcgggcccctgtagtcccagctactccagaggctgaggcaggagaatcacttgagcccgggaggcggagattgctgtgagctgagattgcgccactgcgctccagcctgggaaaaaaaaaaaagaaaactgatgttaggcataggtgatgtacccagtacccagggttgtgtagctgctctttcataattgagggctccagtgttttagacaggaatttttactgtttttactcatatgatatttgtgacttaactttattccttatactaggtgattgaaatctctgaatatcgaacccagctctatgaatatctacaaaatcgaatgatggccattgcacccaatgttacagtcatggttggggaattagttggagcacggcttattgctcatgcaggtgatggttttaatgtaatttgtaaatatgagtgtttgaagtattttctggttaggattttgtttacatctttaaactacagctgttaaagaaattttagctgataacacaaaagtagatgatatgtgggagatcactaagggccaagtgttcaatgatgatttctatttgtttgcctgatttccttttggataatgaaggcatctttagtcactacctcttctgagacacttgtggtccattgttagaagtttgttagggttaattagaacaatcggatgaatgcaggaggataaaacagttaacattttcataataaaaactcactagacctagatttgaatacagttttaagaaatcactgtagagaaagaaaaaaaaaagaaatcactgtagaggatttgtgcccttgattgattaccttagtttcactattgagtgtgaggatgtaatatatttgactttcaaaaatattttcaacaactgatttataataaaactttgtatatgtgtatggcagtattataaggatgatatgctataattaaaatgctatgtaattgaatacctacaaatacaatgaagtactgattcatcatttttatgttacttggagacattgttataattcatcaaaaaagattatatcatctgcatcagagtgtttaaaatggcataactcctttttttttgtttgagacagagtttcactctgttgcactggctggagtgcagtggctcactgcaacctctgcctcccaggttcaagcaattctcctgcctcaggctcccaagttgctgggattacaggcatgtgctgccaccatgcctggctaatttttatatttttagttgagacagggtttttgccatgttggccaggctggtctcaaactcctgacctcaggtgatctgcgcacctcagcctcccaaagtgttgggattacaggcgtgagccactgcgcccggcctggcgtaactcctttagctgcatcattaatcaaaggtttcattcaaatgccctcagctataagatcagatgatttcattgtctctacccattttcataggtatagctaaacttgtagcagtaagcaatggcaggggttaatagaagtatgtatttgttggccaggcgtggtggctcacgcctgtaatcccagcactttgagaagctgaggtgggtgggtcacctgaggtcaggagttcgagaccagcctggccaacatggtaaataaaaccccatctctattaacaacacaaaaattacccaaccttggtggcatgagcctgtaatcccagctactcgggatgctgaggcaggagaattgcttgaacccgggaggtggaggttgcagtgagccaagattgtgacattgcacacagcagtggtgacattgcttgcctgggtgacaagagtgaaactccatctcaaaaaaaaaaaaaaaaaaagaactatgtatttgttacacttttaaaactatgtctagtgcttaagttcatagtattaatagagtctgttttctgacaggaaatattctatacagcatatccaactaagcagcatgttgataacaatagtccccagctatttatggagatgtattctaagctcccccctccaagaatgtttgaaacagaggatagtactgaatcctatactgtatatgctgttttttcctaaacatacatatctataataaagcttagcttataaattaggtacagtaggatatcaacaacagtcataatataacagttataacactatgccagcagggccgggtgtggtggcttacgcctgtaatcccagcactttgggaagctgaggagggtggatcacgaggtcaggagttcaagatcagcctggccaagatggtgaaaccccatctctactaaaaatacaaaaaaaaattagctgggtgtagtggtgggtgcctgtaatcccagctactcggaggctgaggcagagaattgcttaaacccgggaggcggaggatgcagtgagccaagatcgcgccactgcactccagcctgcgcaacagagcgaaactctatctcaaaaaaaaaaaaaaatgcaagcataactatttttgtgcattggttacttgaatataagcactgcagtactgcacaacggagagggctacgaaagtgactaatgggtagatagagatgattcatgtcctggggggagctgagtgggatagcaagagatttaaaacttaggaactatttatttctggaatttcctttttaatattttcagactgcagttaaccacaggtaatttaccacacaaagtgaaagcacaggtaggggactattaatagatacttgtaggaatatctcttcctaataaatgtgtttatttgtaggctttttcatatctaaagcaatagaatatttgatacaatctcagaaagcagggaccagattagtgttcgtgtgtgtgacatttatgtcactcctgtagtatactaatggaatttagaatagtactgccatctctcaggtgaatagaaacattgaacttaataagcttagccttcagtttgtcctaggcattcattgcaaacctgcttgtgctaatgaaggaattacaaatgaaacatcaagatttttagggaattctggattatagaattctatattatatgtgatttttatttattatggtggctgtaataattctataggtcttttgtttcagtacgtggaacattcatatatttggaggtgcattctttgtaacttttttcttttgtaggttctcttttaaatttggccaagcatgcagcttctaccgttcagattcttggagctgaaaaggcacttttcagagccctcaaatctagacgggatacccctaagtatggtctcatttatcatgcttcactcgtgggccagacaagtcccaaacacaaaggaaaggtgtgttatagggttttgctttgtttttgaggttagactttttcattttttacaacccatttttcttctactctgtagtacacattaaatcttctattgtctctttcttgttaaatagggaatggtgagttatttaaataaaaagtgctttgtgtacactgaaggataaggttagaagaaactgttattggttggattaaagccagtttcttccattgtgttagtatttttttcccccctagaatctccctgtggttggcacactgaaaatactatctctggcagcaaaaaaaaaatctaacatttacgaatcataaaaaatagcatatgcattatgctaaaacactttgagagaagtcactaaactttttttttttgagatggagtcccgctctgtcgccaggctagagtgcagtggcttgatctcggctcactgcaacctccagctccctggttcaaacgattctcctgcctccctgcctcagccttctgagtagctgggattacatgcacgtgccaccacgcccggctaatttttgtattttaagtaaagaccagtttcaccatgttggccaggctggtctcaaactcctgacctcctgatccacccacctcggcttcccagagtgctgggattacaggtgtgagcacctgtgcctgtcctaaatcttcagtagccttatgagatgtaggtatctctatcttgcagatgatgaaactgaggcttagacaagttaagtactttcaatgtttttgaaagatgtgtcgtttaacagatctaaactgaaaattgataaaatttagagcagagtggtggaggaaaataaagcgttcaataaaataaaatgttaattagattgaaaaagaacccacgcttttttttgtttgtttgtttgtttgtttgtttgttttttgagatggagtctcactctgtcgcccagactggagtgcagtggtgccatcccggctcactgcaagctctgcctcccaggttcacgccattctcctgcctcagcctccagtgtagctgggactacaggcgcccggcaccacacctggctaattttttgtatttttagtagagacagggtttcaccgtgttagccaggatggtctcgatctcctgacctcgtgatccactcgcctcggcctcccaaagtgctgggattacaggcgtgagccaccgcgctcggccagaacccgcacatatttaagattgttacgaggaaaaagatgcacttcttttcagtgacctcatagcacagaactaatgtcactgagtagaaactaaagtttaaaaatattttttaaaaaaacctagtttgagctaatatttgacatgaattgctgtaaaatcttttcagccacagaagtgttggtggtgatatatggccattagattgtggcaaaggttgaaatacgatggatgatttgaattgtatgattcataatagttttataactcctgattttaaaacatccaagttattgaggattttacatctgaacatggaatatagttcttcatgtttttctattagatttctcgaatgctggcagccaaaaccgttttggctatccgttatgatgcttttggtgaggattcaagttctgcaatgggagttgagaacagagccaaattagaggccaggttgagaactttggaagacagaggggtaagaactacatcatgcctattccagaagtattacttgtcaaaagttaataaactgagtaaatttattaacttcatctgctaaacagttttatgatacttattagtatgtctaaagtattctttttgtgcctactgttaacaattgctattatttaccaagaattgatgtatccaactgcatttgccattaggatatgctattcaaaataacaaaacaaaaaatagcagaaattgctgtttgctggcccactgattcactagactgtatagtgtattataaagagattatgacttagaagtgtatttgtaatttttcgttttcttcttagataagaaaaataagtggaacaggaaaagcattagcaaaaacagaaaaatatgaacacaaaaggtgagtacatttaagtgaggatggggtgaatagtttttttaaatgttaattattgacagtaattttttattgtaaacttcaccttgatgtgcccatagttttttcaaatttatttatttgaccaaaattgtgtatgtttattgtgtgtatgttgttttggaaaatgtgcacattgaggaatgattaagtcaagctcattaacatgcattgtcttatgtactttttttgtggtgaggacaccttaaaatctacttagcaattttcaagaatataatacattgttagctgtagttaaccatgttgtgcacccctaatttttttccatgccatttagttttccgcattaacttctactagttttcattcatatacatatttaatttattcatttccagatattgatagtaaatttttttaatctaaagttcctctataatatgttctttatcaaaaagttcactcagccgggcacagtggctcatgcctgtaatcccagcactttgggaggctgaggcaggcagatcacctgaggtcaggagttcaacacaggcctggccaacatggtgaaaccccatctctactaaaaatacaaaaaattaactgggtgtggtggcgggcacctggctgaggcaggagaattgcttgaaacccgggaggcggagggtgcagtgagctgagatcgcgcccctgcactccagcctgggcaacaagagcaaaactccgtctcaaaaaaagttcattcagagttaatccctacagaaacctattttgtaaaaagtataaagacagaaaacaagtctaaagatggctgaggcatgacaaagcattcaaacttaactatcagattaacaaaagatttgtatgtggaggggtatttgggttattatttgaggcaatgctcaatgctggtgaggttgtgatgatgcaggtagaatgtggcacagctgttctaggaagccatttcacagtatgtatcaagattcttcaaaatgttcctagtcattaacccaataaattatactttcaggagtcataatccttcaagattttttttttttttttttttttttttttgagacagtctgtctctgttgccaggctggagtgcagtggcacgattgcggctcactgcaacctctgactccccggttcaagttatgctcctgcctcagcctcccgagtagctaggattacaggcatacaccaccacatccagctaatttttgtatttttagtagagtcggggtttcatcatgttggccaggatggtcttgatctcctgacctcgtgatccgcccgccttggcctcccaaagtgctgggattacaggcgtgagccacagcacccggcctccttcaagaattttaatagtaaaatcttataagtggatgaggagagtaattaatatatagaacattaccaattataaatacatatttaagtataatttagtgttttctggaaagaaatcaaatgtgtttctgtgggcattcacattttcttttttgtgaattttccaagctttctacaatagccatacattctgcaatatttatagtctataacttattatctctagttgacaaacatggttctttgtttcttaaattataaatgtctttaacctaaaaaaattaaatagtcattcagcttacaggtctgcttaaaaaacagaacattttttagcttgttttgaaccaatttttttaatgttcctgtgcaattagtactttttactttaaacatatgcacttaaagcatccattcacattttaggcactcatttcagtattttctttctgcttacattagaacaaaagcaaatgttgggttctatggaatcttttccatgtgcatgtatttgtatcctttcttgttcttgtgatcttgtgatgaagacttctatactaagcttggtttagattttttgttctgcttttttttttttttttttcccccattgagcagtgttctgaaagttggatggttcagttttcactttctagttaggtgtgaagacgttttctcctttcatttcccccatgctgattgagtgttttcctgtaccatagtaactacattgattactaaatcagaattcatttagctcaccacatctcttgaatgtgattgacctacttgaaaaatattaatacctttaacttttggaaactattagtcttcataaactaccccaaagccactaaaatgaaacaacattgtgtgcttatgtaagtattatctaatggcattttctttatctcttgagaattatttcaattccagatacttgttagagattttctaaaactttttgggtctttcagtgaagtgaagacttacgatccttctggtgactccacacttccaacctgttctaaaaaacgcaaaatagaacaggtagataaagaggatgaaattactgaaaagaaagccaaaaaagccaagattaaagttaaaggttagtttgaattttttttttaacacaacttatactcacttctttagaactgtggattttgtgagtcttaaaagtacatgccatcccactttattataaaactgctcattgaacgctaatggtgttttaataatgccattatgttctctgggaatatgatattgttaaatttatcagactgcacagaggaaatgtgagaagtttagtcaaattaggtattttactaagagttccaaaacttcatttctcctacatgaactatttggagaattaagagaaaaaaggaacgtgttttctaaattggttgttgaaaattttttgttttatagttaagaatgaatacagaattgatggaacagtgattttcttcattgtttctcttacacggagcggactggaaggaatacatactggtagcctgccgtcatagttacaatatctaacaggtgctcaccagttaactaggctgtcttgtgaagttgataagcaggcgccccattattagttacacctgggtttattgaacacctactagcaagtctagcagaagagtaaagcattaacacaatgattgctttaacttggtttctaagtagcttagtggtcaaaagtatatgatctacaaatgtggatagtatacttgatagagaaaacaaacaatttatttaacttttatgcttctttttattgaaaagtaaggagatccctaaacccactagtagcatttgaggcaccaaactctgtcctttgtatcctcaattgtgtatccaataagcttttccaatttatttgtcaatttttcatcccacaatttcccccctctttttttacccccaagacagaatcttgctctgtcacccatgctggagtgcagtggcatgatcttggctcactgcaacctccacctcccaggttcaagcaattttcctgcctcagcctcttgagtagctgtgattacaggcacgcaccaccacgcccagctaatttttttatttttagtagagacagggtttcaccatgttggccagcctggtctcaaactcctgaccttgtgatccacccactccggcctcccaaactgctgggattacaggcatgagccaccacgcccagtcctctcccattttctatatgtgacaattccagttgctttggccatcaaccttgacttttttctcataactcaatctagtctgacagcaaatcctctcagttccacttgaaagtatgtagtagccacagtggaaccaccactagctttttaaatctaaatttgttccagccatactggcctgcttgctatttcctgaacctactatccatccacttatcccatctgccctccaaaacgccttacgacttaagcatctgctctactctacctggactattttccctcaagatacatgtatcattcattcactccctcacctcttctaggtgtttgccgaccattctgcctaaaatggccatatatactgcccttttccaacattccccttcctgctttatttttattcttaccactttaatatctattatgtaatgtatcatttatgtctccactctgccactaaaataaaaaagattcatagggaaacgaatatttttgcctcttgtgccttgctcgaattgtttagtacagagtctgacatgaatattatttggttgctgaattgctgaatttctctctcttttctttttcttttttttttcttttttttttttttttttttttgagacagagtctccctctgtcgcccaggctgaagtgcagtggcgtgatcttggctgactgcagcctccgcctcctgggttcaagcaattctcgtgcttcagcctcctgaataactgggattacaggcatgcaccaccatgcctagctaacttttttgtatttttattagatacaggatttcaccatgttggccaggctggtcttgatatcctgacctcaagtgatcctcccgcctcagcctcccaaagtgctgagattacaggcgtgagccactgcacccagctggtcactgaatgtctaatgatagctatgtgttgagtccttattgtaatgtgtgctaagcattatacttagtgctttctatgcatcatctttttaaatcagtaacagtccagtaagataagacattcttaagttttatagatagggagcttcaccaagggtaaatacaatttttcagggttgcagcaggtagattaaacccaggccgtctgacttcagagtgcaagctcttaaccatttctaatataattgactttcttcccaataatgattggagatcagatgacctttgttttaatcctgatttttatacatgacttcatgatcgtgagaagattgctctgagctctatctatatcattcgttaaagttagtggtaggccttggagaaccttcccaattataaaataaacaaaacaaacattgggtagttgatgagaatgacagaaaaaaactaggactcaaacgtttttggaaggaatgagatctgatacagtgttaatttgttgtgcctttacacttaccctattcagttgaagaagaggaagaagaaaaagtggcagaagaagaagaaacatctgtgaagaagaagaagaaaaggggtaaaaagaaacacattaaggaagaaccactttctgaggaagaaccatgtaccagcacagcaattgctgtatgtttgtttttaattatcggttttcacttggaggggccagttctctatatttcaatctattttctatatcagaaatgagcaggcattttaaaaaatggttttcattgatggagaggtaaaagtgaaatggctttgttgtatttatattataaaaggccatttcccaaatctagaatttattactaaaaatcaagtttgcattgaggggaggagtatgatttgctcaagcttactttttttataggtggggtttttatattttcaatgtgattactcacccatacaatttcagctctttcaaagcattcttgttggctattttcagagtccagagaaaaagaagaaaaagaaaaaaaagagagagaacgaggattaacagaaaggaattacgattatatcacccggacacacatcatgcttaagattcaactgggagcataccagggatgctctctaacgtaatcaagggaaggttcagtaagacaaagtgatttatcatctataacttcaaacctatttgtcttgacatcaactctgttaaccttatgtcatcatttcttagagtctttgatatacaaataaaattttctttgtattttaa

SEQ ID NO: 1224 - DNA, 82756 bp, Homo sapiens
ggggctgggaggcgggcgcacatcgatggcgtcaccttctggcgccgccggttggtttccctggcaactggagcaatcagagcaccgcagccagggagatgctggcgagacgacagcgagatcctctccaggccctgcggcgccgcaatcaggagctgaagcaacaggtatggtcaggctgtgcagagggccctggggcgggcgacaggcggacgcagctgcgcgcactgcgccttcccaccgtgaccccacctaatcctgggagcttgcccccaacctacttaccttcccaggttgtaacgcccccttaccccataacattccagcacccaaccccgattcaaacccctcctgatcccaactcaacccccagccaaaggcgaaacctcccaaaattcgtgaccatcaactaagcgccccctcctccgaccctcactcccacctaacgtctcaacctcctaccctaacaactcactaacccaccttatctcccaatctaaacttagtggtgtaaccatttccaacccaactctgagcctagctcctctcctccactttccaagcccatttcctttcagccttcctcaagtggagattattattgcctccgtgaactcaagcgaaataggtgtcaagaaatagtcttaatatgcaagaacattaagatctgataaatgagcaaaggaggtgaacgagagaggaaatacaagtaactcataaacatacgaggaatgttaacttcaaagatactcaagtaattgcaaagcacataaggtatcacaaaaatgttaaaaatcacaacactctgtcttgaggaaggtgtgatgaagcaggcacattcactgctcccgtgtataaggtgcttgtacagcatttcaggaaagcagcttgacaaggtgtaacatatgtgtatgcacctaggctcaaaaattacatttccagggatctgctatgtgtaataattagaaagtaggacagagattgatgtataaaagtattcatcacattgttacttatataatatacacagaacagcatagaagggaacaggctaatatggtatttctgtgtgacaggatgctgatgattattatgattttctttattctttttcatatttataaaaatttttaggccaggtgtggtggctcatgctagtagtaccagctacttgggaggctgagacaggaggatcacctgagcccaggagttcgagactagcctgggcaacataacaagacttggtctcaaaaaaaaaaaaactttttaaaaatacactgagttcttattaaaaataagaaaaaagtaaatagcaaccagtgggtttattttctgacattttaatttcactttaatttttttcatgtgatctattaccaagtatttttccactgagtaaaattattttataatctgaggccggtaagagattcactgatgctcatattttatccatttttgttctcttgtttaaagtaaaaaggatttggaaggtaaatatttaggtgactgtgtattggaatcacagtggtgcaacaaaagctaaatactcttctggtagaaataaaaaataaaacttgatggggcattgacttatgctgaacttcggtggatcttaatatggttctgtgtcttattttaaaatttcaacttttattttagattcagggggtacatgtgcaggtctgtcacatgggaacactgtgttatgctgaggtttggggtacagatgagcctatcacacaagcagtgagcacagtacccaataggcagtctttcagtcttcattcctcttccctcccccaccccactccagcagtcaccagtgtccattgctcccatctttatgtccatgtgtactcaacgagtgagaacatatggtatttggttttctgttcctatgctaattcacttaggacaatggcctccagctccatccatgttgctgcaaaggacatgatttcattcttttttatggttgcatattttttcatggtgtatatgtaccacattttctttatccagtccaccattggtgggcatctatgttgattccatgtctttgctattgtgaatagtgctgtagggaacatacacatgcatgtgacattttggtagaatcatttcttttttgggggtatatacacggaaatgggatttctgggtcaaatgatagttctgttttacgttgtttgggaaatctccaaactgctttccacagtggctgaactaattttcatgcccaccaacagtgtatatgtgtactcttttcttgtcagcctcaccagaatctgtcatttcttgattttttaataatagccattttgaccagtgtgagatggtacctcattgtagttttaatttgcatttctctgatgattagtcatgatgagttaattttaaatttagtgggacattaggagaaccaggaaaagttttagaaggaaactataaaaatgattattaaaacaaactattagaaagattattctccctggagaaatattggctctggagccttttgataccttgactatctggaaagtttgttttgatagtattagctaattcttccctgtcttcacagaggacacctgaagctgaatatggaacagattttctattcggtgtctgtaggacaagtaatcaacagcccctctgagtcaggcctgtgatgactggctctatcactaggtgtgtgaattttgtaaataacactcagatggatgccaaattgcaagagtagagaagaaactaatggaattttctcttttttcatccactttatcttctctacgtaatctatagaaaacagaccaaagaagtatgtgcctttttggagagtatattgacaaagttacatatagtgttagtaaacaaactactaagtcaagagaaacaaagtcatgatacattcaatacaatggataccactcagtaatgagaaggaatgaactaatggtacacacaacaatatggaagtatctcaaaaacatgctttgtggaaaggttacacaagagtgcttactgtatgagtccatttatataaaatttcaagaacaggcaaaactaatttatgttggaaaaatatcaaaacaggtttgtctgtggaggaataaggaggggatttactggcaagggcatgagggaacttactagggtgatggtagttttctacatcttgataagaattttggttacacagatgtatgcatttgtcgaaactcagcaaatgtatgcctcgtatttgtgcatttcactatatacatattttacatcaactattgaactttagttagtgacatccatagtccattatttagggagaaatgtattgataactgcaacttactttgaaaggcataaggtgggttgacggatagatcaaataagtatagtataatgttaatgttttttctaggtagcgggtatatgggttttcactgtaaaatttttaaaactttgttgtatgtttaaaagtgttcattataaaatattggataaaaaaagaagttttctttcctaaggcgatatggtatttaataatgtgatattttaaatggtctccataggttgatagtttgctttctgagagccaactgaaagaagctctagaacccaataaaagacaacatatttatcaaaggtaaagtatgctaaattatataagctttacaggaaccgcacttacatttcaatgcatagtatttaaggcatagagattggtcctttggaatcaaatggaagaatcacatagtgttgtaagttgaatgtagaagaaaccaacctaaacctgatggttgcggacttgctgttgtgacagcaactataaaaactgcttaatgtaaacataggtgacatgggcaggattaccctaaatccttagcctatgtagcccagatcctgtgacctggtcagaaacctctgtctataagcaattagtacttcattgggatgtcaactttaactcccatgagaagacaacactgttttctaggtgggtgttttttgttttgtatttgtttttacttaaaaaaaaatccttgggagagtttaaatagacgtgatgaactacatcaaatttagactattaattcataacatttgtattaagtttaggacatcattaagataatctttgtttttgagatatttaaggattttattacattccaaagaacatgagattcattctattaatttaagtgaattgtaattgtttggagaagttttacttaagtcaggcattcagagtgcttaaaggcaaaacaaatgaattttgaaatgtcaaatgaatttaatttataatagtaggattgattaagggatttagttcaagctgaattaacagtaatgaaagaaaagcaaaggttattgttcttgctttactagatttaaaaacagagtaagatttatagactgaatttgaaggccaagggaaaactacgtttttaaattttatgttagtaaactaaaaatcataattattattattttattttttgagactaaatctcactctgtcacccaggctggagtgcagtggcgcaatctcggctcattgcaacctgcacctcccaggttcaagcgattcttctgcctcaggctcttgagtagttgggattacagtcgtgccccaccacacctggctggattttgtattttgagtagagatgggtttcatcacgttggccaggctggtttcgaactcctgacctcaagggatcccccagccttggcctcccaaagtgctgggattataggtgtgagccactgtgcccagcctaataattgttatgttttattttttttgagatagagtctctctctgtcgcccaggctggagtgcagtggcatgatctcggctcactgcaagctccacctcccaggttcaagcgattctcctgcctcagcctcccgagtagctgggattacaggtgcccgccaccatgcctggctaattttttgtatttttagtagagatggggtttcaccgtgctagccaggatggtctcaatctcctgacctcatgccccctgctttggcctcccaaagtgctgggattataggcgtgagccaccgcgcccggcccctaataattatttttaagcccaagtaaccatagtcttctctgtgcatgaaaagaagattgttactgtcatttaaaaactcactttgacatttgcatatctgaaaatgtcatttaggtatcatttttatctgctcagtgctctgagtcttttcagtttgaaaactcatgtctcatgagctctgggagattttattttacaaaaagattatttcgttaattccatttgtctgtttcttcctgaaacacctttgagtcaggtattggatatcctggactgatcctctatatcccataacttcctgttaatagtttctgtttctttgtttgtatgggagatgtttttttggggggatgtggggggtctcactctgtcgttcaggctgtaatgaagtggcacaatcatggctcactgcaccttctgcctcccaggctcaagggatgcccccctcccccgccacgagctaccatgctagcaattctcttgactttaacacttttctttattacctatttcaacagccatattgttttatttcagcagtcatattggtttttttttttttaagatggagtctcactctgtcatgatcttggctcactgcaacctctgcctcctgggttcaagcgattctcctgccttagccttctgagtagctgggattacaggctcacgccatcacactcggctaattttttgtatttttagtagagacggagtttcaccatgttggccaggctgctctcaaactcccgacttcaggtgatccacccatcatggcctcccaaagtgctgggattacgtgagccaccgtgcctggccatcatcagtcatgttgttaatttacaagtgttttctcttgttctcgaattgttcttttttcatagcatcatgttcctgttttcatattgattgccttcttactacttccatgactaggaggctttttttttctccttaagttctcttctgttctctgaattgtctttgctttctctgggctcagattccttttaattagttaattaattaatttatatttggttattcttaaattttatcttcacgttgccggttttctttattaggtctggcttatctatttttattgaacaatgagggactaggttgattattccagagagctctcatgggcttttctactgttagatagagaggggtccttcctgctagtaccatcccctgaataagaatgaaattttgtatgttgatagggcttatcagaggctcggaagtagcttttagtctgaggatcccccagtgccagaatagggccggctctaaccctggtgtatgggaaacttctttagcagtcatgattctcttcaggtcgtttgttaattgtttttgtttgtttttttgtttttagggaagaatcccctggtaaggagggagagcagagaggggaaaagggagctaactggctcaggttttctgtaaatagacttttaaaagaaagaaccccaactaaatctaaacgtaatcagtatcattaatcttcccttgactaatataaagaccttagattgctttaacattgatttccctcctcaaagcttagatgtatgcatatgatttaatttacacaatataacacaataatattagataatttataaagtaaaccccagccactgtgcatgtcttttcatcagcagaatttcataatgtgtccctctatgatttagtttagttaacctttggtcctttatgtctgctgactcaagtcctagagttttcggcctggcagattatctccctcttatgcttgtgttgcgtcttccaccctttataggagaacatgcttccagcctttttccatggagcagaaatttgttgaaatctcttgctggctagttgtccttctttccttctttgcagtgttcagagtttgttaccttttcaaacgttttaatcattttttgtggggtttcaggagccagtgaagatgaatgtgtgcttagtttttatcctgaaccaggagtcttaaaatatcaactgtttgaggattttaataattacatagttataaaggaggtaattgtaataagtaatttattttcttggtacattatattaaaatagttttccactctgggctttaagcgaaatttctgagtctaagtttcagtagagatttttttggtcaagtaacatgacacctgccaaaataagcggctttactgtcagtctcatttgacaaaagcctgcagctaggttctctcagggtggattcatggcttgtgatatcctcaaagaccagcctttgatgtcattccactctgccatcctttgcttgttggtgatgtctctcctcatggttacaaagtccataccctcagtatctaagagcagatgtaggagagattcttttcatgcctggtaagggaggataaaatgggaggcaatcccaatatacgtgttttatgttacactggcagccgtgggccccctgctcaccctgcctgcagtggaggctgagaacataggtgccagtgggaagctgactgccagcaaagaggaagggtgggaaaggggcttttggggaggttgctagtagggtcagccccagtttgatgtttccccttctcttttgctacccttttgacaaaggacttttgttccctttaaaacgttttttatttattactgttttttatttttttctttaagttcagggatacatgtatggcattgtgcaggtttgttacataggtaaacgtgtgccatactggtttactggacagatcatcccatcacctaggtattaagccctgcatccattaattattcttcctgatgctctccctcctctaatacctccttcctacaggccccagtgtatgttgttaccctccttgtgtccatgtgttctcatcattcagctcccacttataagtgagaacatgcggagtttggttttctgttcctgcattagtttgctgaggataatgacttccaactgtaaccatgtccctccaaaggacatgattttgttcctttttatggctgcacagtattctatgagaacatgcagtgtttggttttctgtccttgtgataatttgctcagtatgatggtttccagcttcatccatgtcccttcaaaggacatgaactcatcattttttatggctgcatagtattccatggtgtatatgtgccacattttcttaatccagtctatcattgttggacatttgggttggttccaagtctttgctattgtgaatagtgccacaataaacatatgtgtgcatgggtctttatagcagcatgatttataatcctttgggtatatacccagtaatgggacagttgggtcaaatggtatttctagttctagattcctgaggaatcgccacactgacttccacaatggttgaactagtttacagtcccaccaacagtgtaaaagtttcctatttctccacatcctctccagcacttgttgtttcctgactttttaatgatcgccattctaactggtgtgagatggtatctcattgtggttttgatttgcatttccctgatggccagtgatgatgagcattttttcatgtgttttttggctgcataaatgtcttcttttgagaagtgtctgttcatatcctttgcccactttttgatggcgtcgtttgtttttttcttgtaaatttgtttgagttcattgtagattctgtatattagccctttgtcagatgagtagattgcaacaattttctcccattctgtaggttgcctgttcactctgatggtagtttcttttgctgtgcagaagctctttagtttaattagatcccatttgtcaattttggcttttgttgccattgcttttggtgttttagacatgacgtccttgcccatgcctatgtcctgaatggtaatgcctaggttttcttctagggtttttatggttttaggtccaacatttaagtctttaatccatcttgaattaatttttgtataaggtgtaaggaaggcatccagtttcaactttctacatatggctagccggttttcccagcaccatttattaaatagggaatcatttccccatttcttgtttttgtcaggtttgtcaaagatcagatagttgcagatatatggcattatttctgagggctctgttctattccataggtctatatctctgttttggtaccagtaccatgctgttttggttactgtagccttgtagtacagtttgaagttaggtagcgtgatgcctccagctttgttcttttggcttaggattgacttggtaatgtgggctcttttttggttccatatgaacttaaagtagttttttccaattctgtaaagaaagtcattggtagcttgatggggatggcattgaatctataaattaccttgggcagtatggtcattttcacgatattgatacttcctacccatgagcatggaatgttcttccatttgtttgtatcctcttttatttcattgagcagtggtttgtagttctccttgaagaggaccttcacatcccttgtaagttggatttctaggtattttattctctttgtagcaattgtgaatgggagttcagtcatgatttggctctctgtctgttattggtatataagaatgcttgtgatttttgcacattgactttgtatcctgagactttgctgaagttgcctatcagcttaaggagattataggctgagacgatggggttttctagatatacaatcatgtcatctgcaaacagggacaatttgacttcctcttttcctaattgaataccctttatttccttctcctgcctgattgccctggccagaacttccaacactatgttgaataggagtggtgagagagggcatccctgtcttgtgccagttttcaaagggaatgcttccagtttttgcccattcagtatgatattggctgtgggtttgtcttagatagctgttattattttgagatacgtcccatcaatacctaatttcttgagagtttttagcataaagggttgttaaattttgtcaaaggccttttctgcatctattgagataatcatgtggtttttgtcgttggttctgtttatatgctggattacgtttattgacttgcgtatgttgaaccagccttgcatcccagggatgaagcccacttgatcatggtggataggctttttgatgtgctgctggatttggtttgccagtattttattgaggatttttgcatcgaggttcatcagggatactggtctaaaattctctttttttgttgtgtctctgccaggctttggtatcaggatgatgctggcatcataaaatgagttagggaggattccctctttttctattgattggaatagtttcagaaggaatggtaccagctcctccttgtacctctggtagaatttggctgtgaatccatctggtcctggactttttttggttggtaagctattaattattgcctcaatttcagagcctgttattggtctattcagagattcagcttcttcctggtttagtcttgggagggtgtatttgtcgaggaatttatccatttcttctagattttctagtttatttgcatagaggtgtttatagtattctctgatggtagttggtatttctgtgggatcggtggtgatatcccctttatcattttttattgcatctatttgattcttctctcttttcttctttattagtcttgctagcggtttatcaattttgttgatcttttcaaaaaaccagctcctggattcattaattttttgaagggtttttttgtctctatctccttcagttctgctctgatcttagttatttcttgccttctgctagcttttgaatgtgtttgctcttggttctccagttcttttaattgtgatattagggtgtcaattttatttctttcctgctttctcttgtgggcatttagtgctataaatttccctctacacacagctttaaatgtgtcccagagattctggtatgttgtggctttgttctcgttggtttcaaagaacatctttatttctgccttcatttcgttatgtatccagtagtcattccggagcaggttgttcagtttccatgtggtttagtggttttgagtgagtttcttaatcctcagttctagtttgattgcactttggtctgagagacagtttgttataatttctgttcttttacatttgctgaggagtgctttacttccaactatgtggtcaattttggaataggtgtggtgtggtgctgagaataatgtatattctgttgatttgggttggagagttctgtagatgtctattaggtccacttggtgcagagctgagttcaattcctggatatcctcattaactttctgtcccgttgatctgtctaatgttgacagtggggtgttaaagtctcccattattattatgtgggagtctaagtctctttctaggtctctaaggacttgctttatgaatctgggtgctcctgtattgggtgcatatatatttaggatagttacctcttcttgttgaattgatccctttaccattatgtaatggccttctttgtctcttttgatctttgttggtttaaagtctgttttatcagagactaggattgcaacccctgcctttttttgttttccatttgcttggtagatcttcctccatccctttattttgagcctatgtgtgtctctgtacatgagatgggtttcctgaatacaacacactgatgggccttgactctttatccaattttccaatctgtgtcttttaattggagcatttagcccatttacatttaaggttaatattgtcatgtgtgaatttgatcctgtcattatgatgttagctggttattttgctcattagttgatgcagtttcttcctagcctcgatggtcttcacaatctggcatgtttttgcagtggctggtaccagttgttcctttccatgtttagtgcttccttcaggagctcttttagggcaggcctggtggtgacaaaatctctcagcatctgcttgtctgtaaaggattttatttctccttcacttatgaagcttagtttggctggatatgaaattcggggttgaaaattcttttctttaagaagttgaatattggccgccattctcttctggcttgtagagtttctgctgagaggtcagctgttagtctgatgggcttccctttgtgggtaacccgagctttctctctggctgcccttaacattttttccttcatttcaactttcgtgaatctgacaattatgtgtcttggagttgctcttctcgaggagtatctttgtggcgttttctgtatttcctgaatttgaatgttggcctgccttgctagattggggaagttctcctggataatatcttgcagagtgttttccaacttggttcaattctccccatcactttcaggtacaccaatcagatgtagatttgatcttttcacatagtcccatatttcttggaggctttgtttgtttctttttattcttttttctctaaacttctctgtttgctttatttcattcatttgatcttccatcactgataccctttcttccagttgatcgaatcagctactgaagcttgtgcattcgtcacgtagttcttgtgccatggttttcagctccatcaggtcctttaaggacttctctgcattggttattctagttagccattcgtctaatcttttttcaaggtttttaacttgttttccacgggttcgaacttcctcctttagctcggagaagtttgatcatctgaagccttcttctctcaactcatgaaagtcattctccgtccagctttgttctgttgctggtgaggagctgcaatcctttgaaggaggagaggcgctctgatttttagaattttcagtttttctgctctgttttttccccatctctgtggttttatctacctttggtctttgatgatggtgatgtacagatggggttttggtgtggatgtcctttctgtttgttagttttccttctaacagtcaggaccctcagctgcaggtctgttggagtttgccggaggtccactccagacgctgtttgcctgggtatcagcagcagaggctgcagaacagcgaatattggtgaacagcaaatgttgctgcctgatcattcctctggaagttttgtctcagaggagtacccggctgtatgaggtgtcagtctgcccctactggggggtgcctcccagttaggctacttgggggtcagggacccacttgaggaggcagtctgtccgttctcagatgtcaagctgcatgctgggagaaccactactgtcttccaagctgtcagacagggacatttaagtctgcagaggtttctgctgccttttgtttggctatgccctgtccccagaggtggactctaaagaggcaggcaggcctccttgagctgcggtgggctccacccagtttgagcttccaggctgctttgtttacctactcaagcctcggcaatggctaacaaacagcctcgctgctgccttgcagtttgatctcagactgctgtgctagcaattagcgaggctctctgggcgtaggaccctctgagccatgtgcgcgatgtaatctcctggtgtgccgtttgctaagactgtgggaaaagcgcagtattagggtgggggtgacccgattttccaggtgctgtctgtcatccctttccttggctaggaaagggaattcccttgtcccttgtgcttcccgggtgaggcaatgcctcgccctgcttcagctcatgctcggtgtgctgcacccactttcctgcacccactgtctgatagtccctagtgagatgaacccagtacctcagttggaaatgcagaaatcattcatcttctgcgtcactcactctgggagctgtagactggagttgttcgtatttggccatcttggaaccgccccaagtgttcctttttctctgcaattttgccaacatctgtttttttgactttttaataatcaccgttctgactggcatgagatggtacttcactgtgctgaatgtgtgtcttttgagaagtgtcacttcatgtccttttgctcactttttaatggggtttttttttcttataaatttgcttatttttagactctggatattagacattcatcagatggatagattgtaaacattttcccccattctgtaggttgtctgttcattctgatgatagtgagaggtgacagcatgctggcagtcctcacagccctcgctcactcttggcgcctcctctgcctgggctcccactttggcggcacttgaggagcccttcagcctgccgctgccctgtgggagcccctttctgggctggccaaggccggagccagctccctcagcttgcgaggaggtgtggagggagaggcgcgggtgggaaccgggcctgcacacggtgcttgtgggccagcgtgagttccgggtgggcgtgggctccgtggactctgcacttggagcggccagccagccagccccaccggccctgggcagtgaggggcttagcacctgggccagcagctgctgtgctcaatttctcacccggccttagctgccttcccgcggggcagggctcgggaccttcagcccgccatgcctgagcctccccgccctctgtgggctcctgtgcggcccgagcctccctgacaagtgccaccccctgctccacagtgcccagtcccatcgaccacccaagggctgaggagtgcgggcgcacggtgtgggactggcaggcagctccacctgcagccctggtgcgggatctgctgggtgaagccagctgggctcctgagtctggtggggatgtggagaacctttatgtctagctaagggattgtaaatacaccaatcagcactctgtatctagctcaaggtttgtaaacacaccaatcagccccctgtgtctagctcagtgtttgtgaatgcaccaattgacactctgtatctagctactctggtggagccttggagaacctttatgtctagctcagggattgtaaacacaccaatcggcactctgtatctagctcaaggtttgtaaacacaccaatcagcaccctgtgtctaactcagggtttgtgaatgcacccatcgacactctatatctaactactctggtggggacttggagaacctttgtgtggacactctttatctagctaatctagtggggacctggagaacctttgtgtctagctcagggattgtaaacgcaccagtcagcaacctgtcagaacagactactcggctctctgtaaaatggaccaatcagcaggatgtaggtggggccagataaaagaataaaagcaggctgccggagccagcaatggcaacccgcttgggtccccttccacactgtggaagctttgttctttcgctgtttgcaataaatcttgctactgctcactctttgggtccacactgcctttatgagctgtaacactcaccgcgaaggtctgcagcttcactcctgaagtcagcgagaccatgagcccactgggaggaatgaacaactccagacgtgccgccttaagagctgtaacactcaccgtgaaggtctgcagcttcactcctgagccagcgagaccacgaacccaccagaaggaagaaactccaaacacatccgaacgtcagaaggaacaaactctggacacgccgcctttaagaactataacactcactgcgagggtccacggcttcattcttgaagtcagtgagaccaagaacccaccaattctggacacaatagtttcttttgctgtgcaaaagttctttagtttgatgagatcctatttgtcaagttttgcttttgttgcaattgcttttggctttttgttgtcatgaaatatttgcctgtgcctatgtcctgaatgctattgcttggattttcttctagagtttttatagttttgggttttacatttaagtctttaatctatcttgaattaatttttgtatatggtgtatggaaggggttctagtttcaattttctgcgtatagctagccagctcttccagcatcatttattaaatagggggccctttccgcattgcttgtttttgtcaggtttgtcaaagatcagatggttgtaggtgtgcaagtcttatttctgagttctctattctgttccattggcctatgtgtctgttcttttaccagtaccatgctgttttagttactgtagccttgtaatatagtttgaagttaggtggtgtgatgcctccagctttgttctttttgcttatttgggctcttcttttgttccatataaattttaaaatagctttttctaattctgtgaagaatgtcaatggaagtttgatgggaatagcattgaatctatacattatttggggcagtatgtccattttcacgatatgattcttcctatccacaagcatggaatgtttctccatttttttgtgtcacctctgatttctggagcagtgtttgtagttatccttgagaaggtccctctcactttctttgttagctgtattcctaggtattttattctttttgtagcagttgtgaatgtgagttcaggatttagctctctgcctgcctgttgttggtatataggaatgctagcaatttttgcacattgattttgtatcctgagactttgctgaggttgcttatcagcttaagaagtttctgggccaagacaatgggttttctagatataggatcatgtcatctgcaaacagggataatttgagttcctctcttcctatttgaatactccttatttctttctcttgcctgacttcccaggccagaacttccaacactgcattgaataggagcaatgagggagggcatccttgtcttgtgcctgttttcaaagggaatgcttcaagcatttgcccattcagtatgatattggctgtcggtttgtcatatatggctctgattattttgaggtatattccttcaatatctagtttattgaaatttcttaacatgaaaagatgttgaattttattgaaagccttttctgcatttattgagatagtcatttttttttgtcttaagttctgtttatgtgatgaatcacatttattaatttgtatatgttgaaccaaactttcatcctggggatgaagccaacttgatcatggtagataagctttttgatgtgctgctggattcggtttgccagtattttgttgcggatttttgtatcgatgttcatgaaggatattggctttaagttttctgtttttgctgtatctctcccaggttttggtatcgggaggatgctggatacaatcagttagggaggagtccctccttttcagttgtttggaataatttcagtagaaatggttcccactcttctttttacctttggtagaattcagctgtgaattcatctggtcctgggagtgttttggttggtaagctatttggtaaagctgcctcaattttagaactcattattgatctgttcagggattcaatttcttcctggttcagtcttgggagggtgtatgtgtccaagaactcatccatttcttctagattttctagttcatgtgcatagaggtgtttatagtattctctgctgattgtttgtatttctgtggggtcagtggtgatatcccccttataatttctgattgtgtttatttgattcttctctcttttctttattagtctagctagtggtgtatctattttattaatttttttcaaaaaaccagctcctgaatttgttctttgtagggtttttcatgtctctatctccttcagttcagctctgatcttggttatttcttgtcttctgctagctttagggtttgtttgctcttggttctctagttcttttagttgagatgttaggttgttaacttgagatctttctagctttttgatgtgggcatttagtgatataaattttcctctgaacactgctttagctgcatttcagagattctgatacgttgtctctttgttctcattagtttcaaagaacttcttgatttctgctttaatttcattatttacctgagtcattcagggacaggtggttattttccttgtagttgtgtgattttgactggatttctttctttctttctttcttttttttaaatgtgtctatcagaatgactttatttcagtacactgagccccatcaggcagtgtggtttgtgcaaggctgtgcgagggacaggcttgggctaagagaagggaggtgagttgttaagtgcactgcagtctgtggggtgctacatcgctttcacacacacctgctcctttggcccatacctggcaggggcctttggtcataggacagcatgggggagactactgcatggagtctgggattggggtgggtcatggtgtcacaggtgagggtgccggtgaagacaggctggccccagctttgcaccacctgggctaaaggcctttggactactcctaggagtcaggcctggctccattagctcctggcactctggtctggccctctccctccttaaccaagcaggtccaaggtcaagagtggcccaagatcagccaagagggggccatcccacctctacagcttagttgcctggtcagctatagtggcaaaaggcaacatggttaattgcagctttctccagtcctaaggacactggctctccaacaccccttccttgtttaggggcctctgccaaagaaaaattctacctcctgtttcagaaaatctaaccagcaaccagcctgttgattctatggcagtgagcaagagaaagagggagaaagaggctggtgggagtgtctttgagtatagctaccaatttcaaatggtcctgcaacctgtggacactgtccgcttaccatcagcagggagaggcggggccctggaggctaggctaagcttaggtgctataaacattagtgtggcagggcaggaggcagtgagctccctctctccatccccttactgaacaaacacttcaataaataaaactgtttgaagatggcattgcaacaagaacggatggaaagcaaggacctggaatcagcaggcaccttaaactctcccaaggcccctggaaggggaatgggctgggaacattatctctgcagccattcagggggagtactactcctgccctcctccagtggctggtgtggtcctgttccctggtgaacatgagggcttcctgctccctcctgactttccagtctctgtattagctcttgggatgcttttctagcctcccaaaccaaaatggcaacaaaaccagacagaggtcaaccccagccccagtcctcagtgcccagtcagggggcattgatagcggagtgaccagcaaggggaggcagcagctgcctgggtcctcagggcaccctggtgggtgggagtgagggtggggccagtccagcctaggatgggcagcagcaaggtctcccagggggtggtttatctccctctgtctccccgtggtagtaaacggagttccctgcagccagtcagaggcccacctgaggagggagtgcagcctctgccagtgttcttccctgtcaggagccagttaatggtcacccccaggcctcaggccatcaccatcgtgggtagttcctcatcctttctggacctggggtccctgggccacatggcacttgcatgtgctcacacacttgtatacacacatgcactcacacacacaggcaattcctcacaaacactctgactcaacaaagcgagttttaaagtggagttaacttcagagagaggtgaagatgatatcccaacattagaaggttttcctgtggatagatcaggcaccgtcttcctcatattccttcttggagacccacatcttcttaaaggtgtcatggaggcaaggatagagccctcaatccacgtggaatacagtctctcctgaggtgcaaatatcctgatcttcacttcactcagtagcctgtcaccaaaacctttgaacaaggtagagcctcccaagaggacgatgttggagaaaagtgtgaactgcaggtccatgtctgacttctggatggcgaacaccaggaccttgtggatgccttcactctcctccctgatcaagtctggcctgaagagcagctcaggggcccggaattgggaaggaccaatctcaatggtgctgccatcaggcaggtagtactgagccttctctgtctctagtgtctcttccttctgggggtttatggataggtaggagggtctttcttttatggccttgacaatctcaaactcaaaggatgagtggaaatctcaaacgatgagtggaaatcatagccctccttatgcaggtagaggtgcaggaagcgagagatgttccagcttgcgatgtcaattcgcatgatggagtggggcatggcaaagccctgatagatgggcacagcatgggtgatgccatccccagaatccagcaccacccccgtggtcctgcctgtggcataaaggctgagcacagcttacatggagatgaaaatagcaggcacattgaagctcttgaagaaaacgttggcagctcattcctggtgtctttgtgggtttaaaggtgcctcagtgaggagcacgagatgctcctctgagaaagtctgcagctggtccttagaatagacatattgccagatgtgttccatgtcgttccagtccttgacaatgccatgctccgtgagatagcagattgagagcagcccttggtgctccttggctttgaagccaatgaagatgtcaccttcaagggctcctgccatgatacgaatatgcatgggtaggcccacatactttggaaagcagtatttgtggatctgatcaccagcaaaaccagctttaatcacaccagattcattgtcgatcatgacaggctggttggtgattgtatcgtaagactccacggcagaggaatctctcctggggaaggaactaccagttgggtctgccgctagtgccattcatgaatttcttaatcttgagttctaatttgattgcattttggtctgtttgttataatttcagttctttttcatttgctgaggaatattttatttccgattacttgatcaattttagagtaagtgccttgtggtgatgagtagaatgcatattttgttgtttttgggtggagagttctgtagatatctattaggttcacttgatccagagctgagttcaggtcctgaatatctttatcaattttctgtgtggatgacctgcctaatattgtcagtggggtattaaagtctcccactattattgtatgggagtccaagtcactttgaaaatcataagaacttgctgtatgaatctgggttgccgagaccagctcggtcatggagaccctaacccagcggcgctagaggaattaaagacacacacacagaaatatagtgtgtggagtgggaaatcaggggtctcacagctttcagagctgagagcattgaacagagatttacccacatatttattgacagcaagccagtgataagtattgtttctatagattatagatttactaaaagtattccttacgggaaataaagggatgggccgaaataaaggggaggttctggctagttatctgcaacaggaacatgtccttaaggcacagatcgctcatgctattgtttgtggttcaggaatgcctttaagcagttttccgccctgggtgggccaggtgttcctttccctcattctggtaaacccacaaccttcaccatgggcatcatggccatcatgaacatgtcacagtgctgcagagattttgtttatggccagttttggggccagtttatggccagatttcggggtctcttcccaacatgggtgctctttttttgggtgcatatgtatttaggatagctcttcttgttgaattgaaccttttaccattgtgtaatgcccttctttgtcttttttttatctttattggcttaaagtctgttttgtcagaagctagaattgcaacccctgcttttttctgttttccatttgcttggtaaattttcctccatccctttattttgaacctatgtgtgtctttgcaaatgacgtggatctcttgaagacagcataccgatggatcttgactctttatccagcttgccattctgtgtctttttaattggggcatttaacccacttacatttaaggttagtattgttttgtgtgagtttgatcctatcatcattattctagctggttattttgcagatttgtttatgtggttgcttcatagtgtcactggtctgtgtacttcagtgtgtttttatagtgggtggtatcaatttctcctttccgtatttagtccttccttcaggagctcttgcagggcaggcctggtggtgacaaattccctaagcatttgcttggtctgaaaaggatcttatttctccttcatgtatgaagcttagtttggccggatttgaaattctgggttggaaatttcttttctttaagaatgatgaatattggtccccagtctctgctggcttatagggtttgggtttccactgagaggtatgctgttagtctgatgagcttccttttgtaggtgagctggcctttctctctggctgcctttaacttttttttttttcattttgaccttgaagaatcatgattatgtgtgttggggttgatcttctcatggagtaccttactggggttctctggatttcctgaatttgaatgttggcttgtcttgctaggttgggggaattcttctgtatgatattctaaagtatgtttttcaacgtggttccatttttcctgtcttttttaggtaccccaataagtcacgggtttggtctgtatacataatcccatatttctctaaggttttgttcattcattttcattcttttttccctattcttgtccgcctgtcttaattcagaaacataatcttcaagctctgagattctttcctctgccttgtctattctgctattgatacttgtgattgcattataaagttcttgtgtttttcacctctatcaggtcagttatgttcctctcttaattggctgttctggctatcagctcctgtattggtttatcatgattcttagcttctttgcagtgggtttcaacatactcctttaactcaacaaagttttttattacccactttctgaagcctccttctgtaagttcagccatctcagcatcatcccacttctgtgcccttgctggagtggtgttgtggtcatttggagcagaagaggcactctggctttttgagttttcagcattttgtgtcaattatttctcatctttgtgggcttatttgcctttgatctttgaggttgctgacctttaaataggatttttgttgagtttttattgttgatgttgttgttgttgttttctgtttgtttttcttttaacagtcaggacactctactgtagtgttgctgtggtttgctgtaccccagaccctaattgcctcagtttttcccatacctggaagtatcaccagtgaaggctgcaaaacagcaaatatggcagccagctccttcctctggaagctctgtcccaggagagtactgatttgttgccagcccaaacgcactttgtaggaggtggctggaaaccccttttgggaggtctcacccagtcaggtggaatgggattacagacccacttaaagaagcagtctggctgctttttggtagagcacatatgatacattaggaggggactctttcttctggaccatttgtattctccaaagccagcaggctagaatggctaagtctactgaaccccagagatagcagccacccctgccccggtaacttggaactgcctcagaaagattccagactgctttggttggctggctggaattccaagccagtgggtcttaacttgtgagttgccatggaagtgggggccatggaagtggggcccacggaacaatgctgcttggctccctggattcagctccctttctagggatatatacagatggatatccccccttgctggggatcttggggccagagtatataaaattcctgggtcactgtatgtgcctgagcagctgctctgctgagacaccacacagttctgtgtattggacccaaggccctggtggcatgaactcaggagatctcctgatctgtgggttgcagagatccgtgggagaaacatggttttctgggcagggttgcatggtcactcaccacttctcttggttggggatgggggttcctttggctgcatgccactcccaggttggctcttgttccccttgttccctggcttttctacattctcatgggtcaaggtgtttgccttgtcagtctcaatgtgagaacctggatatttcagtttaaagtgctgaattcacttgcccttcttcattcctctcagtgagtgccatagaccacagctgcttctaattggccatcttggatcaacgttgttattccctttttcactgcttatttcatttcactcacatctataagcaaaaaaaaaaaaaaaaaaaaaaagactcaaacggcataaaaaagtgacttttgtaggttattgtttagtaaagcatttgaattaaaaaaatctcatcatgagctatagctcatatttggtcattttttgtacttctcatttgggtatctaagacttaatgctgaattgaggcatctgtggaataaataaaactctggacctgtctggacaagcaagctcaaagcaggagtgtgctgtggtgggaataggccaactgtggaatcctaaactgccttcatattgttgctgtaccattgagcagctatgtggacttggtacacatagcttgagaagctatgtagaacttctctttctttaagtggagtgagggttgttatgaggcttaaatgaggtaatgtttgtaaactgcttaacatggttggcacacagtaaactttaggtactattatcagttttgtctctgaggctagttcctaggtttatggagttgtagagctggagaagcattttaaagtccagcgttcttccttattttagagagaggaaactgatgcccagagacactgaaggtttctgaggcttggttatcatgtctatgtgttttacagcttggctatgaggatcatctgagctaataggtggaaaagcatttatatgtcagttttttagtattgttcatacagtggctaattgccttgcctgctcaacgactgaatgattttataaaatagctttctggttctgataatagaaaaatcaatatattttcttttttttcttaatttagatgtatccagttaaagcaggcaatagatgaaaataaaaatgctcttcaaaaattaagcaaagtaagtattgaggttaatcacattattaaaacatctcttcctatacaagtatttttattaagtggaagttaattcaagttggtaagttcctgggtttacgttagtgatatagtctaactgcagccagtgctggcttgccgaacaggcttgctaagtctgtgcttgggagcaaagcaaaatccagggctccaactaccgaaaaatgttcagctttgatgaactcacctgctattaaggattcagacaatcctggaaggagctatttttatttttgcattttgtgagttgttttacagtttagaattatttttattttaatttctttgtggggaaataatgcataatctggccctgagggtaagtggtaaagaagcttcttgtatcaaatggcagctctgatatcaatgtctctgcagaaacaagaggaacaggaatttaaccttgacaatcccttcaggatttttttttttttttcacatgagccttggctacagctagatgtccaggtccagagactcatggagtctttaaagtggaaggcacctgaaagtcagctctccagctgtatattactcccctttactgcatctgagatatgtggtcactgaagagctcctccaaatttctccagtgacacaaaacttttcaacttagactgtttgaaaacctaattatttctgtttcacaggtgaggaaattgaagctctcagtggtgaagcatccatgcctcttctgtcaataagtggcagaacttgggattggtgcctgtctcattgactttaaagccgatcttctgtcagaacatatctcttactgactatggaaggtctataatacttagcaagaaaataaaagagaaacctaaaacaagtggtataattttattttttcatttggtttgcattccaacacaattgcctgtttcttttaaatctaatttatttccctaagataggtgtaatgtcacactgatatttactttgttatatagcacttattggaattttttgttgttcttttgaaattaggaaactgaaattaattttttagtgaaatagacctatattctctcataggctgatgaatctgcacctgttgcaaactataatcagagaaaagaagaggagcatactcttttggacaagcttacccaacaactgcagggccttgctgtgacaataagcagagaaaatataactgagtatgcttcctttctacctttcttttttcttttttaaagatatatcaccaatagctttaatgtttaactcaaagacatatagcagtatagatataaacaaatgacactaacaatagaatcagtcaacatttatttattgtgtataatagaaggtgttagatcccatgagagatggaaagaagtgtaagtcatagtctctgccctcaggcaatttataatttagttgaaacaaaacagagatctgaaaagctaaatgaacaaatgttagaaaataaagatgatatatttaatgtcaatgttgatgtgtaaaagggaaatgatttggaatgtctacttgcattgttctccctttcataaacattctttaaaaatttgaagcaaagactgagtgtggtgactcatacctgtaatcccagcattttggaaggctgaggcaggaggatcacttgaggccaggagttcaagaccagcctgggcaatacagtggaccccatctctacaaaaaaacccaaactagtcaggcttggtggcacgtacctgtagtcccagctacttgggaggctgaggcaaggaggattgcttgagcccagaagttccaggctgcagtgagctataatcacctcagtgcacagcctgggcaacggagtgagacactgtctctattaaaaaaaaaaaaaattgaagtagggacatgcattgtttgtctgccagagtgtatgttaataatagcttctgaaagttgtaaagaagacttacatatacaagttgagtattccttatctgaaatgcttgggatcagaagtatcttcagttttggattgttttggattttggaatatttgcattgtacttacttgttgagcatccctaatctggaaatctacattttgaaagactccaatgagcatttccttggagtgttattttgatgctccaaaagtttcagatttaggagtatttcggattttggattttctgattagggatacccaacctgtacgaacaaacccaatttgtgggaagcaaaagaaaaaaatcagttattcagactatttcagtgttgttctccaacctttatactgtatcctgggaaaaaatgctgaaggtggtagatgcaaggatctagaatttccaccgattcttagtactgagaatggcagagtagttggtattggactaaccttcccaccataaatgactataaagtctggacaaaatatacaaagcatctgtttgaagccactgagcatctaccaagcagggttgatattcttgatatagggagacacatgaagcaaatcctacattcacctagaccttttccctgggaataatttatgagctgtggtggaggaaggtagattccaagcagggaatagtagtcttactcgactgaggagacagagatcacactttggagctgctcagttcactgagagttgtggagcaaggtgccatagagagaagggagctgcacagaaacaactccagcaatctgaaaggtctcctgggctgtatagggcatgatgcctgcaaggcctggcagaaagtacctgctgggagactaagagcttaatggattctggtaatcatatagtcctggaaaaacactggagtttgtacctagttctagtaaagagacttgggaaatgtttcaggcatttagtagaggacacagaaggcccaggccctaggagtaaagaaaacaccctgagagtaacaaccatgatctaggaataaagacaaagctgaggtaggtcttctctaaaagagcctaaaagcagaccttatcaggaacaagataatttaactgtgtaacattaaaataatttaaaatttcttagaggaatataacataatccaaagtctgtaagtgagtcatgtaatgtgtccatcacagcaaccagtataaaaaaaatcagaaatgcaaaaaagcaggggaaaatacatgatcaataagtgacaagatggtcactaaaaacagacccagatatgatccagatatagagttagctgacaaggacttctaaataaaatgattaatacagtaaagaaaatagaagaaaagatgaatgaaatgggaaatgggtgtatttaattcaaatatagaaaaatcaaatgaacattctataactaaaaaatacaatatttgataaagtaatgactgagaacttccaaaatctgattcaacatatagactcaaaaatctgggaaatatattaaaatcaagagaataaataatcagtagctcggagatgtgagaattagcaaataaccataaaacaacaatttttaatatgttaaataatttataggaaaagattgataagatgaatagagcgaaatcttaagcagagaaatgggaactaataaagaccaaaatgaaaattctggaactaaaaaaatacaatatgtgaaataaaattgctgagtggtttaatagaagattggatacaacagaagaagggatcagtgaacccaaagacagcttaaaagtttttcaaattgatacacaaaaataaaaaaatgcaaagaacaaaacagaatgtaagagagaggtgggacactgttaaaagttgtaacagatttgtaattgaagtctcagaataagagagagaatgaagcacaagaaatatttaaagagatagtgactgaaaatatttaaaaattatgatctaagagagatatcaatccactgatccaagaatctcagggaaccccaaacagaatcaatataaagaaacccacacacaggtacctcaaactaccgaaaaccaaagataaataggagatcttaaaagctgccaagggaaaaaaggaaacatgtagagacaaatgacagaattacagttgacatcttatgagaaaaaatacaggtcagaagacaatgcagtaacagtaacatcttgaaaacgttgaaagaagaaaccatcaactcagaattctgtatccagcaaaagtataaaaaattaaagtgaaataaagacattttcaggcaaacaaaagctgagaaaatttgtcaactgatctgcagtataagaaatgttaaaggaagttcttcaggctagcagacaatgatcccacattgaaatttggaccttcaaaaaggattgaagaagatgggtacgtgggtacatataaaagcctattttttcttttctatatgcctttgaaagacactcaattatgtaaagcaaaatatatatttggggatttataatatccagttgattctcattatttacagtagttatgttctataaagttgccaggaatactcgattagtaaatgctaaaccattgctcctggggaaatgcagacttaagactcctgtgagcctctggtcacaatgtttttgtcaactgagtaacatacaaccttgtgttactgtttaaagacactttatttcatatattttattgattcattaacattgaattcacactaacagcactatcactcatgcatgaacaagtcttatctaacacacttattttctccagaggtacattatagccttcttgtgcttaggaataccacatggctcttcagcgctatgtttgggagccattttaaacaacaaaatcaccaaaaaaaaaaaaaagcacaaaaatgcaaaaactgtggcactaaatagactgcaaaaaagggacactttcctgtatgagagctgaaaaaaaaaggcaggtgtcaccatgttcagcttcagttgggaatgtgtacgccagacaactcaaattttttgctgctttgtgtatgtccacaaatgaccacaaaagcactgtgagtattaattaggaggttacaaataaagtttagtgagccaatgaattcataaatacagaatctgcatgttacaaggactgactatatgtagaaggaaaatgtgacaatagcacagcatagcacaaaggctggcaggtaaatggaattatttatcttaaagttattttatctttggtgaaatgtgatatttaaattagactatgataagttagggatgcatattgtaatacctaaaacaatcactaacaaaataatacaaagaagtgtagcttgtgaaacaacacaataaaatggaatactaaacgtgatttgattaacccaaaaaaggcaagaaaggagaaataaacagatgagacaaatagaaaccaaatagtaatatggtttcaatgcagccatttggatagttacattaaatgtaaatggagtaacactccaattacaacaaagattgtcagattgaatttttttaacccaaatatatactatttagaagagatagactttagtatgcagttatagagagagtgaaagtaaagaactggaaaaaggtattccatgttctacaacaaagatattatttgttttataaccaaaacaaaggtgatacggttacaataatatcagatatttaaggctaaaagtaatttactatttaagaaaggacatttcataatgataaaagaaagggtcgattcagtaggaaaaaaaatcttcctaaatgagtatacatttaataatatgggttcaaatgtataaagcaaaagttgccagaactaaaacagagctagataattcacaatccttaaccaccgtgatctaattacatgtatagtcaagcctttcttagtgatagggatatgttctgagaaatgagtcattaagtgatttcatcattgtacaaacatcatagaatgtacttgcacaaacctagaaggtgtaggttaccatacacttgggttatatagttatagtatagcatgttgctcctaggctacaaacctgtacagcatgttactgtgctgaatactgtacacaattgtaacacaatggtgtatttgtgtatctaaacatatccaaaaataggaaatgtacagtaaaaatatggtattatatgtatggggccatcattgtatatgtggcccattgttgactgaaacattgttgtgcagcacatgactatatatgtgtagaacacagcacctaagtatgtattatgtaaatacatattcttttcagtgcatctgtaacattaaccaaaatgaaccatattggaccataaagtaattgtcaccaaatttcaagagtttgaaattatgtagaatatatatatattttctttgatgacttggaatgacattaaaacccaatgacagaaaaataattagaaatcactgcatgtggccaggtgcggtggctcacgcctgtgctgaggcgggcgaatcacgaggtcaagagatagagaccatctggccaacatggtgaaaccccatctctactaaaaatacaaaaatgagctgggcatggtggtgcatgcctgtagtcccagctactcgggagtcggaggcaggagaatcgcttgaacccgggaggtggagattgcagtgagccaagatcataccactgcactccagcctggtgacagaatgagacaccgtctcaaaaaaaaaaaaaaagaaaaagaaaaagaaaagaaattactacatgtttgcaaattgtcacacacttctatataaactgtgagtcaaagaaaatataacagtggcaattagaaaatatttggaatgataataaaatgactgggttgcaaccagcatagtgcttaaagggaaaatttctatcttttgtttgtttgttttggagacagggtctccgttacccagactgggtatagtggtgcaatcttggctcactgcaacgtccacctcccaggctctagtgatcctctccacctccgcctccctgagtagctgagactacaggcgtgtgccactacgcttggcaaattttttaaattttttgtagaggcagggtctcactatattgctcaggctggtcttgaactcatgggcttatgcaatcctcccacctcagcctcccaaagttctgggattacaggtgtgagccgccacacctggccagaaatttatatctttaaatgtatagtttgaaaaaaaagttgaaaatcaattactaaaacatccaactttaggggccagaaaaaggacaacaaacccaaggagagcaggaaagaaataataaaaataaaagcagaaaacagtgaacaataaacagacatacagtaggcaatatcaacaaagccaaactggtttttggaaaattaattaaatggataagctgctagcattactgatcaagaaaagagagagagaaaaaaaatcaatacagattccacaagcattaaaaagatactatgaaaagactatgaacaacttgtgtgaataagtttgaaatttagataaaattagtttctttaaaaagaaaatgtactaaaattgacacaagatgaacagaaaatcttaaaagttctactaaaatatttactaaagaagttgaatctgtaattaaaagcctttccacagattaaactctcaggtggctttactggtgaatttattgtaaacatttaagaaagaaatagtgccaatattaaaaaatcattccagagaacaaagaagaaacactttcaaatcattttataagctttcaataacactgatatcaaaacatgacaagaacactagaagaaaattgcaaggccctcatgaacacatgcacaaactcagtataaaatattagcaagtaaaatctagaggcatttcaaaagggtaatacatcatgaccaagtggaatttgttccagagtgtgaggttggcttaacattaaaaaatcaatcattgaaattcactacattaatgaaggggaaaaaccgttatcaagttcacattattttcggcaacattttagaataattgacccatataaaatatgtgcaaaatatctcctaaagaaggaaagagacgcgttgaaaatcaatatgacattttatggattttttagtcttgtggtataaaaatggttgttacatccctgtttatgttttagatcattgtggtataagagtgtcctaccattattttaaacaaagttcagctaatattcctttttattccagagaaaatcttgtagttgactagttttatagttaatgatgttcatttgcattagtctaagtattgttttcccattttaaagataagcttctctcatgtaagctttaggagggcaaagatcttggttttgttcattgttatagcccaagcacatagtgtctgtcacacagtaggtgctccccaaaatttaaactttgctgaatgttgaatgagtaaataaaattcagaaagatttagtgacgtgcccaagctaacattattttggcatttctctcttcctcaccctcagattcacctcctttctcttcatccctatgctgttttcttagttcatagtgttgtcacttctcactttcaacagccaccctcacctttagcctttcttctaatctgttccccacattatacctttgtctcctttctaaagtgggaatcatatcatgtccttcccctactcatttttaggggcgactttaaaggtaaagctcacctgggctacattccgcgtacctcttttcagcctcaactctcactcattttccttaagccttgccctaccattcatgagctacttgatgtttcctaatcttaaatctcctttctcctctccctgcccttcctttctactcccattttacctgattaattccatatcatctctcaagacctaattatagccttttatgattcccattcgtgcaacctgggttaggtgtccctcttgtgtgattgatttcttagtatcctgtgtatacctctactctagtacctattgcactattttataattctccattttctagattgtctcactgcaagctccttgaggatggggaatcatgtctggtttacctttgtgtccactgtgtatctctctgacacggaacttgacctacagcatcagtgtcatcatcataactgacttttatggaaagcttgctatgggcaagcactgttctaaacactttgcaagtagtaactcatcttaatcctcatgacaatcttagaaggcaggttctattattatctccactttaccaatgagaaatggagagcttaaaagaagcctactcaaggtcacccagcaaagagggaatagagccagaatttaaatttagcagagcctatgctctaagtacttcataataatgcttcaacagcattttctgaatggatgaatccaagacttgaattcggagtctcctggcctcaagtccagtgatgctctgccatctcacatacatgactcagctccctctccgcctcagtctctccaggcacacggtcttagctagatggtagaaactgttctttgtattttcccttatttcttttatttgccagctccaaatatgggatattcatgtatatgtagaagttacactcatagctggtctgttcttgtatattatttcaagtagtcctactcagaaacactttttgtagagttggggcacctactgaagaagaggaagaaagtgaaagtgaagatagtgaagacagtggtggggaggaagaagatgcagaggaggaagaggaagagaaagaggaaaatgaatctcacaaatggtcaaccggtgaagaatacatcgctgttggagattttactgctcagcaagttggagatcttacatttaaggtaggtagaataagactgaaacctaacctaagggtcgatgtccatacctaacagaataagaaaactctgcctgtacacctgtattacagattcttaaaatgcagttttataacaatctatttaaataagtaataattacaatttacaagcagtagtaatatgagattgtgttactaaagttacctcttctaaagatttttgaaagtagctttaatgttgagaattcctaatttaggggtaaaattttataatttgttattgaatgtcatgtataaattcattcaagtgagttaggcaatgtccataggtggaggtagaagggagcacttcctgccattttgtagcagtctttcctgttagcttagatatgagaggggcttacatccatgcttggttggcctgggcataaataagtggcaggtgggacagaacaataaagttgtgatttttaaagttgtgattttgagcctgtgttttctgctagagaaatgagccaaagaaatttaagtgaatatatgaattttagttcttatattaaacttcaaagtttagtaactgattaataataaaatacataagaatattatgcaaataattatatggtttgatttatagatttttttttcaaattctcctggaaaatggtatcaatattagacaataatgtatattttaattaagtgtttgcttttgtagtgtccttagtggtggaaatgcttttgtcttcaaagatgaattttatttttataaatgagtgagtgttattcaaaacatatctggtgaattaagtgggtaattatattcagtaaatactatttttgctcaaaaatagggtttaactttaatggaattgatattctttgggaatttatatgctgcttctgaaagacacttttccagagatattaaaacattcaaaaatattttacgcagtaattgaatttttggaataagtatggggccttaaaaatgattgtgaaaaatggttcccatttgcataaatggctcaagtgtatgttaggtaaccaaaaggaatgattcattaaactatgtcacatttatggttttaggtgagttaggcagaatacataggggtcgggtgatagggaagcttttgataaaccttaggataaatattggattaaaaaaagattttgcctttttttcagcacatattttgaatcattggtattgacatatactcatgattattgaattttatttaaaatggtttactttgttttgctttaagaaaggggaaattctccttgtaattgaaaaaaaacctgatggttggtggatagctaaggatgccaaaggaaatgaaggtcttgttcccagaacctacctagaggttagtcttggtttatgccttccttttctaagacttttttttttttcgcttttaataaaacatttagctgtgttcttttgtcagttgactagtgaatgacttgagatatagaatttgctttaattttggagggacaggacctgggaaaaacattgtgtattaatggtcctggggacctgtgaagtgctcttacgcatgtgagccctggaacgtgatctcacaatgaggggatgctttgtggattaatgctgatcataacaaataataggtgtctattgtttattgtaaaacataactgcagttaactttgtgttaacttccacaaatatgtgatccccttactaaaatgtgaacatactatacatgtgtgtttgtagcttgtattttcttatttcataaaataacatggtcattttctgtgccaagatatatagatttctgtctggatcagcactgtccagtagaactatgatgcaaaccacacatgtaatttaaatttttcagtagccacactgagatatctttttgctgatgccacttctgacaccaagtatgtggtttttctctgacaccaaatatgtgttattacatcagttcttctacaccaaccggtgtcagcaattcaattcgattctgatgctaatgcctggagctagcacagacccccacaggttaaaggctcagtcccacaagattgctgctcacttccgttgccagtcacaagtcccaagagccacccatacttctgactgactggctatacattcacgagttcccataccatcacctcaggggttcagtaatttactagaatgattcacagaactcaggaaaacactttccttgcatttaccagtttattataaaggatgcaactcaggaacagccatagagtgaggtattggttgggggtggctggcatgcactctctgggccttccaccttcccagcacttcgctgtgttcaccatcctggaagttcctggaaccccatcatttaggggtttttctgaaggtttcattagccatgtttaactaaatcattagcaattggtgattaactcagtctccagctcctctcccctctttgaaggttggagggtggggctgaaagttctaacctctaatacctgggttggtttttctggtaacctgtccccttcctgaagctgtttaggtgcccacctagaattacctcattaacataaactcaggagtgactgaaggggactcttgatgagtaagaaaacatactcctatcattcaggaaattccaagggtttcaggagctctgtgccaggaatcagtgacaaagaacaaatacatgtttttcattacacacatttttaaaaagtaaaaagaaacaggtagaattatttttaataatatattttatattatccagtatatcaaaaatactattttgacatatcaatatttaaaaatattgagttgttttgcttttttaacattaagttcaaaatccaatgtgtgttttacatttacagcacttctcagtttggattaatttcaagagctcactagctacatgtggccaaagggctattgtattacatagggcaggtctagatcatctttttcaatggcagcaagtcttctaatctcatttagatggtcattgaagttgtttccaacctataatcactatcgattatgttgcaaagaacatgggattagcatccactgtcagttgcaaaaagatccccccaaaaagtagcttaaataaggtagaagcctatttctctcaagcataaaagtgtggagaaaagcaatcaataattggttaagatcctatccagtattttatcctgtttctgatgtgaggctgctctgcctagagttatctctttagttttaagtcagctgctggatcttttaaggattccaaggagcaaaaggggaaagaattcaaaaggcataagctgctgcctttttaagaaggtttcttggaagttacacaaaaaaactttcaactgttgctcattgaccagcatttagttctctggcaacagttagctgcaaggaagtcttgggaaatgtagtcttttaactggatcattgttaaatcagggattttgtttgaaaaaggaggtggggaataggtggtagccagccagcaacttgtgttgtcatcaagcctgcgtgcatctttgcacacttgcccgattatccccttagataaattcctagatgttcatcactggttcaaagggtttatagctttatattttgatttatttttccaatttgccttttagaaaagttatgccaatttgtactcccacctctaacaatcagtgagtgctgtttcctcacacaattgccagtgatggctgttagcaatctttaaaatttttgccaatatgaccagcaaaaaaagtgtcattagtggtttaatgtgcatttactgtactcctaatgaggttaagcatcatctcatatgctttatgaccatttgtatatcttctttgcgaatggcactttcggttttctttattgatacataatattttatgtatttgtgtgagtgctttttacttgtatggattgtgtaataatcaagtcagggtatttgagatttccatcaccttgagtgcttatcatttttatgtgttggtaccttttcagttcttttggatatttttttctaagggatttaaaaaactctttcattgatttctaagagcttttataatattttaataatcaggatattaatccttagatatttgtgtgagctattttctttttttcccctcaggatatgcttaagttatgtgttagatattttctttgttgactttaggtcatgtttatttattatgtagctaaatctgtcagtgtttccacttatgatttttgattttgtatcatgattggaaagggcttccccatctctagattattttcttctaatgcttttatgtttcttttatttttatctttacgtcttttcttttttatttaagtaaattccatctggaatttattttgattaaacttgctgtctatctcagttcttattttttcaaatagcaaagttattaaccatgtgttgaaaatttatttcccactgagttttatatgctcatcatatatactaaattcccatctatgctcaagattttctgaaagtactgatgcttttgtttttttgtttttaaacagaaaagcttgtttttgtttttactggagggttaggtggcagtactggtatttttattggttgttttttgcattagttaaaaagcacttcacatttcaatggttttttagccttatagtgaagaagaagaaggccaagagtcaagtgaagagggcagtgaagaagatgtagaggcggtggatgaaacagcagatggagcagaagttaagcaaaggtacaaaagtgggaaaggatatcaaagtaggtttaggaaacattttatttgtttatttttattattataactaattcaatactttcttgaaatggagacaacttgtacctggagagcttttcatactattgtctgcttaaagatcattactgttttagttttgtaattatttttaatacatttagctctacctcgttttcatctggaaactgttagattttcaaaacttactgatgattatcaactgtgattaaagaagttccctaattgagtgaataggcataacctgacctgactcactttgctattttgtctccccagaactgatccccactggagtgctgttcagaaagcgatttcagaggcgggcatcttctgtcttgttaatcatgtctcgttttgctacctaatagttctgatgcgaaataggatggagactgtggaagacaccaatggatctgaaacagggttcagggcatggaatgtacagagcagaggacgtatatttctggtttctaagcctgtgctccaagtaacatttctcattagtttttttttttttttgtacaaaaagaatagataattcatggtgtcacttgaggacttggaaacattctcattgatcctgctttcctatcatttgagtggaaacagatgttaaattttatttactattcgaaaaatcctgaaagcctttaataaaaagtaagaaattggccaggcatggtgattcacactggtaatcccaacattttgggaagctgaagcaggaggatcacttgaggccaggaattcaagaccagcttgagcaacatagtgagaccctatcctacaaaaaataagaaaaattagccaggtgtggtggctcatgcctgtagtcccagctactcgggaggctgaggtgggaggattgcatgagtttgggaagtcaaggctgtagtgagctgtgattgtgccactgcactccagagcatgagtgacagggcaagaccctgtcttaaaaaaaaaaaagtaattaattacatttttttaaaggagaaatgatccataattctgtcattaaaaaaaaattacaggccgggcacagtggctcatgggcacagtggctcacacctgtaatcccagcactttgggaggccaaggcgggtggatcacctggggtcaagagttcaagaccagcctagtcaacacagcgaaacctcacctcgactaaaaatagaaaaattagctgggcgtggtagcgcatgtctgtagtcccagctcctggggaggctgaggcaggagaattgcttgaacctgggaggcggaggttgcagtgagccgagaatactccactgtactccagcctgggcgacagagtgagactccgtctcaaaaaacaaaaaaataattacatagccaaatgaaaattctcttcctcaaactcataagtaatcaccattaacaatttagtacgtgtccttcctgacctttttcgttatttattacttataagtacatccttgtatgtgtgagggtgtgtgtctatgagtagtgtgtatgtgtatacaaaaaaaatccattaattcttcagtgcatgtgatttgccaatagacattaacttacctgtgaaatggaagcgcagggtggagcaggacaggagcagggacattttgataagggtatacttgaagcagctgctccggaacacacagctctgcacgctgggcactgtatggggcttaggtccttaggagaggccagggtgctgtgatggcatcctctcaggaatttggggccaaatcgtattattcttccactaaagtctgtatgtttatatttttcttttttgggttatagttactctagtgataaagtattatagagatgcagaaacatgactgaaaacaaatccattttgatgttactgtcttcagcagataaacactgttgatgtgttaactacgatgggagctattcctgcagggttcaggccttccacgctctcacagcttctggaggaaggtaatgcgtgcctatcagccactgcactctttcagcaaagcagtcaagatccacgtctaatttttctgtcacaggcaaaacacattgttgaagaagatgttgaatctcacatctctttggtgctcatcttttcctcatccttcctatgacagtgaggaaagatccctgatcctatcagaggccagcctgtttaccagtgctccgggttccagcccctttctttttttcaaaaatgtgactcctttaattttcagccctttcctgtgtctttagctggcccaccttccccacactggttcattccctcatctgtgctatcagcacacctaattctccccaccttaaaggatcagccccttgaatcctatcccattctagccaaaacctccttttctctgatcttcttccaagcaagacttttccaaagaattatctccatttggaattttcattttccttactcattcttggctttccctgtatttggcaacttttgtctataagctcattttaaagaggattcatgctgggggacaaggggtgtcctgtataccctgagttgttgagttgtcatggaagggctgctttgaggatgcctttgctgggaaggttcttcccagtactccctaaattcccatcttttcatccttcaggtctcgcggtaaattctgccttcccagagatgccttccttgagtaatgtgggtttcccttactcccattcatgtgaacaccctttatagctctatgtcccctaataattattttatttatttgcttgtctacttattttctaagaaaattttcctcccattcaactgtaaactatggagggcaggggacatatctctgatttatctttgtatttctagaacctggtgtagcatctggcaagagtagaagctcaaaaattatttctcgaatggataaatgatgttattaaaagtattattcatgactaaagcatggaggaagagcataaaatgcttttgtgttaagaagtaaaactaacgactttgttttttctgaagtctccaaaaagtgctcatagatttctgcattttacaaaaatatttgaatgaatccttgtcatcatggggcatattattggcctaaaagtctttcttaaaggtgctttaagatgatcttttatgtgtttgtatctgtaagttttgtactgctgtttttatccataaatctatattggcgcttctattttggaaagcaagttcttagtaagcagcgtggcattttggaagtgcctgtactctagttcatagcataacattatggatttttgatttggagtttctttctttgtaagaaaatgaagaaaaaatgattttttcagggaatcaatttcgagcaaattacttcttacaaccagagctcatgccttcacaactggccttcagagatctgatgtgggatgctacagaaggcactgtaagtatagttactatcagtaaaagtgtaactcttccagattttgtcatagttgcaattagacaaacaacatgttaattgactaatgaattataaaaaacaaaaaaattgtttatgataattttgaaaatagcgatatttttataactaaggcagaatttggacttgctaccttgactttatcttgtttctcttctccattgcactcttctctcattgttagaaaggaaataatactaggtttctatcttaatcattctttgcctcaatttcttcatctgtaaagatggagtaatagtaatgcttccaacataaagttattttgataattatgtgtgtgaagggttttgaataatgcctggcatatgaaaagaactcaatagatgttagccattattatcatttatagtagtagtagcagtagtagtagtatttttgagacagggtctccctctgtcacccaggctagagggcagtggtgtgatcatggctcactgtaacctcaaattcctgggctcaagcgaccctcccacttcagcttcctgagtagctggggccacaggcctacaccaccatgcccaggtaatttttgtattttttgtaaagatggggttttgccacgttgccaggctggtctcaaactcctgagctcaagcaatctgccctcctatccctcccaaagtgctaggattacaagtgtgagccaccagtcccagtctaatataagttatttaaatgaaaaggcttatgaccgtaaagcagaatgtaaagtttaatgaattgaagctgttcttaaaaaataaaaaatcagaatgccaatttatttactcacaatctgaattatacctatgaagcagatctgaataaatatatcagatagtgcattctctctgttaaaacacctattaagaaactaaggaactatgcagataattgcttggaataaaaaatagtggggataatcttaatgccaggtggcattggttttatgctgcgttagccttctgcacttacccacattctgtaggagtgaaccgggactggaatacagtgattctatagtcatagatcatatacattttgcctgccaatatttattgttcctttcatcacagcttttaagtatttaagaaaaatgcaatatttcaaatgtaactctatgaaaaatttacctaaaatgactgatttaattttcaatgaacagagtattgaaacttttattgtatatgtgtaaattttttcttttttaaaaattctgtatacattttcataagccgaattcacaaaagacagatttgtgttagaaatcataaaaataaacttttttataactaatttttctttcagattaggtcgagaccaagtcgtatttcattgattctgacattatggagctgtaaaatgattcctcttccaggaatgagcatacaggttctcagcagacatgtacgcctctgtctatttgatggtaataaggtaaggttactgagaagtaaatcaattcatactaggattatggagaaacattcccttagattcttttccattcaactcctccccaattcccaagagagtattttttacctagtaccaaagaaaaatttgaatgactctttgaaaaattcattttttaaatgagatacaggttaaacagtacttagatggaaatttatagttttaattgtgtatattaaaaaaaagataaaagatttaaagtcagtgatctaagctagcaaatcaagaggctagaaaaagaagagtgagttaaacctgaagaaagtagaaagtgggaaataatacagataagagtagaaattaatgaaatagaaaacagatggaccaaagagaaaattttaaaaaagacaaaagttgattctttgaaaacattaataaaactgaaagatgcatagtgagactattaagacttttttaaaaagtaaaagaaaacaaactattaacatctgacatggaaatagagacattatcacagatccttcagacattaagaggccaataaggagatattataaacagctttataccagtaaatttgacaacattgatgaaatagataaattcctggagaaccataatttactgaaactggcataagaagaaatagaaaatgtgaataacctctggtaaagatattaaacctataattaaaaaaaaatcttgccacaaagaaaacttcaggcctaggtggcttcacctgtgaatttcttcaaacatttaaagaagaaataataccaatcttatacaaattcttccaaggaacagatgaaggagaaatgtttcccaacttatttcataaggccagaaaaaacatgaccccagaatatgacaagacattacaagaaaggaaaattaccagacagtatccttcatagatatagaaagtaaaattctaaacaaaatattattaaattgaatctagcaatatataaaaaggacattatgtcataaccaattggggtttatttcaggaattcaaatgtacattcctgggtaatcacatttaacatttgaaaatcaatcattataatttgccataagaaaaatcatatgatcatcttaagaggtaaggaaaaaacatttgacaaatttcaacacccatttatgatttttaaaaaattatctacaaactaggaatagaagggagagtcctcaaattgcaaaatgcaacaagaaaaaacctaaaactagcattatcttacttaacagtgaaatactgaacacttttttcctaagaccaggaacaagtcaaagatatccaagaaataaaaagataactcagttttctaaagggacaaaagacttgaatagcctcttcaaaaaagaagtatcaaaaaccactagaagtataaaaagatagtcaacatgtaagaagtcatcagggaaatgcaaatgaaaaccacagtgagagagactgacctatatgttatatataagaagcccaccttaaatattatgctataggtagcttaagagaaaaaaaggatgagaaaagatataccattcaaagtagacttcaggcactacatagtgataaaagagatcgttcaccaagaagacatagtaatcctaagtgggtacatacctaacatctgaaatttaacacacaagaaataaaaatggttagaactgaaaagagaaaccgacaaagtcacaattatagttggggcctctattatagttggggagtttaacacttctctctcagtaatataggacaagcagacagaaaattagtaaggatgtaagagaactgtataacatatcaacaaactggattagattgatattcacataacacttcacctcaaaatagtaaaatacactttctcttaagtacatatggaatagtcaccaatatagacggtcctgggtcagaaaacaaacctagacaaattgaaaagaattggaatcatataatatatggtccttgattacatggaattaaatttgaaatcagtaacaggaagataaatggaaaaatacttaaatacttgtaaatttaaaaactacttctaaataatcaaagggttaaaaggaaatttcatgggaaattagaaaatattttgaactgaacaaaaaatgaaaatgcaacatatcataatttgtggaatgttagctaaagcattgcttagagggacatttatagcactagatgcttatgttagaaaagaattctcaaatctacagtcaaagctccttcctgagaagacagtgctgcttgagctgataacggtcaatgtgaaattaaatgagttaatgtaagggaagttatcagagtgatgttatacatggaaagaacatagttctttcaaagagtgtctggatgagaggtggtgatgataacttagagaggtggaggtggagatgagagatgtggatagagatatctgggagtaaaaatcaacgaagcttggtgatggactggatatggaggagagaggaggagtggggtataggcatgacacctagtctctgacttccgcatctggatggatggtggcaacattcaatgagatggggaacactggaagaggaccacgtttggaggagttgacatgggcttggttttgcacatgctgagtatactgctaacccccagcatgaagaaaatgcctttatttcatctgaacttggggtaaagaaatgaacttatgttatgacggtaatcctccctcacttccataatacattctgcacaaaatcactgccacaaatgagccagtaggtgtcctcagtgaccaagagctgaattggtttctgtttcatacatctggtttgatactttttcctgtacctctctgtgttctcatatataagaacataaaaaggaatggaattttattttcaataatatatcaaaataatgaaatttactttatgaaagaaatttatgtgagatttccaaattgagagttatggaacatatttaatagctgcacagatactcgtgctgtttatgtaagagtgcttctttaataaatctaagcctagttatgaataaaaagcattgggctgggcgcagtggctcacgcctgtaatccccgcactttgggaggccgaggcgggcagagcacatggtcaagagatctagaccatcctggccaacatgatgaaaccgcgtctctactaaaaatacaaaaattagctggacgtggtggcgtgtgcctgtagtcccagctacttgggaggctgaggcaggagaatcacttgaacccaggaggcagaggttgcagtgagccaagattgcgccactgcactccagcctggtgacagagagaaactctgtctcaaaaaaaaaaaaaaacagaaaccaaaacacatacacacacacaaaaccaaaggcattgttgccaaaactaactaatgagacacaacttccagtaatgtttgagtcagctcctcttggaccaccccacccagagagggtaattgtaaactctgggcaaagtaaaaagcaactacctgaaggcactgcagagcattcagaagcaggcagacactggagaggagcctcaagcctttagtccactgatttattttttttctctttgttttctctcttttttgtttgtctcttttctttttcctatcttcctgtattagtttgttctcacgctgctgataaagacatacccaagaaagggcaaattacaaaagaaaggtttattggacttacagttccgcatggctgaggaggcctcacaatcatggcagaaggtgaaaggcacatctcacatggtggcagacaagagaacagagattgtgcagggaaaactcccatttttaaaaccatcagatctcatgagaatcattcaccatcatgagaacagtgcaagaaagacctgcccccatggtggcatgtgcctgtaatcccagctactcaggaggctgaggcaggagaattgcttgaaccgggacctgggaggtggaggttgcagtgagccgagatcatgtcactacactccagcctggactacagactgagactcttgtctcaaaaaaaaaaaaaaagaaagacctgcctccataattcaatcacttcctactggtttcctcccacgacatgtgagaattgagggagttacaagtcaagatgagatctgggtgaggacacagccaaaccatatcattcctcccctagtcccttccaaatctcatgtcctcacatttccaaacctatcatgccttctcaacagtcccccaaagtcttaactcatttcagcattaactcaaagttcacagtcccaacatctcatctaagataaggcaagtctcttctgcctatgagcctgtaaaatcaaaagcaagctagttattttccagatacaatggaggtacaggcattgggtaaatgcagccattccaaatgggataaactggccaaaacaaagaggctacaggccccatgcaagtccaaaatccagctggacagtcaaattttaaagctccaaaatgatctcctttgactccatgtctcacatccaggtcacgctgatgtaagaggtgggttcacatggtcttgggcagctcagcccctgttgttttgcagggtataaccccactcctggctgctttcatgggctggcactgagtgtctgcagcttttccagcagcacggtgcaagctgttggtggagctactgttctggggtctggaagatggtggccctcttctcacagctccactaggtggtgccccaggagggactctgtgtgagggggctccaaccccacatttccctttcgcacttccctagcagagattctccatgagagccccgcccctgcagcaaacttatgactggacattcagacatatcatacatcctcttgaaatctaggcagaggttcccaaacctcaattcttgacttctgggcacctgcaggctcaataccacatggaagctgccaagagtttgggcttgcaccctctgaagccacagcctgagcttatcttggccccttttagtcacagctggagtggctgggacacagggcaccaagtccctagactacacacagcatggggaccctcggcctggcccatgaaaccattttttcctcctaggcctcctggcctgtgatgggaggggctgctgtgaagacctctgacatcctctggagacatttttcacattgtcttggggagtaacatttggctccttgttacctatgcgaatttctgcagccggcttgaatttctcctcagaaaatgtgattttcttttctatcgcattgtcaggttgcaaactttccaaacctttatgctccacttcccttatgaaacaatgcctttaacagcacccaagtcatgtcttgagtgctttgctacttagaaatttcttccaacagataccctaaatcatctctctgaagttcagagttccacaaatctctagggcaggggcaaaatgccaccagtctcttcactaaaacataacaagagtcaccttttctccagtgcccaacaagttcctcatctccatcagagactacctcagcctggaccttattgttcatatcactatcagcatttttgtcaaaaagccattcagcaagtttctaggagattccaaactttcccacattttcctatcttcttctgagccctccaaactgttccaacctctgcctgttacccagttccaaagttgcttccatatttttggatatcttttcagcaacaccctactcctggtcccaatttactgtattagttcattctcatgctgctgataaagacatacctgagactgggcaatttacaaaagaaagaggtttactggacttacagttccacgtgtctgaggaggcctcacaatcatggcagaaggtgaatggcacctctcaaatggtggcagacaagagaagagcgcttgtgcagggaaaactcccatttttaaaatcatcagatctcatgagactcattcactatcacaagaacagcgcaggaaagacccatccccataattcaatcaccacccactggattctcccatgacatgtgagaattgtgggagttacaattcaagatgagatttgggtggggatacagtgaaacctatcacttcctgtgtgtcacttgagcatttttttttttttgagatggagttttgcttttgtcacccaggctggagtgcaatggcgcaatctcagttcactgcaacctctgcctcctgtgtttaagcacttctcctgcctcaccctctctagtagctgagattacaggtgctcactaccacacccagctaattttttgtatttttagtagagatggggtttcaccatgttggccaggctagtcttgaactactgacctcaggtgatccacctgccttggcctcccaaagtgctgagattacagttgtgagctaccgcacccgccccacttgaacattttttagaactccattctgagttatctgtagtgttgatgagtgtatctttttggctagtttccttagtggttgcttctaggtattaagtttatacatgcatagcttaccacagtctactagtgttaacattccagttggagtgatgtataaaaccttaccttcctttagttctttactttccctagcttgtaatatagttgtcttaaatatttcctctacatacattaagaatcttatcacacagcaccaaacataatttggaaaacctgaaagaagatccatagtatttacctatatttttactatttccattgtttattctttcttcctgatgctctaagagtcttctttttatcatgtcctatttagagaatctcctttaaccattcttttagggtaggtctgctggtgacagatttttagactttatctgagattgtccctgtttcctcttcattccaaaaggatattttaattagatagagaattctgagttgacagttatttttgtttgacacttgaaaactattgtgtcatttccttctgttctccgtggcttctaatgagaaattcatcatcattcaaattgtttttttcctgttggctaacctaaatgctgtttcttactgttttcaaggtattttcgttgtgtttcagttttcagaagtttacggtgtatctggcatgaatttctttggtttaccctgcttggggtttgctcagcttcttcaatctataggtttatgtcttttgtcaaatttggggatttttttcagccattattttctcaaatacctttgcaactccaattatttcttccagtgccgtttccctctatctagtagtgttgtggtttttattaacagtacatcaccctcctctcccaaccccagttcagaaccagatcttgacgtagagtttagagttcttgatctaagatgatgtcagatatgtcactgatccattaaaaggcccacttgttgacatggttctgcttctggtgtcatggctatgtctttgtcctcctacttgcttaggctcactactttttatgagaagcaggggcaaccttttttttttttttttttaaccctactggcttccagcaacaataaagcaatatctatttctctatcatggggtgatatatagcatacaaatccagccccttgctaccccatgctccttctggactcagagcccaggaaacctctagtttttgtctcactttactcttctatcttctatttgtggtccattgacatatttatcttacttttgggtattactctgtctttttaactatcactgcttcattgcttcatatgtggagcagaatggttgtgttgaagcataaactggttgagaagttcttgtacattcttagaaaaaaaaaaatagagccaaggtttcactatgctgcccaagctggtcccgaactcctgagctcaagcaatctccctgccgtagcctcccaagtagttagactacaggcacgagccactgcacccagcccctcttgcgtttttaatgcagtttgctgaacgaaatctctgtaaattattttgactcttcagttcttcattctttgggtctggttttgcacagaaagcagtgtgattctaagccagtcattcaccctctgtggctgcagttttctgaaatgcatagtgagatggttggactaagtcctttttagttcttagagtcaatatgtcaagaaagatataaaattatcaaacagaagaagttactcttgattccaaacttcaaaattaggattctccaaattgaaaagataaaagcagaggtagtataggatttcaattttgattatagcaaaggacttcttggccattagaagtagaaaacatttcttgaaaaacgaagaagaaccttagaataacatgcagtcttacagtaatcacaaggtagtaattataaggagtttgtattccaagagtccaggtggtaaatatacataatttcaggaaaagtttaaacatatatatattagcaatcgaaggaagtgggattttgttaatgtggaaaacaatccagctgcccataaaatactcctatattcctactactagggatgtggaatacagtgagtggaatttgacctaatataacacatttgggattattttaaattatcattttaaagctttgttttggaagtgttataataaaatattttcatctaaaataaaaattaactattatccattcctttggaagatgtcaattttggccataacattttagaatttgaattcttcattccataaatccctttgtgtttcattgttttatgtaagttttatgatgaacttcttgcatagagcattttataagagattgaatttcaataaaaatataatttatgggcctagagatcttgaggaaaaatataactgtatctgaactattaggactgtctgtcttagtgacagagtaatgaactgcatgtgaaatgcttgtatgggtcacatcttttttttttttttttttttcttgagactgaatcttgctccatcgctcaggctggagtgcagtggtgtggtatcagctcactgcaacctctgtctcccaggttccagcgattctcctgcctcagcctcctgagtagctggaattacaggcacacaccaccacacccagctgatttttgtgtttttagtagagacagggtttcatcatgttggccaggctggtctcaaactcccaaattcatgtaatccacctgcctcaacctcccaaagtgctgggattacagtcgtgagccactgtgctcaactgggtcacatcttttcttttaaaagaccatttttttgctgggtgcaatggctcacacctgtaatcccagcactttgggaggccgaggcaggcagatcacctcaggtcaggagttcgagaccagcctggccaacatggtgaaaccccgtctctactaaaaatacaaaaattagctgggcgtggtgacagggacctgtaatctcagctacttgggaggctgaggcaggagaatcacttgtacctgggaggcggaggttgcagtgagcctagatcatgccactgcattccagcctgggcgacagagcgagactccttctctaaacaaataaataaataaaaggccatttttacctaaaatttcaattacttttctggcaaacctatctcagatattaaggaattcacttaatataatttattactagcataggagtccaactctgaattcatttatgtcatacctgatataaaaagaaaaacattacagaattacatgaagtaaaaagtgaaagttctccccttgccatcttcctcacttagtgtagccactgttaactctttgggacatggaaatggtgacatttcaaagagctttttacatgatttcaaaagggaaaatctcatttcaggttctgagcaacattcatacagtcagagccacatggcaacctaaaaagcccaaaacatggaccttttctccccaggtaagtaatctgctgaatgagtggagtgagtgaatttcaaagtagaacatattcatatttctataaatagcacagagtatgtgggaacagatataaatctttagattctttggtgttctttgaggacattgataaaaattactcatgtttctgactcaccaatgttagtaattcctatgaatcatcccattcaatcagtttcagggttcatttttagaaaattctcatttgatgaaaaatgaaaacataaagataacatttaggaagtggggtgtttttcaaagatgaaatcttccaactgtgctaataaaagctgtgctttcttcagataaagtcagggatgacgcctgagggactgctacattacacccacacactgtcaagactggaatggcattaggtgggtttaaaccactgagtcagcattgcatagacgtagggaggacaaagatgtcttcgtgttgtttttatagtatcaattgtccatattttattttacattactttcgtctacctccaaggtctcattaatttagtatttacttccttcccacagctaactcccttgtataactgcatcctgaaaacccttagttacctttcctcttattgcatcaaaagatcttaaggcaagatggaggttcagtgagagggctcagggtgtggatgaggccagccacctcaactgtgtgctgtgcctgtccagacttgtcgagagcacacctcctaaaagtccatcttgatcttcttagcacccttcctctggtgagaagcatggcctctcttttggcacagtacttcacaattctgttattgcgtctctgtgtatgtgaagagtttagggtagaattttttaatgtttttcctggggtagaaggaagaactgttgggagtatgtgttattctgttgaatgaaattaaacatcagttatgtgcaagcattttttcctaggcacgtggaaactttttcatgccagtgaagttcctattccagcaaaattagtaggggaaaatacatacatgaagaataacaatatcatctacttatggaaccctaactgtgtgctaggccctgtgccaggctcttacgtacattaccttatttaatcagagtagccatgtggggcaagtactgttggtaactaccactcaggcagattgtaatggctttggagctccaagtgctttggaagcacacaggagggtaaagttaattctagtcctttggctcagggaaagttttctagaagagaaactagatcttgaaggttggatagattttacagtcaagaagggagggatacagttgtcgagggagagtgaattgaatgagcaaaagagaaaataaatgaaaattcacaaggcacacattaggaaagttgagcaaatatgtgtattcagtctttaatttttgttctgtttatgaagaacagtggttaatataaatatcttataatgtctataaactattatttgtaacacctctggagacctaggcacagtactattagcctctactctaagcaaaaaataagcaaaggtaaaggtattttccctttaaaagtgaagttaaatttttaaaatttgtaatcattggcattgatgaattcagtccatctgctttttgtttttcttaaaaggcttttattataatgcaaaggcataaactatttactaacaaatagggctgaaaccctgtgtgaggccgttcttgcattgctataaagaaatgcatgaggctggttaatttataaagaaaagaggtttaattggcccctggttctgcagactgtacaggaagcatggcacaggcatctgctcagcttctagggaggcctcaggaagcttccagtcatggcagaaggtgaagggagagcaggcatctcacgtgacagtgcaggagcaagaaggaggaaggaggtgccacacacttttaaaaaaactgatctcctgagaacgaactctctgtggtgaggacagtaccaaaccatgagggatctgccctcatgacccaaacacctcccaccaggcctcaccttcaacattgggattacaattcaacatgaaatttggtggggacatttattcaaaccacatcaaacccccttcccattttttatttttatcaataactttaatttctttatcatttcaggttactcgcatcttaccatgtttgcttgatggtgattgctttatcaggtctaattctgcatctccagatcttggaatattatttgaacttggaatttcttatattcgcaatgtatgtccgttgaaagataaggctttctaatgtatcagttaaaagggaaggttaaaaaatgtgtctattgacaaggaaatccttgaagtctttatgtgtaattgaattttaatcccttgaggaatgagaatgccagtgattctaattttatgtgtgctgatttgttttcgtagcatttaaaataatagtacttattcacatttatagcttgagtgaactccagtgcttttaaagaataaaaattcaaaaaggatgggactttgcagaaagtgagaaaagatgctcactggcatcccagcgccatggttcacctctgtcttccaggggcagagtatacttagccttgtaactgaggtttctaattaagggacttagcagagtagtgacttttataaagtgagtttaacttatgtcatataaactactgaaccagtgggtggggctctgtgctagtaattaaatgtttccacatactaataatagcttgataggtatagtatatatagttgacctcatggtaacccagagagcgttacagagatgttacattaatggtattacactgtccattcatttgtttaaggcaaattcatccatatgtattgtggagggggtaggactggggaaaggagcaggccccccaaaggaagccttaggggcctctagcaactgacagtgggggtaaaattccaagcagaaaagcccttgaatgattaatatctgcattctatctgtcagtgaaacaaaggttcatcatcccatgtagtactgatatgatttgagatcactccacagaatgcttatatcagtcaagagacaatggcagcagttgccacatcattggtttaagggattttcgagagcaattttgacaaaatatgattatcacttgatatactacctttaatatctgacccgcaggcaaaatgagattctactgtgtttcattttattttcttgtgaagaactttttagttctaaaggtgaatactaattttgttcctttaaaaggacttggtatgtgcttataaatttgactagttcagaccttaagtttcatatacttgtcttatttcctagtcaactggtgaaagaggagagttaagctgtggctgggtgtttcttaaactttttgatgccagtggagttcctattccagcaaagtaagttggctatatattcctaacgaatgaatacttctgtaaaaattcattttttagactcttgatacctcaggtttgttctatgagcatgccaataacttttggggagaggactttttatgttgactttagtgttgtttaggcagtgtatgaaaacagcatgcacagtctcatcctaaggaggaagaaatgactcctagagaagaggtattttaaaagatgtttgcactagccatctgctgagaatattctttcagtaatttcctatggtattaacacatttcaccatgctgaaaacagagcctagttgtcttcaaagagtgggaaagttaagtccagagtccagaggtcctctgtgagtctctacccttcctctgtaggtgggacattgaaatcacagtggcaaccacggtaaatgatttaaactttaagatcaaaaggcagactggaagcaaatactgcaatatgtacagaagagttagaagatcattatccctaatataaaaggaactctcaaaaattaataagaaaaagatcatctaaattttaaaatggaggaaaagaaagatctaaatctaggatataaacaagaaattcaagaagggacacaaatgggcaggcagtaggatggtgattaagatcccaaatttggattataaaattttgggctccagtcccagctctacccatgtaactgtaggtggatttcttaacatctccaagtctgaatttcacctatctttaatctggaagattgtaataattcctactccaaaggcttgttgtgaggattaatttagataatgcgccttatgtggcctcctgccacattggcagaggtagaagtcctgactgtacaagtcctttgacatcatcctagagggtgcattacctggggtgccaggtttcttgtgattgttatttgcttttttgtttttgtcttttaatatgctcagggtttttagttgtgcttagtggaagaaataaggaattgtatatctattccatctttctgaaagtgaagtcacagctatttttttaaatgaggtagagctctgtgtattaatatagacacattttcagtgtattagtatatggaaaaagttgcagaatattttgaatactgtgactccacttttgttcattaaaaactatttgtgggccaggtgaggtggctcacaatgcctgtaatctcagcactttgggaggccttggcgggaggatcacctgagcctgggagttatagaccagcctgggcaacatggtgagaccctgtctctacaaaaataaaaaaattagccaagcatggtggcacacgcctgtaatcccagctactcaggaggctgagctgggaggattgcttgaggctgagaggtcgagactgcagtgagcagttttcatgccactgcgctctagcctgggtgacagagcgagattctgcctccaaaaagcaaaaacaaaacaaagcaaaactgttcccagaagttgcctctgaggagcagaattgaggaggtggtgcattacaattaaagggctcttttaccttcttctttctacacttagtatgtgacttcaaaagaaaagcatgtagagtgttagttttgaagcatgtgttagttttgaaattcaccgtgtttatacatttgtttgcatttgcatagaaaagatagggcaggagattaaccacactagagaaggcggcatggggagggatttttcactttttacttatcattcctctgccattcaaactttttataataatctacacgttacttttatattttaaaaataatataagttcatagtggcctcatttcaaataatgatttaacacatttgaaaaatacattaaaaaaaatcacttgtcattaatgtaagtcattaaggtctgaacacgttaatgacttgaattaatttttctcattttcaaggaaaaatgtattttctacagtgtatagttaggaaagataattttctgcagcttataattaggaaagaaagactgtttatttgcccagatagtacctcatggagggatcaacaattattcttttcatttaccaacgaggcataaatgaaatgtctgagtatattagtgctaaaaaatatttaactactgactccagtgttttctacatgcccacagcttatatctgtcattgtatgttattcttttatagaacttatgagcttttcttgaatggtggtactccttatgaaaaaggtattgaagtggacccttcaatatccagaagaggtatggctctcatgtgttgtcttcctttccttaaagattaaacaaatagaagcatctgagaggtagctacattctaataagcatagcgttttttacttgaattcacacttttaaaaatatgtcatttgatataaaaattttaatcatttttaagtacttattttcttggtaacacatatgagactctaagacatcatgaagaatgaaatcatgaagaatgagaactaatgcattagttccttttcattgaccactgaactgatacttgtgactaatacagagactgcctattgctgggtcaaaggatgcagacatttgaaacagtaatatgcatgccaaattgccctctagaaatattgagcatcttttactatgttcattaaccaggcactgtgctagataatgggagaatgaagagcaagacagatatggtcattgcctcatggggctcagagcctgacagatttggaattccatttccactcctcagccacccctctatttgtttggtgattcaagacatgccacctctgctgaccccacaacgccagtcctgccttcttggaacagaaaggagtttggggtctgggatgcagttggttctacctggagtcagacatgctgttttcctttgtaatctggcagcaataatgctgtaactcatgtgatttagcaaacaatcctgtgcccttagggaggtctctcagctcatttagggtatatggatgactcttgcctttcattcaattcagcactactgggtggtatattttcatgaaatacttgttttattatactcactgtctcaagtacttaaagtttcgtgagttacttttgatttttcttaaaagcacacggcagtgttttctaccagattatgacaatgagaaggcagcctcaacttctagtgaaactgagatccttgaacagaagatcaagaaatgtactaaggtgggtacctgcttttacctgtccagtgaatttgggatcattcagcacttggagaccatctctgcttttggcttttcctcatatttagtcatcttttgttataatatttttgtcctctttaattcttcccccaaaggtcagtagggaaatgggtaacaaagctgaaattagcttactcttctatttactagttagctcttctaaccaaatctgttatttgagccatctagtaaatagaagacttgactaaatggggcttaccaatgcatgattctaccctcagggaacttttttaaatgtcaagtttattgagatataatttacatgcagtaaaatttactctttttagtttataattctttgtgttttgacaaatgtatactgtcatgtaattaccactacaatcaagatagagaactttccctcactctaaaaagttatctcatgcccctttgtagtcagctctgtatccccagcctcaggcaggcacacctattttctttctcagcagttttgctttgtccaaaatgtcatacaaatggaatcataacactcaggagccttttgagtctggcttctttcacttagcctagtgcatttgagacttacccatgccattgcatgtgccagtaatttgttcctttttgttctaaatagtacagactgtccctgacttactcaagatttttcaactttaccatggtgcaaaagcaaaacctgttcagtagacactatacttcagtacagattcaatgaattacatgagatatttatactttattacaaaataggctttgtattagatgattttgcccaactgtaggttaatgtgttatgagcatgtttaaggtaggcctgtctaagctctgatgttcagtagactagttgtaggctgggcatggtggctcacacctataattgcagcactttgggaggtggaggtggtagaatcgcttgaggccaggagttcaagaccagcctgggcaacatggcaagaccccatctctaccaaaaaaaaaaaattagctgggtatggtgatgcacacctgtagtcccagctacttgggaggcttaggtgggaggattgcttgaggattgcttgagcccaagaggttgaggctgcagtgagctgtgatggtgccactgcaccccagcctgggcagcagagtgagaccctgattaaaaaaaaaaaaagtctaagtgtattaaatgcattttcaacttatgatattatcttcaacttatgatattttcaatttatgatgggtttctggggctataacccaccataagttgaggagcatctgaattccctttgatagatatactacaatgtgtttattcattcacaaattgaagggcatttgggttgtttctaggtttgggcaattataaataaagctgctttaaacatttgtgtacaaattttctgcatgtggatatatgtcttcatctctcatgggtataaatacctaggagtgagattactgggacatatggagtttaactttataagaaactgccaaactgttttcatttttctttttctttctttttttttttttttttgagacagagtctggctctgtcccccaggctggagtgcagtggcaccatctcggctcactgcaagctccgcctcccgggttcacgccattttcctgcctcagcctaccgagtagctgggactacaggcgcccgccaccacgccctgctaatttttttgtatttttagtagagacagggtttcaccatgttggccaggatggtctcgaactcctgacctcgtgatccgcccacctcggcctcccaaagtgctaggattacaggcttgagccaccgcatccggccctaccaaactgttttcaaaatgactgtagcactttgcactctcattagcaatgtatgagagttccagttactctatattcttgacagcacttgatatgatcagtttttctgttttggccattctaataaatgagaatagtggtttctcatggtgttttaaatatacattttcctcagggagtttgtaaactaataaaatctcagatctatcagtttctcactcagtaccctcctagactagtcatttaacatctctatcagggtcttaatgtctacatctttaaaatggacataataataataatatcaaccccataaaggtgtaatgaggtttaatggaaagaaaatacataaaacagccagtatttacagtgtgtggcacatggtaactaacacaatagtgttagctataattatttactactataattatcttatatatagataaatgtaaacataaagccaggtagatggtgctatatcataaaatttgttcaaatgaagatgtgtagctggtaaaatcagggggcatttgaaatcacctttgaaggattgggaagatgcagaggaaaggagctccacagaggaggcacaaggccaagagggggaaggaagagcatggcatgggacagagactgttgcagctgaactgtcccaccatgacctgctcattgctcacagattattaagaagtagggaagtcagtgaagacttggcatgctcctgtgaatggtttttctcattccagatcatagtcttagcttaaatatcccttgttcttaccactactactgaaatttattttataattatagtgttaacagttcaatctttcaatagccattaataatgtgttcatgggtattatttactctcttagcttttttcccccttggatgttcatagagcctgtaaatcctcttttttggccagcctttccttggaaaattgttatttttcaagattagaaagaaagcagcacagtagtagtctttgtgaaagaaaacccaaatcttgtttggcctcattcttcctacatctttggcctccccactcctcatcttgttgataagcttccaagagtccggaagcactcccatgtgtatatttcaagtacagctcttaatagtgtttctttggcccccaaatactggttttcagacactttgtatgacctcaagatcaaattggactgtgtggtgcagaagttagcaaggcagccccttcttcttaagcagtgaatgctctactgtatgctgggttcttaaaggtcctgtgtccttgtgctccatacctcaggactgcgtcatttgtttcattacagtacagaataggcacccgaaaaatgtttgtgaaataatttcaaagcagagctctccctgctagtgtgaaaatatactcctcaggacttccgctcagcttccacctgtccctggcctccctctgccttgtcttggtgtgtgctcttccacagagagacttgagtgctggcttgaaattgcctctccactttgcatgaccccaaaatatacattcctgggaatttcaaacgtgagttgggacacactgctggtgcaactccaggctggctcgcacagaaaccagcttatgggcagtgaaacctgggccttgcagcagggctgggggctgtagtcagggggcggggtggggctgtgctgtgggttcaaggtaagagactaggcaccagcctgggcccttttggacatcactgagcctgtgcatcctggaggtggagactgaagcaggactgatccatttcaacatcctctctcctcccctgacccgaaaccttcggtaggtgggagaacaagacgggtaatgacaccaatagtccttctcctcctctccttcaaaggcacgccccgcctctatcctcaccctcccttctttacaaacttcacctttgtttatgcaaacttctctgctcaaaggagaaaggacaggggctctttccattatgccaaaggacatgagacagtggagacaaggccaagggcagaaagcctagttagagtttgcattagtgcccatttttacccagtgcccttgctgtttggctttacactgccctctctgactcagccagcagtcctacacatgtatatcttttggatatcaggaatcctgtgaaaatgtgaattattcggtgtagaccactggcaccagagtcctgctcacggggcttggcagtcttcttttgtggagtaggttgtgatcatggcgaccttgtcaacataagaaaaagagagcaaatagatgcttcagtttcaccaagatttgtcttttggagctatttttcaaaagggtttaacttgatgtgatttgaccaaaagcatgtgtataaacccctgaggagggaaagccctgaatttgacttcagattttcagtgcatgagttctaaatatcaagaaaccctgatctggagaagtaggttgcgtgtgtgtgtgtgtgtgtgtgtgtgtgtaaatttgctataaattcattatccttttttttgatgcattccatcttttttctcctttactttcattatatcgttgctaaaaataaataaggtaataatgttagttgcttgaatgcttgagacccattcattgtgttcattgccagagtttgctggtctacatgtgaattcaggaggaagtatatttttacttacttaattcagctaacctttagcagcccagaactttctattcgtcttaagtttgggaaaatcagatgctttctctaaagaatatctaataaagggcaagcagcattgcttcatgttgtgagaaagtgccagaaggaaaggagtgcccacactgggtggaccaatgcctgccaggcaaagcaggcaggtctacgagaaaaggagagggccaagcagaaggaaggaagttcccacccctttccctggcaaaaccttggctgttcttcatcatgagccctgagtttgggcatgcagctgaaacactgtgcaatgggaccgtggaccaaagggcagaacatgagcatgttgttcatgctcaggtcgttctgccccttgctcatgaacatgtccatggtcccagaacaacccagaatcagagcctgatccctgagaaagcatgtggtgacactgaggcagctgaaatggtcccctgcatcccgtctttaaaatgtaggtcaaatgtatacaagatcagaatttagccaggttgaaaaaagacagtttaaaaaagacagtttctgaccttatgtatcacatgctgtatatcaagataactgtgctaagagaacctgtattatatttttagatgtttctagaaattcaggatttaaagagtggtcaaggatacttctttaattccatgaaacttttttttttattataagttttagggtacatgtgcagaacgtgcaggttagttacatatgtatacatgtgccatgttggtgtgctgcacccattaactcatcatttaacattaggtatatctcctaatgctatccctcccccaccccaccccacaacaggccccggtgtatgatgttccccttcctgtgtccgtgtgttctcattgttcaattcccacctataagtgagaacatgcggtgtttggttttttgtcttgcgatagtttgctgagaatgatggtttccagcttcatccatgtccctacaaaggacatgaactcatcattttttatggctgcatagtattccatggtgtatatgtgccacattttcttaatccagtctatcattgttggacatttgggttggttccaagtctttgctattgtgaatagtgccgcaataaacatacgtgtgcatgtgtctttatagcagcatgatttataatcctttgggtatatacccagtaatgggatggctgggtcaaatggtatttctagttctagatccctgaggaatcaccacactgacttccacaatggttgaactagtttacagtcccaccaacagtgtaaaagtgttcctatttctccacatcctctccagcacctgttgtttcctgactttttaatgatgactgttctacctggtgtgagatggtatctcattgtggttttgatttgcatttctctgatggccagtgatcatgagcattttttcatgtgttttttggctgcataaatgtcttcttttgagaagtgtctgttcatatccttcgcccactttttgatggggttgtttgtttttttcttgtaaatttgtctgagttcactgtagattctgtatattagccctttgtcagatgagtagattgcaacaattttctcccattctgtaggttgcctgttcactctgatggtagtttcttttgctgtgcaggagctctttagtttaattagatcccatttgttaattttggctttggttgccattgcttttggtgttttagacatgaagtccttgcccatgcctatgtcctgaatgagattgcctaggttttcttctagggtttttatggttttaggtctaacatttaagtctttaatccatcttgaattaatttttgtataaggtgtaaggaagggatccagtttcagctttctacatatggctagccagttttcccagcaccatttattaaatagggaatcctttccccattgcttgtttttgtcaggtttgtcaaagatcagatggttgtagatatgcggcattatttctgagggctctgttctgttccataggtctatatctctgttttggtaccagtactgtgctgttttggttactgtagccttgtagtatagtttgaagtcaggtagcgtgatgcctccagctttgttcttttggcttaggattgacttggcaatgcgggctcttttttggttccatgtgaactttaaagtagttttttctaattctgtgaagaaagtcattggtagcttgatggggatggcattgaatctataaattaccttgggcggtatagccattttcacaatattgattcttcctgtccatgagcatggaatgttcttccatttgtttgtatcctcttttatttcattgagcagtggtttgtatttctccttgaagaggtccttcacatcccttgtaagttggattcctaggtattttattctctttgtagcaattgtgaatgggagttcactcatgatttggctctctgtttgtctgttattggtgtataagaatgcttgtgatttttgcacgtggattttgtaccctaagactttgctgaagttgcctatcagcttaaggagattttgggctgagacaatggggttttctagatatacaatcatgtcatctgcaaacagggacaatttgacttcctcttttcctaattgaataccctttatttccttctcctgcctgattgccctggtcggaacttccaacactatgttgaataggagtggtgagagaggacatccctgtcttgtgccagttttcaaagggaatgcttccagtttttgtccattcattatgatattggctgtgcgtttgtcatagatagctcttattattttgagatacgtcccatcaatacctaatttattgagagtttttagcatgaagggatgttgaattttgtcaaaggccttttctgcatctattgagataatcatgtggtttttgtcattggttctgtttatatgctggattacatttattgatttgcatatgttgaaccagtcttgcatcccagggatgaagcccacttgatcatggtggataagctttttgatgcattccatgaagcttaattactcgtggaatccattgctgtcacctcatcacagtggtcacattcatcctgttctcttccaacaggctggaagcctgaatattacctctgtgataattttcccttctaaaaatctaatcttaggaattaagataaaggattaatttacaaaaagtaagatctctttttaaatctttggtgatttttctcagcccaaagacatcttccttttgatagaagacaacatatcatttgtaaggtttttgagattttctatatggtccttcctcatgcttaatgacagagtttatatatttctaaaaatagtattagaaatatatattagaatgatctaagatattttcttgagtactttcaaaggttaaatcttgtgcatgatacattcccagtatttactatacatcatgtgtgagggtcttaaagaactcacttttttttttttttttttttttttttttgagacggggtctcgctgtgtctcccaggttggagtgcggtggcgcaatctcggctcactgcaagctccgcctcccgggttcacgccattctcctgcctcagcctcccaagtagctgggactacaggcgcctgccaacacgcccagctaattttttgtatttttagtagaaacggggtttcaccgtgttagccaagatggaagaactcacttttcatgtttccagattattattttgaaatctaaatattgaaattttttatatttttaaatttctgactattttttgatgctattgtaaattgttttgttggtttccttctcaaattgtgcattgttagtgtataaagtacgatttttacgtgttgattttgtattctgcaactttgctagtcatttattctgaaggtatttttcatggagtatttagggttttctacatatattctacatatttctacatcattttgtctgcaaacaaagacacttttctttttttagaaaaatatttccattattgtgttgagtaaaagtggcaggagcaggatccttgtcttgttccttatcttagaggaaaagctttcagtgtttcaccactgagtatgatgttagctgtgggcttttcatatatggcctttattatgttgcagtagtttctttctattcctagtttgttgagtgtttttatcatgaaagggtgtcaaattttaggctttctcagcatcaattgagaaaataatgtgggtttttccccttaattctgttaatgtagcacattatgttgattgatttttggatgttgagccatccttgaatttcattaataaatttgacttggtcatggtgtacaagctttttaatgtgctgttgaattcactttgctagtattttgttgaggattttgcatcaatattcaggaatattggcctgtagtttttttttttttttcttgtagtattgttggcttttttactagggtaattctgacctcataatgagtttgatagtgttttttcctcttcattttttggaaaagtttgaggaaaattggtgttaattcttctttaaaggtttggtagaattctccagtgaagccatctgatgctgggcttttctttatcaggagattttttaaattactgattcaatctccttacttgttattgagattttctatttctttgtgattcagccttagtaggttgtgtatttctagaaatgtgcctgtttcatttaggtcatccaacttgttggcatacaactatttatagtactctcttacacattttttatttctgtaaaatcaatagtaatatcccctctttcatttctgattttagttgagtgttccttagtcattctcactaaaggtttgtcaattttgttcatcttttcaaagaacagagtcttgctttcattgattttctctattgtttttctattctttattttgtctatatctgacctaatctttattatttcttccttctgctagttttgttcttctagttccttagggcataaagttaggttgttgacttgagctcttccttcttttttaatgttaagtatttatagctataaatttccctcttaggactgttttcactgtatcttgtaaattttggtatgttgtgttttcatttcatttctcaagatattttctagtttctcttgagatttcttctttgagccattgttgtttaagtatgttgtttaatttccacatatttatgtgttttccagttttccttctgcttttgatttctagtttcatttcattatgattgaaaaaagatattttgtatgatttcaatatttttaaatttattaagacttactttgtgactcaacatatggtctttcctggagaatatgtcatgtgcacttgagaaaaatgtgtattctgctgttgccgggtagagtgttttgtaaatgtcagctagatccaattagtctacagtgttattgatcttctgtttcattgttctataccttatcgaaagtaggatattgaaatcttctctattattatagatctatgtattgctcccttcaattctgtcagtgtttgcttcatatatttaggagcactgatgtttggtgcatatatgtttataattgttatatattctgaattgactgttttatgattgtacaatatcctttgtctcttgtaacttttggggggcttgaagtctattttgtctgatattaatatggctaaacatgttctcttttagttgctatttgcatgaaattttttttctgttctttcactttctacccatgagtgtcctaagtctaccgtgagtctcttatagataacatataattaaatcgtgtttttttagtgcatcctgccaatctgtatcttttgattgaggagtctaatttatttacatttaaagtgattactaatagagaaggacttacttttgccattttattactcatttgctgcttatcttatagctttttttgttcttaatttcctccctcactgattttctttgtgtttgatttttcatagtgacaaattttgattcccttttactttccatttgaaaatattctatagttattttctttgtggttaccatggtattacatataacatcctaaagttataacaatctattttaaactaataccaacttaacttggtattgcatacaacatccttaggttatagcagtctatcttaaactgataccaatttaacttcgatgttgaattattttctattttttagcccttactgtataccagacactacattaagcactccatacttatttcatttgttgttgttgttttgttttgagacagagtcttgctgtgtcacccaggttggagtgcagtggcacaatcttggctcatggcaacatccaccgcccaggctcaagggattcttctgccttggcctctgagtagctgggattacaggtgcccgccaccaaacctggctaatttttgtattttcagcagagatatggtttcaccatgttggccaggctggtctcaaactcctgacctcaagtgattcacctgtctcggcctcccaaagtgttaggattacaggtgtgagccaccatgcccagcccacacttacttcattttaatccttttagtaaccttctgaaatgcaagtattactattggtatccaataaatgaggaaaccaaagcacaaggagatgaattaattaatttaaagtcacatagctaagaagtgacaaagtcaggacttattccaggtctgtcacaccctcccatgttccacccagtactgtgaacagcctgaattatttcttctgcattcaccaaatcaggcatggcagccacatgcctttgttaaagcttgtagctgactagtccccttctttccaaaacataattagtggcttcccgtttttatttgacatttaacataggtatatatgctaacatggaagcacaaaaatggcaacacagggttgagactcgaaagtgtaaacaaatataaaaagttatctgaaatttaatgtggcctacttgtagtagaaatttttctttaaatagttaaaaatgtgttccagtaatgaagcaaaatttgggactgtttattaaagtaatatacatcaaaacattataagttggattgtaggggattgtctaatgaatacatttttttcttctttaatagtctactgccagaaacattaattggaaatatgtgttctattcacttgttgatattttatcgacaaattcttggagatgtgctcctgaaagacaggatgagcttgcaaagtactggtaagtgggctttgccacttccttatgtgcagtaatgcttcatactctgagtaaaggtaacctataccatcttgtatcttctgtttctggttgtgacttttggaataaaatatttagaacagcattgatgttaatacattacttatgggacatcttcagatccaaagcattgagctttgtgaactcgacacatattcagttctttcaaacatatgtattttcacatttcaaattctagagttttgagatcccaagagtcagatatagtcatattttcccttaatgtctctgagtaatctgttttttcccatgtgtttggtatgcacataatcattttgaagagaaaccaaaatcaaccaaaatagctggttcttagtgcatgaagtataagtatcaaatggattagtttaaattggtgaatccagatatggagtatttgggtgtcctatgtactgtctttattcttgcaacttttttgtacgtttgaaatttttaccaagtaaaatgttaaaaaataagtttaaaaatcaatgagtcaccatacatgattgaacctgcaaagataaatgcatgtgttatagtaattgccttcaaaaagaaaagcagtttaattgtattggctcttctttcagttcaataaatcagtaaccagatatgtactgagtacctggtatgtgccagatattatgctaggcccagtgatgaatgagacaggcataggcgtcccaggcctcaaacacataatttcatgaataatcctctccacccttttgaaataagtgctgtgaaggaaaatacacaacgagaacatgcactgggaagacttgattaatgtgtagggtaaggaaaggcttctttgagtgagtaatatttaacaaaagatgtgagagaggaattagacctatgagggaagtgtgtggggaaggattctttctgggtagaggggccagcatgtctgaagacccaaggaaagaagacatgcatgtgttggagggcttgaaattgaggcaggccagtatggatggagcagagtgagtgagaggcttagcacttgtggacaaataacattcataggcaggagtcctctcccagggacttatcacctggatagataggtagaagtggaactcaaaggcagagaagcgcagaaagttctcaaggaatcattataactctaagggggaggacgggtaagccttttaatcaccattgcctttgaattcattttcatgactcttgagaaacttcatgaatgatgtgacctcttaaagaggataaggcttgttagttttcccaataggtaagaagtttactcagaattgttgacttcatttgaatttaatcattagaataaaatatcctaataatatctaaagaatgaatttttctctactgaggacaccagattatagaataccttgcccttgccatttcaaaagtgtctgctatggtttcagtgtgtcccatctaaaattcatgttaccaatgtaatggtattgaaaagtggggcctttgagtggcgattaggccatgagggctgttgccttatgaatgggattagagacccttacagaagggcttgacaagggaattcgtctcacccttttgccttcagccacgtgatggcacagtgttcctcccctctggaggatgttgtaagaaggcccttaccagacaccaaatgccattaccttgatcttggatttcccagcctccagaacttggagaaataattttattttgtttatgttacccagtctcaggtattccactacagcagcgcaaacagactaagacatgtctttcctgatgtgcttctttgcacagatttttcatgtgctgttatctattgtgaaatgtcaatattctccctcactgtgtttggtcatatggccagaatcctcaattcctaattcttccagtttcacctaccactgtctgctggctccagacacaagtttgggtccttccctgagcgctggtggcctggaatcagacctgagcagcaggtcctctgtctcctttccccccaatgcttcctagtttctgctcagtctcccaagagcagggctacctctaaggggaagattccttttaccatgccacagccataaggaagaaagagaagttgaagaaaaacacagaacaaaattttctagtcttattctgttcagagcctccttgcccttactctaaaagctccattaatttggtacaggaactcaccaggatatgggtataggggcaaatgaaggttgaagggacagctttgagctctcctagaagtcaaagtgtgtagaatgtgttatcaacaaatcatttggcacaataattttcatctgaatatttttgtgtctattgcaataaaatccattgagtgaagtttgcataaaattctttctgttgttttgcatttcagatttaattagccatcccatgctggccaccttccccatgctcttggagcagcctgatgtgatggatgctctcagggtgggtagcatgcattgcaatggaaacctgctggcttatggaagcagttatacactctgtgttaatgagttctgtctaggcctttttttttgttactaggatgatgtctcccaatccctatccattgtctaggtaactcagtcctcatctttcccatcttagcataaattcccaagggctgccttccctgacccagggagcaggtggagtgcctgctatgtacactattgcaatctttgcccattttttccttgacttaggatggccactgattgtgtcctaagagcaaaaatccaaaatggtctgtaagataaatcaattgaatttgcaggggagaatcagggcatgcacatcatctttaattccatgtgtgctgtttgctgtctgaaataactgttgagtgttatgttaaatcgtatgaaatctccaattttcagccatttttggcctaagtggcagtttcatatggtttagcctaatacatcagggtcaataagtagaagagctgcatgcatgcaaggcagatacacaggtaacatcacaagtgccatgggggaggtataacccaggaccttgaagatttaaagaaggcagcaaagaaggatccaaattctgtttcactagagaggtcctgcatgagagagcctaataaaggccagggccaagaggattttgacctgctgagatgggggtgaagacgttgcaggtagaaggcttagcatgagcagacgtttgaggcaggaaggaatagagctgacagtccagcttggcatgtcagatgcaagtaagggagtggttggtagatgggcaaggtaagcctgagtctcggtgtggggctgagggcggtggtaggtggtgggtaacccaggaaggtttcttctttaggcaaactctgccaagtgcaaagaggcagaacatgtgcaggagggaggtgagcatattagggggtgactcctgctgataaaaactaggccatatgcacctgacagcagaaacagaaggaggactcagtcatctacaaagattcttattagactttgaaaccaattcatatgctagcttggctgggttggggggtgtcaatagtaataatgacattttcaacagagatgtttaagaaaatgttcatggtacatatgatctcctgtaattttagataagttcgtctggcactatagctagataatgcagaatttctctttcttctcctataaagtcactagtatcataataattattcattacacagaacatatatacactgattcttcaacaaagatttcacaagagcctactatgtattaatataaggcactgtgctggccacaggaatatttccctaggtgtgtaacaggaatctgcaccttgttcttaggaggaaacttaggatccctaatctagtctaaaatctgcatttccctgatgagcagacagcttggagatgtgcagtgacttggccggccatggagctcagccatgacccagccggggctgtccctgcgggtcagctctgggtgcacccagaatgtgccacgggctgcttgaaagcatgagggtaaagttgtgcacatatgttatttagcaaaaagaccccatttgagccataataagtataaatatatatacatttatatacctgcctgtgaaaagatctggaagaatatattccagagaggtattggtgaatatctctggatcttggattattttatctacattttcttaattttttcacattgaattatttgtgttatgataattttaaaaaagaaagtggtggttgtttctacacccatgagccttcttctctccgtggcatagtgtattacttaggagaagcttggctgtgctgtggtggttagcacaggtttatttcttacccatggtatgtatccagcatggatcagtggaagatgctgctccacagtcacccaagggtacaggctggtggagcctctactgtctcacagcaccatctggaacaagtagctgcctctgttgccagtttccctgcagaagagggagaatggagaattgttcttgggctttcactgcctttgcttcaaaggggcctgggccacttctgctcacattgcattggccaaaaccagtcacacggtccatttaacttcaaaggaggtatagtcttctttttgttccagaagaaaggaagtggatcttggtgaggtaatagtgacctttaacacgtttgctattcccaaatgagttactctaagtgaaacatcctactatttgctggtggctgaatgaaaaataaggtgggacattgacatgtaactaacaaaaatagacaaattttaccagacactaagtctacatttgctaagtgatactcacgttaaaccatattattaggttggtgcaagagaactgtggtttttgccataaaagtagtagcaaaaaccacaattacttttgcaccaactgaataaaatttaaaatgtacagcatgtgagcctcctagagtttacttacctagcacagttcagtttgtggatgacattttaataataagaagaatggcacttggcctgtttagtaaaacactctggttctgtaagggtcctcttcaaactcctaaggacccatagcacagcagttaatagggtggaggaccatagtcccctcacgtggtaataggtatgaacattccaaaatgttctcatgagtggcatagtctgttatctcctgctgagaaacgctctatcaatgcatcatttattttatggagaatctctttattggtgccatatgttatgttcatcccagggcctccctgctgagaaaggtctgatgctttcaggttactcatgatatcaggtgccaacaggaggatatctactgacatgcacagaacccagaccctggaacaggcagccgtgagactggtcatattccacccacgcattcagtttgccaggaaatggcacagtgaaagtcttaaattcatacttctgtgggactaattgaactctggggtttttatttatttgaggaaatttctgtgaagccctgtggacagattagaaatatttactcacaaaattgtacttcagtctgtctcattctgaccattgtcatcatcatgacagagagaattgtagaaaagtttggtatttggcagtgttttctattttcattactgtcttacttggaaagcttaatactattttattattcaggtgctgtggttgtatagttttcatggatgtgttagtgtttcgctgattctattcttaagttagttttgatttataattatcatgggcttctacggcatttttcacagatacatctgcctggtcattctggtgctgggtcatttgcaatagattcctaattacagattcacttcttgcttgtatagaatctgtacagcatttttaaccctgtccataagtttatttacagagtaaatttgcataagtgttgcaaggacttgttactacttggactaacataatatttctgtttgctctttagagttcgtgggctggaaaagaaagcacattaaaaagatcagagaaggtaaaatatgagtctccacactgaactccatatttgcagtacctggtgtttgcttgcctattctaatcatgtctcttttttagcaaaagtagccatagtcataatccctcttaaccagggaaactgtttcattatggctgcaaaaacacattccaagagggttacgcatgatcgttagctaatgtgagaaggaatacttgttcaagacagccatttcagattactgagttttatttaaataaaggggaagtttctaagccaaagtctctcagttgtgtatcaaatttcttttatttttaaaaaacttctctagctctcaaagcctgtatcaccaagagaagggaaaaaaaaatggcctgagctgtaccatatattgaaaacaatgcattgctcctgcttaccttgctataaaatcatggtaattaccaatccgaacttgctttaatcggtgagtcgtggtttgactgctctcatccaggatttggcaaatgggaagggctatagatggaaaatcttcttggcttttcaggtcttgtggtctctgtcacactactcagctctggtgttgtaacacaaaagcagccacagacaatatgtaaatgaccaaatgtgactgttttcctataaaactttatttatgaaaagaggtgagagtccacatttggcccacagtccatactttaccagtcctgatctaaagtattcattatctacaaggaaaatgaagtaacaaatgagctgaaaaccctaaaaattaggaaacaatttatacattgtatccttatttcagcctccatttgatcagtaccatctacatacatgtgactttgccaaaactgccaggcttagtgctattctagtacagcagccttgggcctgtagacattgcccttatgtggacatgtgtggtgggatgggtgatatctctgtgtagactctgctgcctgtggacagctctgccctcaacttgctgtgctctctgagattcccaccatggcctgtgggcatcggggcttgacatgggtacagctgatgctgcaccattcttatctgtgaagggtctgacatcctcatcaccaaaggacccctcgacctccatcccaggcattgctggaaataagccaacaactctggatcctatgcagaacacctgctacaattatcttagataacatgacagttacctctgatatgctgtcagtaagtaggttcagctgacttggcattgttttagttatatttacccctaaccacactggtgtcaccaaaattagactgcaataccttgacagaatgtgtgagacaccctccatggagcttaggagacaccctggtctcatggagccacgtagaggctctcagggagaactgctccactgtactctgtgtaactctgctcacttccacttctgaagtgccatgtcctgcctgagcagctggctcagagccgatacctgccaggcactaatggcaccctccatcctacctcttaggtggcttttagttaatagagttcacagaatttaacactttaaaaataacaatgttatttgtgggggtggtgttttcccagagagacaaagagttcctgaagtccacgtttctcctggtttaccatgactgcgtgctcccacttctccactccacacgcctacccccattcaggtgggcagaagaagagactgagactgcacggtggaaagttatcactgacttccttaagcaaaaccaagaaaaccagggcgccctccaagctctgctgtcaccagacggagttcatgaaccttttgacctttcagagcagacctatgacttcttgggtgaaatgagaaagaatgcagtgtgacagtggcagcctctagccctcagcttcccacggaatcagatggatcctccacgattacgtgaataaaatgatggaaccaaaaatcactgtcactttacaacttaggttttactcttttctttctacagaccatatttttaaagaaatgtttatacaataatttaaatattttttaaaaccataaaataaatttttataaggaatactgttatatctaaatttaaacagtatttattttttcaaaaacagctacttaagttaatggtatagatttctataaaagcaagattttgtcaaaaactaaatttatgattattcaagaaagtgaaaaaaacaacctacagaatgggaaaacatatttgcaaatcatctaactgataaaggtctagtatccaaaatatttaaatttatgagtgttaataaaatttatcttgttcaatgaagaggaagttaaagtgatccatttgagaaagttgtatcacttaattcagtctgatacttgaatgtgatttacccctaattaagtacaaaaacagagtcgcttttgccttttcaaatcaagaaaataagtgctctgtcaaaagcacaaaaagaaactttcaggcactggagagtggagtcgactcaccctttcaggccttgttgcatctcagataaacctgtgactgctggtaaaataatgtcccaagcctttccttttagtgataaacagtagcagcctgcgttaattgagcacctactgtgtgtctgagcatttctcattagcccagttaatcctcacacctactgtaggagataggtactgttgttttttattaccgccgaagaaacaggccagataagtgaagtaatttgcctaaggtcacagctaataagtggcacagctaatattcccagtaaagataccatgtataattttctacaacctaagatgttctgccttatcggggcgaaccttttaggattccatgtgaaaataaaatatgaggaaaagtttaacctaaataattagaatcccattagaggtacttttttttgatggcatgctgccttaaaagagccatttatttttagagatctgtcatattatgaaagttctgggctatcttagctaacttatcctaaacccttaacctaaatttaacttgagccccagtctcagaaattaacatggtatgaaggtgtttccaggccaggcgcggtggctcacgcctgtaatcccaacactttgggaggccgaggtgggtggatcacctgaggtcaggagtttgagaccagcctggccaacactatctgtactaaaaacacaaaattagctgggcgtggtagtgcgtgcctgtaatcccagctacttgggaggctgaggtagaagaattgtttgaacctgggaggtggaggttgcagtgagccaagatcgtgccattgcactccagcctaggcaacaagagtgaaactccatctcaaaaaaaaaaaaaaaaaa

SEQ ID NO: 1225 - DNA, 15305 bp, Homo sapiens
acactccctggggcaggcgctcacgcacgctacaaacacacactcctctttcctccctcgcgcgccctctctcatccttcttcacgaagcgctcactcgcaccctttctctctctctctctctctctctaacacgcacgcacactcccagttgttcacactcgggtcctctccagcccgacgttctcctggcacccacctgctccgcggcgccctgcgcgcccccctcggtcgcgccccttgcgctctcggcccagaccgtcgcagctacagggggcctcgagccccggggtgagcgtccccgtcccgctcctgctccttcccatagggacgcgcctgatgcctgggaccggccgctgagcccaaggggaccgaggaggccatggtaggagcgctcgcctgctgcggtgcccgctgaggccatgccggggccccggcgccccgctggctcccgcctgcgcctgctcctgctcctgctgctgccgccgctgctgctgctgctccggggcagccacgcgggcaacctgacggtagccgtggtactgccgctggccaatacctcgtacccctggtcgtgggcgcgcgtgggacccgccgtggagctggccctggcccaggtgaaggcgcgccccgacttgctgccgggctggacggtccgcacggtgctgggcagcagcgaaaacgcgctgggcgtctgctccgacaccgcagcgcccctggccgcggtggacctcaagtgggagcacaaccccgctgtgttcctgggccccggctgcgtgtacgccgccgccccagtggggcgcttcaccgcgcactggcgggtcccgctgctgaccgccggcgccccggcgctgggcttcggtgtcaaggacgagtatgcgctgaccacccgcgcggggcccagctacgccaagctgggggacttcgtggcggcgctgcaccgacggctgggctgggagcgccaagcgctcatgctctacgcctaccggccgggtgacgaagagcactgcttcttcctcgtggaggggctgttcatgcgggtccgcgaccgcctcaatattacggtggaccacctggagttcgccgaggacgacctcagccactacaccaggctgctgcggaccatgccgcgcaaaggccgaggtgagacgctggcacaccccgtcccgccgcttagccgcagggcctcccctctgacctgccggaggcatcgggactttctctctcatctgggggcactcttctttctcctcgccgttcttcattctactttcagctccctggccctttctacagctgagtttctatttccctctcttcttccgccacccccaccacgtctctatcctctcatctccccgacccccactcattccctcccaccctagcacagctcggttccggtccctttttccctcccacattttctctcttccctatagccttctcccttctttcatcctctcctctcattgcgcctcatcccctctcttctccccctccctctccctcctctctccctcctggccccatccttctccaccttcagctccactatccccctctccctacccgttccttcctcccttccgcctcccccttcctcctcccgcccaccgccccgcacccgcccgttccacccttcgactttctcctgctgtggcctaggctgagccgggagttaccacttaactctcactgggtctctcctgcaccctatctctaaacttcctcccttgggtgccccagctttcctactcctgtctctcccgcagtacctaggcttctctctctgactctccgtctttctccagttatctacatctgcagctcccctgatgccttcagaaccctcatgctcctggccctggaagctggcttgtgtggggaggactacgttttcttccacctggatatctttgggcaaagcctgcaaggtggacagggccctgctccccgcaggccctgggagagaggggatgggcaggatgtcagtgcccgccaggcctttcaggtgagtacctaggtttgaagcccaggctgtctcagcttgtggcacatcatttctgggcactgtgtccctcagcgtctgaaagaattccagaaaagaggtttttgtctgtttgtttctttatgcactcctggtaactcacagaacagaaaagaggttggtgatgctcactgggaattaggcaatgaagggcaggggactgcccaggggcgcttcgccaccagcaggctaaaaagataagaaaatgggcttgaggcgggaggaggataaagtcccacagcctggacaggacttggagaaggcatcccattggatcccctgctttggaatgggcatcacttcatgcagggcatagggtccagtttgaccttgagctaagcagagacgcagctctgggaggtgggctcccaactgttggggccccacagtactagggaatagtcagctcccaactctctgctctccactgacccctttctcaggctgccaaaatcattacatataaagacccagataatcccgagtacttggaattcctgaagcagttaaaacacctggcctatgagcagttcaacttcaccatggaggatggcctggtaagaaggggtcccgggaccctccagcgtggacctccagcccccactccatgaccctctgccagcctccatccttccctattcccagttctccccttccttccctcccttcccattgttccatgtttctcgtgatgatggaggaggacactggcaagttcagcctctgaaactcaggtcatcatcagtaatatggagacgatacatcctgccctgtctacctagtaggattcaggaagtgatgctaatccaaaggcatcgtttaaatagtaaaatctccctgtgatataggggtgttattttctcccatcctcttccaaaatcccagtgcctcttgttcccttccccacagctcccacctccatgcccttcatatgcccaccccagccgacctctgtttgcccctacaggtgaacaccatcccagcatccttccacgacgggctcctgctctatatccaggcagtgacggagactctggcacatgggggaactgttactgatggggagaacatcactcagcggatgtggaaccgaagctttcaaggtcagggcctggaggtggctggaatgggctgccttgggggatgaatcccaggtgcccagtgtcaagccatgagaagcctattgtcctgcagcagttacctatgcacaccagccttttcctccacagcttttttcaggcccatccctcagaagtcctacaaagtgtccaatctcaatcatccctgctgggcactgagttcttttacctttctttttcttttttcttttttttttgagatggagtctcgctctgtccccaagactggagtgtggtggtgcaatctcggctcacttcaacctccgcctcccaggttcaagcaattctcctgcctcagcctcctgagtagctgggattacaggtgccctccaccaacacttggctaattttttgtattttttttagtagagacagggtttcaccacgttggtcaggctggtcttgaactcctgacgtcaggtgatctgcccgcctcagcctcccaaagtgctgggattacaagcatgagccacagtgcccggccgttttaccatttactatcattctgtatacatgtatgtttggaaggcaaggcaaaaaagattagaggatgaagagatgaagtggggcacccctgaacttctattctctcaaacatagtcatcttcccccatgtcctcaggtgtgacaggatacctgaaaattgatagcagtggcgatcgggaaacagacttctccctctgggatatggatcccgagaatggtgccttcagggtaagtttgtgcacccagaagacagtgccaattccaaatgacatctcaccctcctacttcccccccacagccctgccagggcacctgtttatcctgtagccattccaccatgcctggacacttacaagagccctggataaaacagacccagctccagtctggggaagccaccagaatgatagggactcacaggcatcacacttggggagccccatgcctgaggagggagcacaagcctgccctcggggagctccgaagggaggcaggcaggaccgcctcccagcagagacagggctgtgaaagatgcacattacacagctctgcaagcgagcagggacaggaaggcgctgaggccaatggccacaagggacaggtcatccagagaaggcctcctggaagacgggcacatggactgggcctgcgaatgtaggctaaggtgaacattaccttctcctgttttctaccaagaaaataagtagagaaaaatcaatgcttggttggtacttcaaccaagattataaactccctgagtgtagagatcgggttctaaatggagttttctttataaaccccttgatagttttcaggtgtttccacttgagtactatgtgtgtggtatgaggtcctgtgtccagttgcagtggggacttggtaagcaggtgacaacccagatatatatgtaggctctagaagcagagctggggtaggtgggaggtgagactgctgcactcacagcatgccttccccgcaggccctggcctagccaccactcctgctctcccttaggttgtactgaactacaatgggacttcccaagagctggtggctgtgtcggggcgcaaactgaactggcccctggggtaccctcctcctgacatccccaaatgtggctttgacaacgaagacccagcatgcaaccaaggtgactgccccttgccttccaggcctccatcccagagatgctgcatccttcccctaagcacagtcgagtaggtgctcctgtcccatgctgagggctttctggagaatgactcctgcctttttcttcccttcatccatcatcccagttcactgatggactattagaaagttcttcctcctgctgtctaacccaaatctctcttgctgcaatatggactctctcctgcagatcacctttccaccctggaggtgctggctttggtgggcagcctctccttgctcggcattctgattgtctccttcttcatatacaggtgagctgtgatgtggggggttgagtgaggctgggggacccggagaaccaatagcagaggaggcggtggggacccagagggaagagggcaggggtgaaggggcaccaggggaaaaccaagggagatgaggaagaaaggaggcttaaaagccagaggagaaagaaagagaagggaatggcagggcgaggggaggagacaaggataggaatggccaaggagagtcagaaagatccaagaagcagagaagttgatgggtgacatcataggggcgtggactggttttccttgctactcttgcaggccagataggaagcaactttctgaacctttgcaatcatgcccatgttagctgaggagggtgagccctggtgtgtgccaggtgcccaacctagaatggagaagggagctgaatgagccttgttcctgccgtccagtggaggctaaaatgaagtacaggaggagttaatgatatacaaaagcaaggagggaggggagaaaaatcactgctggttgagcatataatgtgtgccaggcacttccacgtacactatttctttctttcttttttttttttttttttttttttgagacggagtctcgctctgttgccagactggagtgcagtggcatgatctaggctcactgcaacctccgcctcccagtttcaagcaattctcctgcctcagcctcccatgtagctgggactacaggcacatgccaccacgctcagctaatttttgtatttttagtagagacagggtttcaccatgttggccaggatggtctcgatctcttgacctcatgatccacccaccttggcctcccaaagtgctgggattacaggcatgagccactgtgcctggcctcatgttcactatttcttttcattcttataatagttaagaatgaaatagatattgcggcctcattcccaagtaaggacattgaggtgattcccccaaggtccccagtaaggcagaatttcccccagccatcctgattctcagtccagaggatagaattccccctccatctctgagtgcatggtgtggtcccacggctctgaggaggggctgctgagcaccctgccctgggtcagcggctcagccacaggctcagatgcagccttcgtatcccaggaagatgcagctggagaaggaactggcctcggagctgtggcgggtgcgctgggaggacgttgagcccagtagccttgagaggcacctgcggagtgcaggcagccggctgaccctgagcggggtaagaacgctggtgtttgtgttggggggcaataaaggagaggtgggtacaaggggcagtgcctgagggataggtaagggagcaggattctagtcccagctctgctttcacttgctgtgtgaccttgagcgactcatagtccctctccgagactgtctcagatgatgattacagcagcagagcctccctcacagggctcttttaaaggtcagaggagatagtacctgtgaaaacactttaaaaaaaaaaaaagtaaatgaggaggaaattttatgatgtggaacataaagcagggtgggccaggcacagtggctcacatctgcaatcccagcactttgggagaccgaggcaggaggattgcttgtgcctgggagttcaagaccagcctgggcaacagagcaagacatcgtctctacaaagaatacaaagattagcagggcatggtggcgcatacctgtagtcccagctactctggaggctgaggtgaaaggatcatctgagcccaggagtctgaggcggcagtgacctaggatagcaccactgcactccagcctggatgacacaatgatactacatctcaaaaaaaaacccaacaacaaaaaggaagggtgacacaaagataaggcaggataaggcagggaaataaagaccagagcacaagcaatcaggatgcagactgggcccaccggctgaccattcctcctgctctccctcctttcagagaggctccaattacggctccctgctaaccacagagggccagttccaagtctttgccaagacagcatattataaggtgggcctggggaaagatcactgggccttgggactggggcaggagtgtactctgatggaggactggtggggggttctgagggaaggagtaagctggtggggagcagcagatgggggccctgggggtgggctattgggaacaagtgagggtcctgagggcagggatgggctgtcgggagcagctggaattcccaggacatgggaccatgctcttcacagtgacagtctccattccatgcccagggcaacctcgtggctgtgaaacgtgtgaaccgtaaacgcattgagctgacacgaaaagtcctgtttgaactgaagcatgtaatgtggggagtgaggcagtggcatggagaaggggccctcggggacgcaagggagactggccaacagaactagttatggagggacctcagggtaccccaagaaaggggcagggactggagccctgggatggaccttcatcttgtgggtgggagtgggggtatcctaagctaggagaagagaccactggagataacctggaggaatcttgaggggccatatgtgatgtccctgggggagagagggcttaggatgcagagggagtaggagcagattctggggagggtgggctaaaggacatgggtgggaatcaccagggaagatcttagtgatggttgcagaaagtgaataaggagttaagaagagtgagggtccctgaagctagtgagcagcttggtgaggagcgaggtctctgtcaagctcctgatgctggtcccacttgcagatgcgggatgtgcagaatgaacacctgaccaggtttgtgggagcctgcaccgacccccccaatatctgcatcctcacagagtactgtccccgtgggagcctgcaggtgagggggacaaggggtgtcaagaaacctgggttctagccctggctctgcccctgactggccataagaccccaggcatgcctcgccctctttctgacctttctggccccatctgtaaaaatgggagttggggaagggcagtggcactagagtcaatccaaagttttgtcctgttctaccagttcacatcagtaggaccctgcaccctcctccaactcccagggggatctgcaggggattggtctgactcttattgccccagcaggacattctggagaatgagagcatcaccctggactggatgttccggtactcactcaccaatgacatcgtcaaggtatgcccctaagcacctattggatgtgtagagcaggggccaggcatgcttctcctggccacgggtgtaggtcccactcctggccaatacctctgcccactcacatttccagggcatgctgtttctacacaatggggctatctgttcccatgggaacctcaagtcatccaactgcgtggtagatgggcgctttgtgctcaagatcaccgactatgggctggagagcttcagggacctggacccagagcaaggacacaccgtttatgccagtgagccttgactcttgaacctaacacctgcccccagcaccacccagtagggagactgatgcaaggcctctgatgggcttgggcatgcttgtcctgactccagcctcaattcattcacccatgaaaaagggaaggccagacgaagtggtttctaaggcctcctctagctctaacactctgtgatgcatccagatcagtttcggccacacccttgtttccccctcaccccttagctttgggctccctcactcggtgactaccgacctctgacccacagaaaagctgtggacggcccctgagctcctgcgaatggcttcaccccctgtgcggggctcccaggctggtgacgtatacagctttgggatcatccttcaggagattgccctgaggagtggggtcttccacgtggaaggtttggacctgagccccaaaggtgagaggagcacaccttccttaaacccagccacagtctcaacgaaccccagccccagggagagggtcccctggcagcaccaccacaccttccttctgtaatggggttcagtcaccaccctttgacccattgctgccagtgaccagtcccccgcccccatgccttggtcttggacttcccctgccatctcagctggttgccccagtctctcactaggcccttggccagccccacccctcagctcctctacccccccaatacagagatcatcgagcgggtgactcggggtgagcagccccccttccggccctccctggccctgcagagtcacctggaggagttggggctgctcatgcagcggtgctgggctgaggacccacaggagaggccaccattccagcagatccgcctgacgttgcgcaaatttaacaggtccctggtgtttgtcatggatcccccaggcccttcctccacagccaccatttacctaatgcttctggctctggcttatcccagcagtggcagagggagaccactcacctcctccctgtacatagtcagctccagctcagcacagcctcatgaccctcttcgcaagtacagcatgactcagctgtccccacagtcccctgccattcatgccccttccctccaccatcgacaccccacacccttcctgcccactcgccttgctggcctctagacttctcagcagtgtgtaggatagatgggcctcccgcctcctgccctgtaggctcttggccctccacgggagctcctgccccaccccttgatttcccttccccagcgtgcccaccaggcccagttcctccagacacacccttctgtggacatcactttgtccgcaattgacccttgtcattctccacctcctttacctccttctaactcactgggttcaacaaagatgaacaaaatgtccatatgtctgaagcttcatacttgaccttggggtctcagaaaagaattgaactttcttccttctgttttcccctgctccccggtatcctgctatgccctcaaccctgagcgtctctagagacctcactgcagtctggagggggaagtgcctaggggcgggcgctcacggtaggctgtgctgctcctctcttaccacccccaccgccaccctctgcccccagggagaacagcagcaacatcctggacaacctgctgtcccgcatggagcagtacgcgaacaatctggaggaactggtggaggagcggacccaggcatacctggaggagaagcgcaaggctgaggccctgctctaccagatcctgcctcagtgagtgcctgagtctggggaccccccccaacacaaagcccctgtcccgacccccaactctgatcctgcacctgccctgaccccttagctcagtggctgagcagctgaagcgtggggagacggtgcaggccgaagcctttgacagtgttaccatctacttcagtgacattgtgggtttcacagcgctgtcggcggagagcacacccatgcaggtaggccagggttcagccacaggtgccaggcaagctcagcatctggatcccaccagacctgccttctggttctgctttacccacctgaccccaggtggggtcccctacttcctgtctctcttagcttctcttcccttccaggtggtgaccctgctcaatgacctgtacacttgctttgatgctgtcatagacaactttgatgtgtacaaggtgagggtgggagtggggatgggaagggacagacagacatggacaaggtcagaaaaagatgaggggtaggcagaatgatgtggagtcttaagagaggagatcggggacacgggcagagacagtgacacagggagacccgggaacaggcagagaacccatgtgggatgggggatgagcaaagacagatgagggtacagaatgacagacgctgcacccggtgtgacggtgtggccggccgcacagttgcagccgtcaagtcctgcaccccctcgccactcccacaggtggagacaattggcgatgcctacatggtggtgtcagggctccctgtgcggaacgggcggctacacgcctgcgaggtagcccgcatggccctggcactgctggatgctgtgcgctccttccgaatccgccaccggccccaggagcagctgcgcttgcgcattggcatccacacaggtaaggccactgaaggtgcaggcgggcatccagaggccaaggcttcgcaagggaaacttgtcccctggcccagcccctcgccctttcatctctctctctctctctctctctctctctctctctctctgtctctctctctctctctctctctctctctctctcacacacacacacacacacacacacagagctgggacctcagatcctgcctcctgcctgtcttggattgtccacctacctcccttaacacccctccctccctcactcgctgatgggctctgctccttcccttgctcctcccaggacctgtgtgtgctggagtggtgggactgaagatgccccgttactgtctctttggggatacagtcaacacagcctcaagaatggagtctaatggggaaggtacagtgccccctcctagagggaatggggagggcagggtggctgagggaaatgccatcctggggcagcctgtgcctgcacagcccgtttcagctcctagccctttcgcctcccaagttccccttctcataatattaagagttcaacctgggctcatcaacttgactgtaaccagagactcaggttcctgctgcccctcttgtcaaacgatgtaaaagtatttccgggccagtgctggagagttcccagcaggaatctgattttaagaccctctgtgggccgggcgtggtgactcacacctgtaatcccagcactttgggaagctgaggcaggcggatcacctgaggtcgggggttcgagaccagcctgaccaacatgatgaaatcccgtctctactaaaaatacaaaaaactagccaggtgtgatggcaggctcctgtaatcccagctacttgggaggctgaggcagaagaattgcttgaacccgggaggcagaggttgcgatgagccaagattacaccacgcaccccagcttgggcaataagagttaaactctgtctcaaaaaaaaaaaaaaaaaaaaaaaaaaagaccctctgctccacctttgatgtggtaaagatggcttcagagccagcataagtgaggctgtgaatctcagctccacagctggctgtgtgtcagtttgctatacctctctgagccatggttttcctcatctgtaaaaagagggaaaaaatctatctcacaggaattatgtgagaaacccattaaaaatgtctaccacataattgtcatttaacttttccaagccttagcggattatctgtaaaatgatgtctatctcaggattgcaagaagcctagcacaaaccctggtacccagcaggcacctaataaattcttactcctacccgccccttgctcttgcctcctgtttatcttctatccttctgctgtattcgacacaattcaatgcagtaaacatttattgagtgactactgagtgccaggccctgggatagtaacatggcccagatccagagttagctgagaaattcatgtggaccccatctaaaccttatggtgaaagaaaggctgcttgggagccagtcctgggagcccagagggatctagttcggcaaatattccctgggcactattttgggggctgtcagagtacagccccttgttgagggtccagtcctcaaggagcacattcccagaaattgttcaacattctgggcgctgggggtgcttgtaatcccagcactttgggaggccgaggtgggcagatcacttgaggccaggagttggagactagcctggccaacatggtgaacctcctgtctctactaaaaatacaaaaaattagctgggcgtggtggcacgtgcccgtaatcccagctactcaggaggctgagacatgaaaatcacttgaacccaggaggtggatgttgcagtgagccgagactgcacccctgggcaacagagcgagactctgtctcaaaaaaaaaaaagagagaaagaaagaaaagaaaagaaagaaactgttaaacacaacaaggccactgtgattgatgcaaaccccagaagtagggacatgagttcagacagtggtcaaagagagggtgtggcaatattgggccccactccatcactgacctcctcagccacttgggcagatcaccctgggcctcagttcctcggccacaaaatgagggtatagcatgaaatcatgaaagcaacaatttacatagtgcttcctaggtagcacattccgtttgaatactttatggatgttaaatttaatcctcacaacaaggttttgagatgggtactgacactatcagcattttacagattaggaaaatgaagcagagagaatttattttacatacctaagcaagtatccaagctgaggttcatactgaggcagtgcaggatccaaagtgccagctcctaaccaccatgctgtgtagagccgggtgacactccagagagtgctgtccaacaggatgttccatagtcatgaaaatgttctgtattctgtgctgtccaatacagtagcctctaggcacatatggctacttatcactggaaatgtgacgggtgcaactgaggccctgatttttttttttttttttggagacagagtttcgctctgtcgcccagcctggatggagtgcagtggtgcaatctcggctcactgcaacctccgcctcccaggttcaagcgattctcctgcctcagcctcccaagtagctggaattacaggtgagtgccaccacacacagctaatttttgtatttttagtagagacggggtttcgccatattggccaggatggtctcgaactcctggcctcaagtgatcctcctgcctcagcctcccaaagtgctgggattacaggtgtgagccacagcacccagcctgaatttttaactgtatttagtttaaattaatttaagttgaaacaggcacatgtgattagtggctactgtattggattacacagctccagagttctaaatgagaggctaatgtggtcacgcactacattcagggggtggggcccctctgagctagagggcttcctggcccaaaagagggagagagggtacctgtccacctgtccacccccacagtccctggtctcttttgcctctactttcctgctctcctctctcacattgctcaccttcccttctcccctgtcctacccagccctgaagatccacttgtcttctgagaccaaggctgtcctggaggagtttggtggtttcgagctggagcttcgaggggatgtagaaatgaaggtagagggagaagcctctgccctccccaccttttggggtcctagagggagttacccttctcaagcagccaatgccactcccatccctaaggctctcatctgactggggaaagggcatgtgccactccccagcccatcctcttttttccctccagggcaaaggcaaggttcggacctactggctccttggggagagggggagtagcacccgaggctgacctgcctcctctcctatccctccacacctccctaccctgtgccagaagcaacagaggtgccaggcctcagcctcacccacagcagccccatcgccaaaggatggaagtaatttgaatagctcaggtgtgctgaccccagtgaagacaccagataggacctctgagaggggactggcatggggggatctcagagcttacaggctgagccaagcccacggccatgcacagggacactcacacaggcacacgcacctgctctccacctggactcaggccgggctgggctgtggattcctgatcccctcccctccccatgctctcctccctcagccttgctaccctgtgacttactgggaggagaaagagtcacctgaaggggaacatgaaaagagactaggtgaagagagggcaggggagcccacatctggggctggcccacaatacctgctcccccgaccccctccacccagcagtagacacagtgcacaggggagaagaggggtggcgcagaagggttgggggcctgtatgccttgcttctaccatgagcagagacaattaaaatctttattccagtga

SEQ ID NO: 1226 - DNA, 59398 bp, Homo sapiens
agggcgagcgggcgcgcgaagatggcggcggccgccggcgggccgtgtgtgaggtgcggagcgggtcgaatggaccggggtggctgtgaagcgcggtgtcaaagccgagcggaagcggggcgggaattggaggcgggatgtggcgacagtggcagggccaaccccggctggatggacgggcaccgagacgggaggcggttacgtccaaacggtccccgcgcgcggggatctgaagagtcttcttcaggaggggggccggctcttcaccccttccctccgcgctcggcctcccatctcctcacccagggccctttgccttcctcctctctcacctccgacgcgtctcttggcgccccacccgcgcttccttctccggccgtgacgctccctcgagccacggggagctttgcggtctcctggggtaccccccacccacgtccctgctgcaggctcccagtgtcctgccccggcgtcgagtgcgccctgctggctccccgacctctcccgcgatctgttcttgttaggattttgtttcgcgttgagcggagccacgcttgcggcttctgtcctctccgcgcctcgtatcgttcttttcttgcactgaatcaagtcagccagcatgtccaaatcctccaagagatttcagggattgaactaggctttagggacaagaagatgaaatattatatacgaaaactacaattctgacaaagtgctttctagcgtcagaccctggtggagcgcttcccaggagttatctcattcaattctcgcaactccgagaggcgccttctatttcacagatgactcagaagtccggctcagagctagccaagtgataaagagagccttcaagctgaagtctgcgtacctccagtgctataaccagaccaccacgcctccttctgtcttccacattgcagctcgaaggtcttcgttcttcccaccaccctccctcaaagttaaacatccccgtctcttatccttccctgtgccagcagtgttttccccacttttttttttttttttttttttttttttttttgagacggagtctcgctctgtcgcccaggctggagtgcaatggcacgatctcggctcactgcaagctctgtctcccgggttcatgccattctcctgcctcagcctcccaagtagctggggatacaggcacccgccacaacgcctggctaattttttgtattttcagtagagacagggtttcactgtgttagccaggatggtctcgatcttctgacctcatgatccgcccgcctcgacctcccaaagtgctgggattacaggcatgagccaccgtgcccggccctaacaatattattatataacaagattactttccaaaaatttaacaaatcgttttgtatattgagattttttgcttttagagagcagacaaaatggctatgaggcagtgtacaagtttgtatgatcagaaagagcaaaattacctctgttctctcattttgcaggagcagtagagaactgtggactattctgcttggaaggtcagctctgagagagctggtaagtggtggtgttcttgagtgggttctctgggttctttgtgtagcttttgttaccaaaaaaaacctttttttaaatgtaggaagtaaacacatttatttatttagagacagagtttcgctcttgtttcccaggctggagtgcaatggcgtgatctcggctcaccgcaacctccgcctcccaggttcaagcgattctcctgcctcagcttctcgagtagctgggattacaggcatgcaccaccacgcccgactaattttgtatttttagtagagatggggtttttccattttggtcaggctggtctccaactcccgaccttaggtgatctgccctccttggcctcccaaattgctgtgattataggcgtgagccaccacacctggcctatttatttattttgagatggagtttcactcttgttacccaggctggagtgtaacagcatgatcccagctcactgcaacctccgcctcccgagttcaagcgattttcctgccacagcctcccgagtagctgagattacaggtgcatgccaccacacctggctaatttttgtatttttagtggagacagggtttcaccatgttggccaggctggtgttgaactcctgacctcaggtgatctacttgccttggcatctcaaagtcctgggataacaggcgtgacggccactttttttttttttttttttttttttgaggggggtgtcttgctcccaggctggagtgtaagtagctcgatcttggctcacttcaacctctgccacctgggttcaagtgattctcctgcctcagcctccccagtagctgggattagaggtgcccaccaccacgccctgctgatttttatatttttagtagagacagggttttgccatgttggccaggtcggtcttgaactcccgacctcaggtgatctgcctgcctcagcctcccaaagtgctgggattacaggcatgagccaccacacccggctacgtttttttgttgttgttgagacagagtctggctctcgcccaggttggagtgcagtggcacgatcttggctcactgcaacctctgtctcctgggttcaagtgattcctgccttagcctctcaaggagctggggattacagatgcatgccaccacgcccggctaatttttgtatttttagtagagatggggtttcaccatgttggccaggctggtcttgaattcctggcctcaggtgatctgcccacctcagtctcccaaagtgcttggattgcaggcatgagccactgtgcctggtataaacactttttttttgttcctaaaactttataaacgtggtcagatgcagtggctcatgcctgtaaccccagcactttggaaggccaaggcagaaggatcaattgagtgcacaagctcaaggccaaccctggcaagatagcaagaccccgtctctacaaaaaattttttaaaaaattagccaggcatggtggtgcatgtctgtagtcccagctacttaggagtccaaggtgggaggattgcttgatcctgggaggttgaggctgcagtgaactctagcctgggagacacatcgagaccccagctcaaaaaagcaaaaagctttataaacattacgcattccctacttctttgctgaaatgagactacctagcctagctgctgaagtcttttaaatctacctttgtatttcattgattccttttatgaaaagatacctgtgttcattgcttggctgctgagagtaggggtgcaaataccattcttctacctcaacctaagaaagattcttggccaggcatggtggctcacgcctgtaatcccagcactttgggaggccgaggcgggcggatcacctgaggtcaggagttcgtgaccagcctcaacatggagaaaccccgtctctactaaaaatacaaaattagcccggtgtggtggtgcatgcctgtaatcccagctactcgggaggctgaggcaggagattcgcttgaacccggaagtggaggttgcagtgagtcgagatcgcgcaactgtactccagcctgggtgacaaagcgagactccatctcaaaaaaaaaaaaaaaaaaaagtcaggcttggtggcatatgcttgtattagtagttccagctactcaggaggctgtggtggaaagatcgcttaagctcaggatatcaagcctgcagtgagccatgattgcatcactgcactccagcctgggtgacagaacaggaccctgtctcaaaaaacaacaaagaaaacttcaccacaacatcatttatattattaaataattacagtcagcttaagtatatcaaacattagaggaatggtaaatgaattatgatctaccaacttgatacaagtattatgcagcaacttgaaagtatgtttatcaagactttcataataaggttaagtcattatgttataatgttaagcaaagaaaagaaggttacagaattctgtattcaaaatgatttcaactctggggaaaaatgcatattaaaaacactcaaaggaatgtgtaatacttagtgtgattctggaatctgattttttttttttttttttgagacggagtttcgtgcttgttgtcctggctagagtgcattggtgcaatctcggctcaccacaacctctgcctcccaggttcaagtgattctcctgcctcagcctcccgagtagctgggattacaggcatacaccaccacgcccagctaattttgtattttttagtagagacagggtttctccatgttggtcaggctggtctccaactcccaaccctaggggatccgcccgcttcggcctcccaaagtgctaggattacaggcctgagccaccatgcctggccgagtctgattattaataaaactgcatttgggccgggcgcagtggctcacacctgtaatccctgcactttgctgacatgggcagatcacgagttcaggagttcaagaccagcttggacaatatggtgaaaccccatctctactaaaaatacaaaaaaaactgactggcatggtggcgtgcgcctgtagtcccatctgctcaggaggctgaggtaggagaattgcttgaacccaggaggcggaggttgcagtgagccaagattgcgccactgcactccatcctgggtaacagagtgagactccgtctcaaaaaaaaaaaaaaaaaagaaagcacaaaaaactgcatttgcggtcgggtgccttggctcacgcctgtaatcccagcactttgggaggccaaggcaggcagatcacttgaggtggggagttcgagatcagcctagccaacatggtgaaactccatctctactaaaaatacaataattagctgggtgtggtggctggcacctgtaattccagctactcgggaggctgaggctcgagaatcacttgaacctgggaggcggaggttgcagtcagccaagttggtgccactgcactccagcctgggtgatagagtgagactctgtctcaaaaaaaaaaaaaaatactgcatttgtataattaccttgttcttttccagagtcagattgaggcagaactgaataaacattggcggcgattgttagaggggctttcttactacaaacctcccaggtatggcagttccgggtgtctggttaaagtaattgtcctaaggaagctgacatggataaaaccatccttctatgtgctttgatgatattgtagggttatgtataccagagataatacaatttagtttaccagtggaaaacagtagggtacatttgtttttttgttgaccgaaagaaaaggaaattccttctagaaatacagtattgtagaatataattatgacctatgtgtggggatgagaatttattaaacattcaacgaattttctaatatttattcagagtccacagtgtctgtgtgagtactaattggtgggagatagcagtgaaggatgatgctaacaactgacacttgtgtagtgttaactatgtaacaattaatactctaagcacctgacttatcaaaagttatttaatccccacaacacccctttgagatagttactacttttattctttgggtgaatatatagatctttttattgggtagtggaaaacatagtaataaaatataaagtagttgcaaataaagagaatgcagcttgtagggctgggcttatttgatcttgattcctagtccagatctcattctattatgcgttatagtctaagtcaccctcatttcccttctacttttgtactgcttttgaatgtattacatctttaccttccattttcattctcttaggttaacgatgaacttttccttgttattcatctgtctgttaattcttcccctgtaattaccttaaagtaaatcccagataccttgttattttatctgcaaatacttgactatgtatctaaaatacatggactttttaaaaagataatctctatattatcacatttaggtacccttatcattgtttccattttaccagtggggaaactgaggcacaaagaggttaagcaacttgtcatggtcacacagctactaagtgatagaaccaggatttgaccctggtggtctcattccagtgtctgttctttttttttttttgagatggggttttgctctgtcgcccagactggagtgcagtgtcacatctcagcttactgcaacctccacctcccgggttcaagtgattcgcttgccttggcctcccgagtggctgggattacaggtgcccgccaccacgcccagctaatttttgtatttttagtagagatggggtttcaccatgttggccaggctggccttgaactcctgatctcaagtgatctgctcacctcggcctcccaaagtgctgagattacaggcgtgagccgtcatacccagcctattgttttctttactatcttttttctgttccaggatccaacctagttgtcaagtgcctgtagtctcctcttagctgtgacaatgtcttagtcttttttttttgagatggagtctcgctttgtggcccaggctggagtgcagtggcacgatctcggctcactgcaagctctgcctcccgggttcacgccattctcctgcctcagcctcccgagtagctgggactacaggcgcccgctgtgacaatgtcttagtctttttttttttttttttttgagatggagtctcgctctgtggcccaggctggagtgcagtggcacgatctcggctcactgcaagctctgcctcccgggttcacgccattctcctgcctcagcctcccgagtagcagggactacaggcgcccgccaccacgcctggctaattttttgtatttttagtagagacagggtttcactgtgttcgccaggatggtctcaatctcctgacctcatgatccgcccgcctcggcctcccaaagtgctgggattacaggcgtgagccaccgcggccggtgacaatgtcgacaatgtcttagtcttaccttgattttcatgaccttgaacaagtttgaggactggtcagttattttgtagtatgcccccaatttgggtttgtctgatgttttccttattattagactggggttgtgagtttttgggaaaaatacacagaggtgaggtgctcttcttttttttttttttgagatggagtttcgctcttgttgcccatgctcgcgtgcaatggtgcgatttcagctcactgcaacctttgcctcctgggttcaagcaattctgtctcagcctcccgagtagctgggactacaggtgcatgccaccatgcctggctaatttttgtatttttagtagagacagggtttcaccatattggtcaggctggtcttgaactcctgacctcaggtgatccgcccgcctcagcctcccaaagtgctgggattacaggcgtgagccaccacgcctggccaagctacccttcttaccacatcatagcagagagtacatgctgtccacatgaaatcactggtaatgttaatcttggtcactcagttaaggaggcatttgccaagtttctcctctgtaaagttacttttttctcttttcctattttattttttggaagtgagtactaaatatagccatgtccagctaatttttttcacttttggtggagatgagggtctcactttgttgtctaggctggtctcaaactcctggcctcaagctacactcctgccttggcctcccaaagtgctgggattacaggcatgagccattgttctggcccctccctatcctatttatttattcattagtttatatcagtatagactcaaatatatttattttatttatcttatactttgtttataccttgtttcagctttggctattgggcattcttttaggttggcctctgtcctttgggcgtgtccttccttttttctttttttcttttcttttttttctattatgtcatctcctaccgaaaggactttggtttcttaagcccttttgtacttcttttcactataagatgcttcaagattttcttgtattttccttgccctgactctagaatcaaccaattctccaaggaatcctgttattagagaatggtattataaagcaggatctgggtgctgcatgtacctcctgctgttggagtattataaattctaggccttctcggtggacagagctattacagataatatattaatatatgtatgtatgccacagacctggttttaaattttagcaactgtttatgagctgtgggatttttggtaagttatttaccctaagtgctggcaattccatttgtaaaaggagaatagtaatatttgccttttagggcagtagtaaggatcaaaaataatgtaacttaatgtgtttacaaataacattgttataactgtaatttaaccactttttttttgttttgttttgttaggcataaccagttctgcgttatgaagtttgtagaggtgaatgggtgtgtgtgtgtgtgtgtgtgtgtgtgtgcgtgtgtgtgtttgtgtgtgtgtttataggcatctgaagggcagaaaatagtctgtaggaaaaatattttaaaatatttttattttaaactcagtgggctattgagaatgaagaaatgattcactgttctttttgtagtccaagttcagctgaaaaagtgaaagctaataaagatgtagcttcaccattgaaggaactgggtttaagaatcagcaagtttttggtgagtaaaaattagcactcgctcaatttattacttgcagtgtggatgtgcgtggttatattgctagtgatagtgaaaattcagtttctttttgttttggggattaaattgttttataaatacccaggttgcaactcttctccctaaaagttacaagtcaaagttgcctgatccattcactgcatatcatagggttttcttcaccagacatgtggtggtctttaaggtgactaagtttgtcattttggaagctcacatcatgcctactgctgtattaatgtgcttagtgaataagcatcgttgtttctggcatgtacatttaattgtaataaaaattgtatgtcagtgactggctcttgtcttctattagagtcagaattgttatgttttatgaatctttgagaagcatttttgtttattcaagtcctgtgttcattgtagaagacaaatctttaaattctctgcatcctgtgtgcgatttctgagctgttccttacttaaaatctctgtgtttcagggtcttgatgaagaacagagtgtgcagttactccagtgttacctgcaagaggactacaggggtactcgggactcagtaaaggtttgtggtttatgtcagctcctttcttctgcctttatcctttttccctgttggttttagataatgtaggattttggcaccaattcttttatcggtggtaggtgatcaggtaccgtcatcttcagggaagacctactaaaggctttaaaaaaaacatgacctgggtgcaatggcttgtgcctgtactcccagcttcttgggaggctgaggcaggaggatcacttgagtccaggagtttgaggctgcagtgaactgtgatcgcactactgcactccagcctaggcaaaagagtgagaccctatctctttaaaaagtaaagaatatatatgcatataagctgagatctgtcttcatacttggaggagtggagaggtcaaagactgacatgttaatcatagaatcttgggctattagaggtgataaggatttggtagagtttcttttttttttgagatggagtttcgctctgtctcccaggctggagtgcaatggcgtgatcttggctcactggaagctctgtctcccgggttcacgccattctcctgcctcagcctcccaagtagctgggactataggcgcctgccaccacgcccggctaattttttgtgtttttagtagagacaggatttcaccgtgttagccaggatggtctcaatctcctgacctcgtgatccccccgcctcagcctcccaaagtacttggattacaggcgtgagccaccgcacccggccaggatttggtagaatttctagcctgcccagcccctcattttacataagaggattgaggccagaggagaaggggagggatttgagcacaggtttgggtacatttgggtaaaaagtaaggtggaaagtatatgtagaaacaaatgtgcaattataatcttgaaggatgaagtgaaggtatctatctttttttattacttgagttttgcctaaaagatggcctcttaactgctctgtttttcttttcagacagtactgcaagatgagaggcagagccaggccttaatcctgaaggtcagtagtagtcaccatttctattctttgatgtaaaattgagtgacagcttcttgacctcattttcctgagcattgctggcttttgactctttgttgggtaagcatggaggtctttatgaagaagcatattaactcatttatgaaaagatgcttttatccactggacccagtagagaagtttctcccaaggagattcttcagctactggtggtgagaacaagttcatggatattttttctttaggtgtaagtccaacaggattaatttgtatttctttatttctttattcttcagtccctttccagcaaccttctcacttaggatctcgtgttaaaatgtaatttgtgacttctgaagaagtttcctattttatatttagtgagaataagtacattagttacaagcaattaggacctatatcagtggaatttgtttttatgtgtttggcctgcctgttgatagcattgtgtgctacatgaatgctctgagaaatcatgctagaaaacatttttggaaacttgtgtatattgttaaacaattaattcctttcatcctgtatattctggtttatgaatgtcttttcctttattttggcctaattcagtatgtttgcatttctgtgattccttatttatataaattgaacttttccatccacatctttaagtgaaattatcactaaatttaaacttgagtttcctatgtgcaaaggtgagtaactgattttgaattttgggttcctcagattgcagattattattatgaagaaagaacctgtattcttcgttgtgtcttacaccttctcacttacttccaagatgaaagacacccctatagggtaagcttgtttagtcctcttgcttctctttatactgtatcatcttaataattttattaatatttatttgaatatttaccttttattctaggtataatttactcttttgattttttaaaggttgaatatgcagactgtgttgataaattggagaaggaactagtttcaaaatacagacagcagttcgaagagctttataaaactgaagcaccaacttgggagacacatggaaatctcatggtatgtggttactgtgctctcctgtaactttttttttttaagatggagtttccctctgtcacccaggctggagtgcagtggcatgatctcggctcactgcaacctccatctcctggttttaagcaattctcctacctcagtggattacaggcacccgtcgtcacgcccagccaatttttgcatttttagtagagacagggtttcaccatgttggccaggctggtctcgaactcctgacctcaggtgatccgcccacctcagcctcccaaagtgctgggattacaagtgtgagcgactacacctggcctataactcttaggagaattgtatacccttgcttatagagctgcaagttaaattatttattcattcatttaaaacatacagattatcttttttttttttttttttttggtgagatggagtttccctgtgttgctcaagctggagtgcaatggcacaatctcagctcactgcaacctccacctcccgggttcaagtgattctactgccccagcctcccaagtagctgggattacaggcacctgccaccacgcccagctaattttttgtatttttagtagagatagagatagggtttcaccatgttggccaggctggtctcgaactcccgacctcaggtgatccacctgctttggcctccaagtgttggggttatgggcatgagccactgtgcctgacctaggttatcattcttgagaaaagtttaaacatgtcatataaatcaaaatattgatgacattaattaatagtacttaattctgactttgactttttttcaatcccattagtttactttcatttcttacctaaaatttgtttagtggttaatagaattctgaacctaatatatcatcttattattttctgctcaatgtgtaacactagtctgattattttattcttttttttttttttttttttttgagacagagtctcactctgttgcacaggctggaatgcagtggtgagatctccactcactgcaggctccacctcccgggttcacgccattctcctgcctcagcctcccgagtagctgggactacaggtgcccgccaccacgcccagctaattttttgtttttgttttttttgttttttgtttttttttagtagagacagggtttcaccgtgttagccaggatggtctctatctccccgcctcagcctcccaaagtgctgggattacaggcgtgagccaccgcgcctggctattttatcctaatttctaaaccaatttgcatctatcgattatagcatgaccttgtttgttttaaaaataatacattcttattaaaacacatcaaaaacacagctacttaaaaaatatttaatagatgaaaagggcctatttatacatatgacatttctgtctcagaaagtttgcagtcagaagcatgaaatagcaataaaagcataaaattcccaggaataagtttaggacaatataaaatttaagtgaagagaactttaaaaatgctataaaaggtgtaaaagaagacataactgaggctgggcacagtggctcatgcctgtaatcctagcacggtgggaggccaaggcaggcagattactttaggtcaggagttcgagacaagcctggccaatatggtaaaaccctgtttctactaaaaatacaaaaattggtggggcacggtggctcaggcctataatcccagcactttgggaggccaaggtgggcggatcgcttgaggtcaggagttcaaaaccagcctggccaacatggtgaaacctcgtctctactaaaaatacaaaaattaggcgagtgtggtggcacccatctgtagtctcagctactcaggaggctggagtgggagattcacttgagcctaggaggcagaggttgcagtgagccaagattgcgccactgtactccagcctggggtgacagagcaagactccgtctcaaaaaaaaaaaaaaaaaaccataaaaaatgaaaatgcaagtctggccaatatggtgaagccctgtctctagtaaaaaaatatacaaaaaaaaaaattagctgagcatggtggtgcgtgcctgtaatcccagctactcgggaggctaaggcaggagaattgcttgaatccaggaggcagaggttgcagtgagccgagattgcaccactgcactccagcctaggcgacagagcaagactctgtctcagaaaaataaaaataaaaataaaaatataaaagttagctgagcgtggtggcacgtgcctgtactcccagctactcaggaggctgaggcaggagaaatgcttgaatccaggtggtggaggttgcagtgagccgagatgacgccagtgcactctggcctgtgcaacagagcaatctctgtctcaaaaataaataaataaataaataaataaccaaagggaaagacacactatatatatctatatctatatctatctatctatctagatagatagatagatagatagatagatagattttttttttttttttgagacggagtttcgctcttgttgcccaggctggagttcgatggcgtgatcttggctcaccacaacctccgcctcccaggttcaagtgattctcctgcctcagcttcctgagtagctgggattacaggcatgtgctaccacgcccggctaattttgtatttttagtagatacagggtttctccatgttggtcaggctggtctagaactcccgacctcaggtgatctgcctgccttggcctccaaagcgctgggattacaggcgtgagccagccaccatgcccggcctaggacataccatactcttttttttttttttggacggagttttactcttgttgcccaggctggagtgcaatggcatgatcttggctcaccacagtctccacctcctgggtcaagcaattctcctgcctcagcctcctgagtaggtgggattaaaggcatgcgccaccacacccagctaattttgtattttgagtagagatggggtttctccatgttggtcaggctggtctggaactcctgacctcaggtgatctgcctacctcaacccatcaaagtgctgggattacggtggtgagccattgcacctgaccaacacaccatactcttttttttttttttttttgagacggagtctcgctctgtcacccaggctagagtgcagtggcacgatctcggctctctgcaagctccacctctcgggttcacgccgttctcctgcctcagtctcccaagtagctgggactgcaggcgcccaccaccacgcccaattaatttttttgtatttttagtagagacagggtttcaccgtgttagccaggatggtgttggtctcctgacctcctgacccacccacctctgcctcccaaagtgctgggactacaggcgtgagccactgtgcccggcacaccatattcttgagtataaaaacttacaccgggatgggcatggaggttgtggtgagccaagatcacaccacttgcaccccatcctgggccacagagcgagactctgtctcaaaaaaaattcatatgcaaaataagaatagccggctgggctcaagcagtcctcccgcctcagcctctcaaagtgctgggattataggtgtgagccattattcgcaactaaattgatatactttttaatgggaagcattttgataatatctaaaaatttacaaagtacatatttcttgattcagcagttttttgtttaattatgattttttaaattgtgataaaatagacatagcataaaatttaccattttaactatttttaagtaactgtgactatacttttactttttctggaattacatataaatagaaccacacaatatgtagaattttctgtttggcttctttcagttaatgtcatgtttttgagattcatccatgttatatcatatactagtacttcattcttatttatggttgagtagtaaacattccattgtgtggatataccatattttgtttatccatttctcagttgatagccagccatttgtcatttttgttttttgactattaggaataatgtgctatgaacattagcatatgggttttttgacataagttttcatttatcctgggtaaataaatacctgagagtgagattgctgagtcgtaaatgtaaatttttttttttttttttttttgagacggagtctcgctctgtcgcccaggctggagttcagtggcgcgatttcgactcactgcaacctctgcctcctgagttcaagcgattgtcctgcctcagcctcctgagtagctgggattacaggcatgcatcaccacacctggctaatttttgtatttttaatactgggattacaggcatgagccaccatgcccagccgtaaatgaaatttttataaagaattgataaattgtttatccatagtggctataccgttttgcattcccaccagaaatgtatgagaattctttttgtttgacattgtcaccaacacttggtatggctgttaattttaaacatcctaaataagtatatagtaatatctcattgtggtttgtttgttttgagatagggtcttgctattttgcccaaattggccttgaactcctggattcaagtgatccttctgcttggcctcttgagtaggctgggattacaggcatatgccaccatgcctgtcttattgtgggttttttttttttttatttttgagacggagtctcacactgtcgcccagggtggagtgcagtggcacgatcttggctcactgcaacctctgcctcctgagttcaagcgattctcctgcctcagcctcccgagtagctgggactacaggcatgccaccacgtccggctaattttttgtatttttagtagagacagggtttcaccgtgttagccaggatggtctcaatctcctgaccttgtgatccacccgcctaggcctcccaaagtgctgggattactggtgtgagccaccacacctggtctcactgtggttttaatttgcatttccctgatgactagtgatgttgaacatcttttcacgtgcttatttacttacaccttcttcagtcaagtgtctgttcacatttttatcccattgttttttgtggatgtttgtcttatcaaattgtcagagttctttatatacagtattgtaaatataagctatttaccagatagatgttttacaacttttttcttccacctagtggcttgtcttttcccaccttaattctttttttttttttttgagacaaggtctcggtttgtcactcagactggaatccagtggtgggaacatggttcactgcagcctcgacctccctgactcaagtgaccctcctgtcacagccccacaagtagctgggactacaagcgggtaccaccatacctggctaatttttgtatttttttttttttttttgtagagatggttttgccatgttgcccaggctggtcttaagctcctgagctcaaatgatttatctgccttggcgcctcccaaagtgctgggatgacaggcatgagccactgctcctagactgtatctttccaagagccaacattttaattttaatttttttttttttttttttgagacgctctcactcagtcacccaggctggagtgcagtggcacgatgttggctaagtgtaatctctgcctcccgggttcaagggattctgctgcctccagcctcccgagtagctgggattacaggcatgtgccaccacgccttcctaatttgtgttatttttagtagagatggggtttcgccatgttggccaggctagtctcactcctgacctcaggtcatccacccgtctcggcctcccagagtgctaggattacaggcatgagcctcctcacccggccaaaattttaagttttgataaatgtttttgtcagttttgtctattatggctcctgccttttggagcttgtccttaaatgtttgatagaatttaccagtgaagccatctgggtctggagttttctttgtgggaaggtttttaattcttttatttattgattaaaatttttttatctctttttaaaattttcatcaagtttctaacaaagttttaaatactgaattgttttccttgattgatacagagctattcaagtttcctgtttctatttgggacagttttggtaatttgtatcttttaaggaatttgttcatttcatttcattggtgaaatctatttacataaggctgttcatattattttcttatgcttttactctctttagagtctagtgctgtgctcttactcatttctgataatggtagtttttgtcttcaattttctttattaaaaaaaatttttttttgagacagagtctcactctatagcccaaactggagtgcagtggcgcattcttggctcactgcaacatccacttctagggctcaagtgattcttgtgcctcagcatcccaagtagatgggagtacaggtgtgcactattaagctcagctaattttttgtattttagtagagacagggtttcaccatgttgcccagggtggtctcgaactcctgagctcaggtgatccggccccctcagcctcccaaagtgctgggattatagacgtgagccaccacgtctggccagttttctttattgtaatgtctgttttatatttaattgatttctgttgtgtatttttttttttttttaaattttcactcttgttgcccaggctggagtgcaatggtgtgatcttggctcaccgcaacctctgcctcctgggttcaaatgattctcctgcctcagcctcccaaatagctgggattacaggcgcccaccaccacgcccagctttttttgtatttttagtagagatggggtctcaccatgttggccaggctggtctcgaactcctgacctcatgatctgcctgcctcggcctcctaaagtgctgagattacaggcgtgaaccaccgcgcccggactctctctctttttttaaaatagatttctgcctccgtgtgtgtgtgtgtgtgtgtgtgtgtgtgtgtgtgtgtgtgcgtgtgcccagccttgttctttagtttttatatatgtatatgttttttctccctttttaaatggatttctgtctctgtctgtctctgtgtctgtgtgtgtgtgtgtgtgtgtgtgtgtttgtgtgtgtgtatgtgttagaagtctcactgtcacgcagagtgagactctctggatttaatgtccaaatattggatgttttttgtaaatatctgggttttttttttgagacaggttctttctctgttgcccaggctggagtttagtggcacaatcacggctcactgcagccttgacctcctgggctcaggtaatcctcctacctcagcctcccaactagctaggactacaagatgctgcaggttttgccatgttgcccaggctagtcttggactcccgggctgaagggatctgaccaccttggcctcccaaagtgctgggattacaggtgtgaagtactatagcagacgaaacatcttattgttctcaatgtttttatttgattctgttatcagagaacacattctttgtcattttagtcttctaaaatttactgtctcatgttttatggcctaccttatgatctttcttggtgattgtacctgtacacctggaaagaatgtctagttgttttttcagttgaatagtatgagtttattagcaagggattggtagtaacctaaatgctcatccatccaagtgagcaggtaaaatcaatgatggcatttatgtgcagtggaatactatgtagtgttaaaaatattgagtgtattggttgaataatctatggcatatccacataatgaattattatgcaaataaaaggattaaaaatagggagggtttttgtgtgtgtgtgtgacagagtctcactgtgtcacccaggctggggtacaggggcatgattgtagcctactgcagcctcaacctccccagctcaagtgactctcctgccttaggctccagtgtagctgggactacaggcatgcacctctatgcctggctcatttttaaaaactttttctagagatggagtctcactgtgtttcccagactagtcttgaactccaggcctcaaacagtcctcccactttggcctcccaaagtattcaagtattaggcttatagacgtgagccaccctgctagtccagaaaatttttactatacctttataggagataatttttaagatacattgttgcagctgggtgtatggtggctcaggcctgtaatcccaccactttgtgaggtgaaggtgggaagattggttgagcccaggaattcaagaccagccctggcaacatagcaagaccttgcttctacaaaaaatttaaaaaattggctgggcgcggtggctcacgcctgtaatcccagcactcgggaggccaaggtgggcggatcacctgaggtcaggagtttgaaaccagtctggccaacatagtgaaaccctgtctctactaaaaagaaaaaaatcagccgggcgtggtggcaggcgcctgtaatcccagctactcgggaggctgaggcaggagaattgcttgaacctgggaggcggaggttgcagtgagccaagatcgcgccattgcactccagcctgggggataagagtgagacttcgtctcaaaaaaaaaaaaaaattaaaagaattagctagacatggtgctaacctgtagttccagctacttgggtggctgaggcaggaggattgcttgagcccggtgggtcaaagctgcagtgagctgtgggtgtactctgggtgtactctgggtgacagagcgagaccctctctcaaaagaaaagatacattggttggctgggcacagtggcttacgcctttaatcccagtgctttggcctcccaggaggatcgattgaggctaggaattcaaaaccagcctgtgcaacatagcaagacctgttctcttccaaaaatttaaaaaaagaaaaaatgagctgggcatgtttgtgctcacttttagtcctaactactcgagaggctcaggtgagagggcagctgccataagctataattgtactgctgcactccagcctgggtgatagagtcagaccctgtctcttaaaaaaaaagcaaaaaatctgtctcttaaaaaaaaaaattaaatacggaccaggtgcagtggcttgcgcctgtagtctcagctatttaggaggctgaggtaggaggatcagttgcgtgtagcagtttgagcagccataatctgccactgcactgtatcctgggtgacagattgagaccctttctttaaaaaatgttctttaagtactgtttttaatctcatgttatttctctcccattttgttttcattggttgtacagacagagcgccaagtgtctcgctggtttgttcagtgccttcgggaacagtccatgctgctagaaattattttcctttattatgcatactttgagatggcacccagtgacttacttgtattaaccaagatgtttaaagagcaaggatttggtagtaggcagaccaataggcacctggtggatgagactatggatccttttgtagatcggattgggtaagtcagtgaattgaacatcatggaacttgcagtgtttagagcattgatactatagtggtatgtaagcaggtagggggtaggtgtacttttcacttaatcggtggggaaataggtctactgccacgttccctttcatgcagggagtaaagactgggattgagagaggactctcaaaatgagtattgtaatctgctcttttacttactgtcttcatttaaggggttcattcattcattgaacaaaaattcgttgaacaactattgtaggccaagcactatgcaaatgctaacaagatagtgataaataaggcatatatgcttgctcttctctttcaggtgatagtctatggactttaaatttcttgttttttctctatttatgaccgtggatatatccataactgggggcctggtcactctgtgagcaaagatatataccagttaattttgtgtgtgtgtggtatagatggggtgtcactttgttgtccaagatagtcttgaactcctggcctcaagtgatcctcccacctctgcctctcaaagtgttaggattataggcgttagccactatgcctggcccaataggtttttttgatatcgcagtgtcttatatctcacctttgtctctagtgagtttcagaacgggatatataacatggtgatactatttttctttctagctacttcagtgccctcatcctggtggagggcatggatatcgagtccttgcataagtgtgctttggatgacagaagagaactgcatcagtttgcgcaggatgggcttatttgtcaggtgacttggaatagcctcttttttttcagagggtttataagttagtagtagctttcaattattgaactgctgcataaaattttcagtgttgtggaactacattgttcagtgatgcagaggttctacaatgttttcgttttgttttgttttggttttttgagatgaagtctagctctgtcaccatgctggaatgcagtggcgtggtcttggctcactgcaacttccacctcctgggttcaagtgattcttctgcctcagcctcccaagtagctgggatcacagctaatttttgtatttttagtagagactgggtttcaccattttggccaagaggtctcaatctcctgacttcgtgatcctcccgcctaagcctcctaaagtgctgggactacaggcgtgagccaccatgcccagtctgttttgttttttttgagacagagtcttcctctatcacccaggctggagtgcagtggtgccatctcggctcactgcaacctccacctcctgggttcaagagattcttgtgcctcagcctctggaatagctgggattacaggcacatgccaccacgtccagttaatttttatatttttaatagagatggggtttcactatgttggccaggctagtcttgaacccctgacctcaagtgatccacctgcctcagcctcccaaagtgctggaattacaggcttgagccaccgtgcccggcctctacaatgttaaacagttgattagacctggaggaaatctcaggttcgtcagtcatctataccaaggtgataattgagtctgtgagagtgattcattcatggagatggtacaaggacaaaagaggcccaaggagaaaaccctggggattgactgcatttaaggagcctgtgaaagaagaggaaaggggaaaaacattgagatgagatggttaggaagatagaaaatgaagatagagcatagaaagtttgagaaggatcaggataaaatttctaaggaatgtatcgtaacatgcattttataatcttaagactacataaaattagtagacaaattttgtgggtaaaggaagagtaattgtaattgaggggtttattagtgaggtgactgggggtttgagaagagtgaaatatcagaatgagagagtgaggccactctttatggcttgcttattgagcgtgatgaagaatctggtcgagggatattaacactttctgttcggagatgtagatgtgttttcttctctcactaggatatggactgtttaatgttgacctttggggacattccacatcatgccccagtgcttttggcctgggctctcctccgtcacactctgaacccagaagagacaagcagtgtggtccggaagataggtggcacagccatccagctgaatgtgtttcagtacttgacccgattgctccagtcccttgccagtgggggaaatgatgtgagtttaaggctctgggtggtgagcatgggagtgagccggcagaagcattataataatgtaatagttataatggtggtgtggataatgggatcatgttgtaactaaccttttgagagcatttagacatcatcaggcattatttataatgtttatgaacattatctttttgaatccttgtaacacttcttcgtgttaaagattatcattctgttttatacattaggaaattgagactcagagagatgtaatttgcccaaagcaacaaaaatgccagtaaatggtagataacggtttgaactctttgccagtaaagtatgtcttaagaagatagctttggccatattgactggagaagtcactttcaggggacttaatcaactgtaacaagatgaattagaaattctcttgagtcttatgttggggtttgagtggcatggtttagagagcttgtttgtttgtttgtttgtttgtttttgagacagagtcttgctctgtcacccaggctggagtgcagtggcacgatcttggctcactgcaacctctgcctcccaagttcaagcgattctcctgcctcagcctcccaagtagctgggactacgggtgcctgccacaacgcctagctaattttttgtatttttagtagagacggggttttaccatcttggccaagctagtcttgaactcctgacctcgtgatccacccgcctcggcctcccaaagtgctgggattacaggcgtgagccaccgtgcccagctagtgagctcgttttgacatggtgaaatgaaacctcaggttcagcaattattttttcctttcctttttcttttttttgagactgagtcttgctctattgcccaggctggagtacagtggatctcagctcactgcaacctctgcctcccgggttcaagtgattctcgtgcctcagcctcccaagtagctgggattacaggcacctgccaccatgcccggctattttttgtatttgtagtagggatggggtttcaccatgttggcaaggctggtctcaaactactgatctcaagtgatctgcccacctcagcctcccaaagttctgggattacaggtgtgagccaccgtgcccggccaaatcagcaattatactccttggttggtacgcatttgcccaaaggcgttgaaaacatatccacacaaaaacatacacacagacctttatagcagctttattcgtaattactaaaactcgaaagcaactaaaaggtccttcagtaagtataactaaactgttgtacatctagatgatggaatatttatatactgctaaatgagccatcaaaccatgaaaagacatggagaagacattaaatgcatattagtaaatgaagccaatctaaaaaggcttcatagtatatgattccaactacgtgacattctggagaaggcaaaaccttggagacattaaagagaatagtgggttgccaacggtctagtggagcaggaggtctgaattaggtagaacacagaggatttcacagaggatttttagggcagtgaagctattccatgtgatactacaatggtggatacatgtcatacttgtccaaaaatccatacaatgtacaacacaagagtgacccttagtgtaaactgtggactttgggtgataataataatgccaattgaagttattcagttgtaacaattgtactgttttggtgggatgctatttatgtgtggaggcagaggatatatgggaaatctttgtacttttctgctcagttttgctatgaacctaaaactgctctacaaaacaaagcctatttaaaaggaagaaaactcagccagcaggccctactcgttgtcactggttggcttatcttggtggccattcaggtgctatatcaattcccattaccacatgcagactgtttactgtaggctggatatggttttctttttccccacacaaactttgatgattttggcaataattcccttctgattttattcttgactttgttgtaatatttgtggttcctgctttctcttttctcccttggtcttcctgatcttgtaactaaattaggaaaattatgaagcttcagatttccttcccatttgtttacaaagaatatatgaatgcgataggattatgccgaacctggggaagagttgtattactcagaatgattcactgactcctttgtcattccagtgcaccaccagcactgcatgcatgtgtgtctatggactgctctctttcgttctgacctcgttggagctgcacaccctgggcaatcagcaggtcagtgtctggctttcatgaagctgtctctactgcccagctttgcaatcaagtcccaaaaatatacccccattggatctgatattatttacctcatgtgttaatttgtttactggcactcatttttttatttacttttttctttttttttgagatggagtcctgctctgtcccccaggctggagtgtggtggcacgatcttggctcactgcagcgtccgcctcctgggttcgagcgattctcctgtctcagtctcctaagtagctggaattacaggcgtccgccaccttgcccagttaatttctgtatttttggtagagacgggctttcaccatgtcgaccaggctggtcttaaactcctgacatcaggcgatccgcctgcctcggcctcccaaagtgctgggataacaggcatgagccactgcacccggccttgtcttcatttactgttatataggtgataaatgttaattgtagaaaaaacagaaaatgctgtaaaaagaaaaaagtatagtcctatcacatagataacttgataacattttgatgtattcccttccattttccaaatacgtatatacatgaaaatatagtaattcttctctagaaattgaacaacaatggatttactatttttaaaatttctgtttatttatttatttatgcatttattttttttgaggcggagtcttgctctgttgctcaggctagagtgcagtgacgcgatctcggctcactgcaacctctgcctcctgggttcaagcgattcttctgcctcagcctcttaaatagctgggattagaggtgcctgccaccgcgcccggctaatttttttatttttggtagagacggggtttcaccatcttggccagctggtcccaaactcctgacctcgtgatccacctgccttggcttcccaaaatgctgggattacaggtgtgagccactgcacctggccctgtttgtttattttttaagaaaccaggtctcagtatattgcccaggctggtctcaaactccaggacttctcacctcggcttcccaaatatataccgttttgtaacctcattttttttactctgtagtacatctgtcccagacatttgttggtgctagtaagtcttctgcagcaggttgttgttttttttttttttttttttgagacagggtctcactgtgttgcccaggctggtcttgaactcctgggcttaagctgtccatccctgtcagcctcccacagtgctgggattacaggtgtgagctatggcacctagcctaaaatgttttttaagatgaaacatttcaaacttataccagagaagacaaaattacataatgaaccccatgagcccatcaccagcttctaccagttatcatctcatggataatcctttttctgccccttccctccttgattatttcaaagcaaatgtcagatactatttaacttaatctacagacatttcaacaaaacttaacattacaaccgttatcacacaaaagccccccagaaaacattgtctctttttttttttttttggagacaggctggagtgcagaatacagtggcgcgatctcgtcccacttcaacctgcaccccctgggcttagatgatccattcaccttaacctcctgagtagctgggactacaggcgtgtgccaccatgctcagctaatttttgtgtttttcttgaagagatggagttttgccatgttggccaggctggtcccgaactcctgacctcaggtgatcccactgcctccacctcccagagtgctgggattataggtgtgagccactatgcctggctgaagttattttttttatgctcagtcccatatttggcctgtaacagctttctaaatctgtttgacactacccttatatattttgatagctctgttgctttcttgtcttttttattttctccgttgcttactttttaaatttaattaattaatttctttttcttttcctttttttttttttttttgagacggagtcttgcccttgtccaggctggagtgcggtggcatgatcttggctcactgcaagctctgcctcctgagttcatgccattctcctgcctcagcctcccgagtagctgggacaacaggcgcctgccaccatgcctggcttttttttgtatttttagtagagatggggtttcaccgtgttagccaggatgatctcgatttcctgacctcgtgatccgcccgcctcagcctcccaaagtgctaggattacaggcgtgagccaccgcgcctggccttatttatttttctttaagacggagtctcgctctgtcgcccaggctggagagtaagtagcgtgatctccactcacttcaagtctgcctcctgggttcaagcaattctcctgcctcagtctcctgagtaactgagtttacaggtgtacgccaccacgtctggcgaatttttgtattttcagtagacggggttttgccatgttggccaggctggcctcaaactcctgacctcaagtgatccgcctgcctcagcctcccaaagtgctgggattacaggcattagccactgcaccaggcctatgtttattttttattgttttgaaacggagtctcactctgtcgcccaggctggagtacagtggcgtgatttcagatcgctgcaaactcttgtctcctgggttcaagtgattttcctgcctcatccccttgagtagctgggattacaggtgtgcgccaccatgtctggctagtttttgtaattttagtagagacagtgtttccccttgttggccaggctgatctcaaactactgacctcaagtgatctgcctgccttggcctgtcagagtgcttgggttataggtgtgagccactgtgccttgcctcttttctctgttgctttctggtacaagatgttacaggattatcttgtaagattcttgtgtaagacctgaaatctgcttattctaatagccttggttatttttagtgggaaatgatatttgatgagtatcctgaaaactaaatcactctgttcatttttagtgactaggaacttgttttgtaaattgactaacttggtgaaaattaaaattttttatcattagagagaaatgagtttgtgttgaattgaaagactcaatttctagaggctgggtgtggtggcttactcctgtaatcccagcactttgggagaccaaagagggcagatcatctgaggtcaggagtttgagattagcctggccaacatggtgaaaccccatctttactaaaaatacaaaaattagctggacatggtggcaggcgcctgtaatcccagctacttgggaggctgaggcaggagaattgcttgaacccggggggcggaggttgcagtgagctgagactgtgacattgcactccagcctgggcaacaagagcaaaactttgtctccaaaaaaaaaaaagactcaatttctaaaggtcatgggcatagaacaaggtttgtgtactttgggagaattctggttacttttgacctgaccttacacctggaggattggtattaacatattagggccaagcactgtggcccacacctgtaatcccagcactttccgaggccaaggtgggtagaacacctgagctcaggagttcaggaccagcctgggcaacatgatgaagccctgtctctaccaaaaatacaaaaagttaactgagtgtggtggcgcgcacgtgtagtcccagctactcaggaggctgaggtaggatcacttgcctgggagacacaggtttcagtgtgctgagatggcgtcgctgcactccaacctgggagacagagtgagaccccatctcaacaacaaccaaaaaaacagagttgcaggagtcctggtacttggatttttttttttttttttttttagacggagtctcgctctgtcacccaggctggagtgcagtggcgcgatctcggctcactgcaagctccgcctcccgtgttcacgccattctcctgcctcagcctccccagcagcagggactacaggcgcccgccgccatacccagctaatttttttgtatttttagtagagacgggtttcaccatggtagccaggatggtctcgatctcctgaccttgtgatctgcctgcctcggcctcccaaagtgttggcattataggcatgagccaccgtgcccgaccaggtacttggattttaaagaaatcattcagtgagcatttattagattccctgtgtatgctaagctctgtgctaagcgctaaggataaaacaattaaagacattgttcttggccaggcacagtggctcatgtctgtaatcccagcactttgggaggccaaggcaggcgggccacctgaggtcaggagtttgagaccagcccagccaacatggtgaaactaaaatggcagagatgagctgggcgtggtggtgggcacctataatcccagttactcgggatgctgaggcaggagaattgcttaaaccggggaggcggaggttgcagtgagccgagattgtgctattacactccagtctgggtgaaagaccgaaacttcatctaaaaaaaagaaagacattgtttttgccctctaggagagcagtttagctgagcctagtaataacttacatttatgtggcatttttgaatttacagtctacttcctcatacattatctcatttaatccttatttataatccttacttataatcctactttgaagcagaaattactgtccccattttacagataaagcatttctggctcagagagatgaatttgtctaacattgtacagcagacacaacacaccctggacaggatataatcttactttttaaacccagagttcttggctgggcatggtggtacacttctgtaacccagtgctttgggaggcggaggcgagaagatcacttaaacccaggagttaaaggctgcagtgagctatgatggtgccactgcactccagtcttggcaacagagcaagaccctgtctctaaaaatagataacatacctacttacatacttatatacaaaaacggtaaaaagaggctggtctcacacctgtaatcccagcactttgggaggctgaggcgggcggatcacgaggtcaggagatcgagaccatcctggctaacatggtgaaaccccgtctctactaaaaatacaaaaaattagctgggcgtggtggcaggcgcctgtagtcccagctactcaggaggctgaggcaggagaatggcgtgaacctgggaggcggagcttgcagtgagccaagatcgcgccactgcactccagcctgggcgacagagtgagactcaaaaaaaaaaaaaaaaaaaaaaaggtaaaaaggaagaaacaaacccactcacccagaattcttgcactctagtctgggtgatagagcatgaccttgtctttaaatataaataaataaataagtcaaccaacccatccacccttaagcagtttttttgtttgtttgttttttgagacagagcctcactttgttgcccaggctagagtacagtggcatgatctcggctcactgctacctccattgcctgggttcaagtgattctcatgcctcagccactcaagtagctgggattataaggtgtgcgccaccacacctggctaactttcgtatttttagtagacatggggtttcaccatgttggccaggctggtctcgaactcctgacctcaagtgatctgccggccttgcctcccaaagtgttaggattataggggtggcccccacacccagccaaccaaccaattcttaaccagttttttctgactttctatattaaggtgtttattttattttatttatttatttgttttcaagaagaggatttactatgttccccaggctgctctggaactcctggattgaagtggtcttcccactttagtgtttattggtgttttggtgtttttatttcaacagaatacaataataaagatagactggttcagctagggaaaatgatccatttttcttcccttcctcaaacaggatataattgatacagcatgtgaagtattggccgacccttctcttccggaactgttctggggaacagtaagtatgtcagagagagtcactgcatagcaaaagaattgttcaaacacttgttttcttacaggttttgtactaagcattcatgtgcattttctcatttaatcttcataaaaacgtatgaagtagatactattactgtccctcttttaatgtgatgacacatgacacttagagatgtgaagtgatttgctcaaagtcacacatagaaagaggcagccagaacccagttctgtctgacttgagtctgcagcccacgttattaccagtgtgctgtctccagcccaccaggtttttttttttgttttggttttgtcttgttttttgagatggagtcttgctctgttgcccaggctggagtgcaatggcgcgatctcggctcactgcaacctctgcctcccgggttcaagcagttctcctgcctcagcctcccaagtagctgggattacaggcgcccgccaccatgcctggctaattttttgtatttctagtagagacggggtttcactatgttggccaggctggtctcgatctcctgacctcgtgatctgccagcctcggcctcccaaagtgctggggttacaggcgtgagccactgagcccggccttccaacccaccagttttttgtttttatatatggcagtgttttagacaccagtgttcctgcagctcttgaaagtgcttttaggagattgtaaccgtagcctatgagttgtcagggtattgtaactagttagagtgagaatttggctttgaaaagaacaatttctcaccagtacttgctctgagcattgacaacagtctcaaacctcaagatccaactgatgatctacctgtgtattttaccctcttttttgtaagatgctgtctgatgttatagaaccacagtgctcctgggagaaggagaagctggtatgaaacagtatctagagtgaggatctgtggttgctgtgtggtagccaactgctgacatagttgggtaatttgcactttagtggaaacatgtaatgcacaggtgaacaatactgtcttcccatagaaaggatggctgggaagaggtcactggatagaatagtaatctttttttaggtccctcactaaatcaattattttatatcctttttcagtggaaatatgaaagtcttaaattattaaggagggatgatatctgtctaaaaggaaggattaattctaaattttctcatgattgctgggaaatttggagagatgttaatttgtggataatgtgaagatcagtgatttgtccccttccaccacaggagccaacttctggccttgggatcattctggacagtgtgtgtggaatgtttccccaccttctctccccactcctgcaactgctccgagccctggtatcagggaagtccacagccaaaaaggtaagttgcttagtcagataagtaaagagaatgggagattctttatggagactttattaggaatcttttttgctttccacattgcagttctactgccatgacaaaagtttgtctgaaggtgaatgaaagataccaaagatagcacctcaattctaaaaaattaaataatcttttcattaagtacctattgtagatactgtgggactaagactaagtataaagttccttaatatctagttggaagttactagatataagaaataaatagctaagagccaggtggtacagagtaaatgtcatttgagcaataaagaccatactgttcaggagagataactgcccttgtggagtgatggggacttgagttgagtgttaaagcccagtgaagatttggcgaggggcgcagaaggcagttccaagaacagtcacagtggtgggcttgcaagaagtttgagagtctggttgaaagagcagactgtgggacctctccttgcttatcctggagggaaatgtgtgatggttttttctgttttggcaggtgtatagcttcttggataagatgtctttctacaatgaactttataaacacaagcctcatgatgtgatctcccatgaagatggaactctttggcggagacaaacacccaaactcctttatccccttggtgagataaagagatcccccttttatgacagctttttttttttttgatgtcttgctctgtcacccaagctggagtgcagtggcaagatcatagctcactgcagcctcaaattcttgggctcaagtgattctcccaccttagcctcccaaagcactgggattatagacgtgagccaatgcatccaggcagttacactctgaggctcacatctgtaccaggtgctcaaagaggaaaatatacagggaatagcctcaccgttttaatcctggcatcatcaccactgacttctccagtcatctaggcactaacagtcctatgaggtactgttgttatcatcatttgaatggaaaactgttctttgcactcaagtgattttcagacatatagaaagagtcacttgtcggccaggtgtagtggctcacgcctgtaatcccaacactgggattacaggccaaggtgggcggatcacgtgaggtcgggagttcgagaccagcctgaccaacatggagaaaccccgtctctactaaaaatataaaattagtcgggcgtggtggtgcatgcctgtaatcccagctactcgggaggctaagacaggagaatcgtttgaacttgggaggcagaggttgcagtgagttgagatcgcgccattgcactccagcctgggcagcaagagcaaaactccatctcaaaaaaaaaaagacacttgtctacatgacaagaacttttttgtgtattttagttgaaaaagctttaggaatgttagctactaagaagaaagcctgtgaatcccagaactttgggaggccaagacaggcaaatcacttgaagccaggagctcaagaccagcctggtcaacatggaaaaccccatctctactaaaaatacaaaaattagccaggagtggtggtgcgcacctgtagtcccagctacttgggaggctgaagcacgagaatcacttgaacccaggaggtggaggttgcagcgagccgagatcgcgccactgcactccagcctgggcaagagggagactctgtctcaaaaaaaaaaaatgtctgtgagtttgtgtatctctgtgtgtttaaaatattgatgtctggtagaggagttacattttttatttatcctcagatattagactaatttatctttctctctcagggggtcaaaccaaccttcgcatacctcaaggcactgtgggccaagtaatgttggatgatagggcatacctggtacgctgggaatactcctatagcagctggaccctctttacctgcgagattgaaatgttgcttcatgttgtttcaactgcaggtaaggtcagctttcggaaacatcacctacgaggaggaaaagtggatatgcttggaggatttagaaaatagaatatctacataaaatttagaaccatcaagattgtgatttgtctgatttgtgtatctgggtctcagagactgttcagtgatcttaaaggggttgtttgccgtgaggtcacaggctgtctttcttctcagatgtgattcagcactgccagcgagtcaaacccatcattgatctcgtccataaggtcatcagtacagacctgtcgatagcagactgtctcctgcccatcacatctcgcatctacatgctgctgcagcggtgagtctgtcttggctgaccctcagctgcccagtagagatctcagcacttgtgccctcagtttgcaggaacctggacacatacccactgggttaaagttcgcgcatattccttggttttcctgtttttatatctgtgagggttttcctgtttttatatgtctgctgaggggagagactggggagagagaagtggaaaaatgtttgtgagggaaccagttgtattatttgctttattgagtatagtgtattgttctccaaccaggttaacgacagtgatctccccacctgtggatgtcattgcttcttgtgtcaactgcttaactgttttggctgcccgcaatccagcaaaggtgagatgccagatcttcccaagagccaaaaatgtagcacttggcacatacctgaagatatgtgggcatttaactcttccttttccttctcaggtctggactgatcttcgtcacacaggttttttaccatttgtggcccatcctgtctccagcctgagtcagatgattaggtgagccaagtcctagggtggtgggccatattccctagtgagaaccacatatgtctcagatctagcctaggtttattaattttatttttatgtatttgtttgtttatttttttgagatggagtctcactctgttgcccaggctggagtgcagtggtgcagcctccgcctcccatgttcaagcagttgttgtgtttcagcctcccgagtagctgggattataggctcgagccaccacgcccagctaatttttgtattatttatgtatttatttactttttttattttttgagatggagtttcgctctgttaccgaggccagagtgcagtggcacgatctaagctcactgcagcctctgcctcccgggttcaagcaattctcccacctcagcctccccggtagccaggattacagatgtgcggcaccacgcccggctaattttttgtatttttaatagagacgaggtcttaccatgttggtctgactcgtctggaactcctggtctcaagtgatctgcccgccttagcctctcaaagtgctgggattataggcgtgagccaccgcgcctggcctgatttttttttttttttttttgagatggagttgcgctcttgttgccccggctggagtgcaatggcgtgatcttggctcaccacaacctccgcctcccaggttcaagtgattctcctgcctcagcctcccaagtagctgggattacaggcattcaccaccacgccccggtaattttgcatttttggtagagatagtgtttcaccgtgttggccaggctggtctcgaactcctgacctcaactgatccgcctgccttggcctcccaaagtgctgggattacaggcatgagccatggtgcccggccgagagcaagagagatttcttatccaacatcaatcacgttagtatgtgagcatttactttccagcccagaaaatccagaggtttctagattcagggacttggtgtcccgttattaagccacaatcactctgtactttttctcatttcatgggttctcgagctcagccagtagaccacttaccagtacacaggctccatcttactacctgagcattctcgccttgctgtctcttgacaaaaatgtttccctgatgttcctttgatttttttactttcaatctaggttttacatcaataaaacatgttcttaatgtttaccctgggtacagaactgtcttgattggattatttccactggagagcttttctattttatattcaagtcatctagactataacaagaatgctctatgattagtttcttgaaaccttgaaatttccctatcattttttttccctctacttctttttccagtgcggaagggatgaatgctggagggtacggaaacctcttgatgaacagtgaacagcctcagggcgagtatggggttactattgcctttctgcgcttgatcaccacccttgtcaaggtacagtctgattttgttcacaaagggcagaaaaagaaaaggtccagtcttgtcagatgactctgaaatagtttccctggcccctggtgctgtaatcttcttgtctgtaggcagaatagtcatcttgaagttacagtgacaacagtttctatgtattgagtacctagtatgtgccagttatgtactctattaggtgcttaattatgtgaatttatttaatgattggaaggtttatgaagtagaatggaagaggccaaaagggtattgcagttactatcaagctattttgacagtaacctgggataatatcatatcccagtatatatacatgtgtgtatattcctgaagcaaaatttcacagtttatttcacaacatttattcttaccacacaagttgtaccctgatattttctattcagtctcctccctatttaagtgaattttgaccatagactgatctcataatctactaatgggttacaactcggtttgaaaaatactgacatagagcataaataatgacatagagcataaattttggagtcagaattaggtttacattcaggttgacagcttactagctgcatgaccttgagcaagtaaagaatatcttaagagtctctaaaacagaatgctatatggtctctacctcatgggattgagaagagggtcatgcatgaaaaaaactatacttcctgcctgcaggaatcaatgaatgcttaaaaagaaatgattgtaggctgggtgcagtgattcatgcctgtaatcccagcactttgggaggccgaggcggatggatcacctgaggctgatcaggagtttgagaccagcctggccaacatggtgaaacctcatctctactaaaaatacaaaaattagctgggcgtggtggtggacgcctgtaatcccagctactcagtgggctgaggcaggagaattgcttgaacctgggaggcggaggttgcagcgagtcgagatcacgccattgcactccagcctaggtgccaagagtgaaactccatcttgggggcgaaaaaaaagattgcatatagagataggaatatatagatatttatatataactaaagagtccccatttttagtagaaggatgctacagttaacagatatcattgggtatcagatttttgcatatcagatctcctttctagtatttcagtgatgggattgaggttagggacggctggcaatcatgatagtgaagtggcattgttcatcatcagcaatcctctatcctttatgtttaaggtgcctcccttctgtccagatttagcctgcatcccttttcttcgtgttggtgccttttgtgacattctctttcatcactttttctattctagaaaagacccacaacttgggctcaactataaagtaggacttttgatgtttcttttttttcattgatgaccaaggtttgcctagatttcctttggacctatctatggttttggaattaaatctctaggtaactaaatgacttttccttaaatgtgcggaagtcctcactgcatggtttcttgtaggggcaacttggtagtacccagagccaaggacttgtaccctgtgtaatgtttgtgctgaaggagatgcttcccagctaccataagtggcgctacaactctcatggagtgagggaacagattggtaaggacagcatgggcagggaagacctggggatttctggccccactggagagcttttttctttccctttcttgagataaggggtcatttcacaaggccacatcattcctctgtcttttctggagtccaggttgcctgatcttggagctgattcatgcgatactgaacctgtgccacgagacagacctgcacagcaggtaatgaagggttgattactagagcttggtgctcgccaaggcaagacacgggcttttgctgtgcaaagccgtctcagttcttccagagaatttaccttgcttgagcccagaactcagtaatcttgaggttgttagttgctttccattggcctgtttatcatttctcactgtggacagagaagtaggaatgagagagagagagagagagagagagtgtgtgtgtgtgtgtgtgtgtgtgtgtgtgtgtgtgtgtgtgtatgtgtatacatacactaatatattaatcattctttatgatcgttacaaaagttcattcctgacgagacactcttcatatatatctgcatcccagggccagttactatgtattcttggttttttcctctttctgtattgactgtaactttctttccatgctactgcttatagatgtcttattttaatggttctatgcattccatcatatggattaattatgatccttttcagtagctgtatctgttacttgatggacatttagattgcttctcagggtgatctttaggtgatcaagtctgtttcaggaaagtgatcagagtgccttcagcttgcagagagctggtctccagtgtccagtaggttaggttagccaccctagcctaattggacaatgcccttccttccaagatacactgagtggctccctggtaactcagaatacctctgtcttccagtcatactcccagcctgcagtttctctgcatctgcagcctggcatacacagaagcaggacagacagttatcaatatcatgggcattggcgtggacaccattgacatggtgatggctgctcagcctcgaaggtagggctccttctccacgttccctttgtctgtctttattgtgcctgcatgttactaataactccagtttaagttaacttgcagtagcttttagaagacgacattgttcttcctaggacatagcctttacataccctagtggctgctgtatagattggcgtatagcaaagggagttgattactcctcctctctcctagtttggactggggcctctaacagaagctgttgaactctgggattattgttggaatctaattcatgagagcacatatattgcgaatgaagtcatactgtctgaatcatctttggtttccatttggcaccctagtgatggggcagagggccaggggcagggccagctgctgatcaagacagtgaaactggcattctccgtcaccaacaatgttattcggctgaaacctccttctaatgtggtgtcccccctggaacaggctctctcacaacatggtatgtatttctcttccagtcacaacatggtatgtatttctcttccagtcatttttgctcataaatacgtatcttaggcagtgtttttggatgtcaacagtattttctgcttcttgaggaagtttgggaatgattaccagctcctttcctgaaattggaaacaaaaggactagatggtactttatttctgcctcctattgatgatagaataatagttaagaatgcagatttgaagtcagactgccttggttcaaattttgtatccaatcaactgtgtgaccttgggtacgttattaaacaactctgcctctgatttctcatctgtaaaatggggataatggtacaggttgagtatcccttatctgaaatgcttgggaccagaagtgttttgggtttcagatttttttttcatattttggaatagttgcagtatacttaccagtttagcataaatccaaaatgttccagtgagcatttcctttgagctatagttagagattttgacacattccagattttttttaattttttaatttttttttttttttttttttttttttgagacagtctagctctgttgcccaggctggagtgcagtggcgcaatctcggcttactgcagcatctgcctcctgggtttaagcaatcctcctgcctcagcttcccgagtagctgggattacaggcatctgtcccacgcccggctaatttttgttttgttttgttttattttgttgttttgttctgtttggtagagacgagctttcgctatgttggccaggctggtctcgaactcctgacctcaggtgacttgccctctttggcctcccaaagtgctgggattacaggcatgagccaccgtgctctaatttgaggttttcagattatggatgcctgtagtatcttcctaataagattataataaagggctgggcatggtggctcacgtctgtaatcccagcactttgggacggtgaggctggggaggatactttgagtccaggagttcgagaccagcttgggcaaaataaggagacctccatctataccaaaacaaacaaaaaaaagtagctgggcctggtggcatatgcctgtggtcccagctactcaggaggctgaggttgggggattgtttgaagcttggcaggtcaaagctgcagtgagccatgattttgccactgcactccagcttggacaacatagtgaaaccctctctcaaaaagaaaaaaagataggctgggtgcagtggctcacgcttttaatcccagcactttgggaggccgaggtgggcggatcacgaggtcaggagtttgagaccagcctggccaacacagtgaaaccccatctctactaaaaatacaaaagttagctgggtatggtggtgggtgcctgtaatcctagcactttgggaggccgaggtgggtggatcacttgaggtcgggttcaagaccagcctggccaacatggtgaaaccctgtctctattaaaaattttaaaaattagctggacgtggtggtgcacgccagtaatcccagctactcaggaggctgaggcaggagaattgcttgaacctgggaggtggaggtgcagtgagtcgagatcgtgccactgcacttcagcctgggtgactgagtgagactctgtctcaaaaaaaattaataaataaataaaaattaataaaataagcacctattttattcaaaatgtatctttgctgtcgatgagttgggttgaactgtttatccccaaattctgactattcttttgctcctcaatcaagagaaggatacagccacctaggtttgctgtggccctccaagtacttgagggtaaattccttcacatacacactgtgggtcttttttgaacagtcagtgctctaaggacttgaattaggcacacttgatatctaaactgtttcctgtgctgctttaggtgctcatggaaacaacctcattgctgttctagccaaatacatctaccacaaacatgaccctgctttgccacgtcttgccattcagctgctgaaacgtctggccacggtaggatcgtacttcatgcacacacactgtttatatgagggtgtttttttccccctgattacaaaagacatgctcaggccacgtgcagcggcttaacgcctgtatataattccagcactttgggaggccaaggtgggaggatcatttgagcccaggagttcaagaccagcctgggccacatagtgagaccccatctctaatatagaaaaaaggagaaaaggctgcgtgcggtggctcatgcctgtaattccagcactttgggaggctgaggtgggtagatcacaaggtcaggagttcaagaccaacctggccaagatggtgaaaccctatctctcctaaaaatacaaaaattagggggccgggcatggtggctcacgcctgtaatcccagcactttgggaggccgaggcgggtgtatcacagagtcaggagatcaagaccatcctggctaatacggtgaaaccccttctctactgaaaaatacaaaaaattagccaggcattatggcaggcgcctgtagtcccagctaattgggaggctgaggcaggagaatggcatgcactagggaggcggaacttgcagtgagctgagatcgcgccactgcactccagcctgggtgacagagcaagactccatctcaaaaattagccaggcgtggtggcaggtgcctgtgatcccagctacttgggagcctgaggcagagagttgcttgaacccgggaggcagaagttgcggtgagctgtgatcacgccactgcactccagcctgggcgacagagcgagactccgtctcaagataaaaggagaaaaaagacatgcttattgtaaaatatttatttaaatgttacaaatagatgtaacagaaagttaagatgccctatgatctccttattccaagaatccctatgggcagggggatatgccatgctccagatttcttttttttttttttttttttgaaatagggtctggctatgtctccaaggctgtgctccacatttcttatctgtgttcttgtattttaaaaagtatcggctgggcgctgtggctcacacctgtaatcccagtactttgggaggctgaagcaggtggatcatgaggtcaggggttcaagaccagcgtggccaagatggtgaaaccccacctctactaaaaataccaaaattagctgggtggcaggtgcctgtaatcccagctactcaggaggctgaggcaggagaatcgcttgaaactgggcaacagaggttgcagtgagctgagatcacatcactgcactccagcctgggcgacagagtgagacaccgcctcaaaaaataaaataataaaggtatttagggctgggcgtggtggctcatgcctgtaatcccaggactctgggaggcccaggtgggtggcttgcctgagctcaggagtttgaaaccatcctgggcaacacggtgaaaccccatctctactaaaatacaaaaaaattagccgggtgtggctgcgtgtgcctgtagtcccaggtactcagtaggctgaggcaggagaattgcttgaacccgggaggtggaggttgcagtgagccgagttcacaccactgtgctccagcctgggcgacagagtcaaaaaaaaaaaaaaaagtatttgagtgtgtacttttgttcttgataaaagcagaattcctggtactgtttttctttcttttttttttttttttttgagacggagtctcgctctgttgcctaggctggagtgcagtggcgcgatctcggctcactgcaagctccgcctcctgggttcagccattctcctgccttagcctcccgagtagctgggactacaggcgcctgccactgcacccggctaattttttgtattttttttagtagagacggggtttcaccgtggtctcgatttcctgacctcgtgatctgcccgcttggcctcccaaagtgctgggattacaggcatgagccaccgcgcccagcccttcctggtactgtttttgttttgagacagtcccactccatcacccaggctggagtgctgtggcatgatctcactgcagcctccactcccaggttcatgcgattctcctgtctaagcctcccaggttgctgggattacaggcgcccactacaacacccagctgatttttttgtatttttagtagggacgaagttttgccatgttggccaggctagtctcgaactcctgatctcaagtgatctgcctgcctcagcctcccaacatgctgggattacaggcgtgagccactgtgcctggcccctggtactgttttatgactggcttcctttacttgataccatatcaggcagtcttgatgtgcttcatgccacataggcacatttggacttccttcattcttttttgtcttttttcctttttttaatttggacttccttcattctttttaatgtttgcatatcacatcctagaatggatgcatcctgatttatttgcgctactttctgtctttcactattacaagcagtgctgcagtgaacattattatccctaccaccctgtaaacatttgtttacagttccaaagatttatgtaggtataaatgaacatgatattttttattagatatttccaaattaccttccaaaaaacattgtaacagtttatacttataacaccaagtattctatcgttgctgcaaggtcttcatcattgtttagtctttgccaatctaataagcaaaaaaatgtttcacttttcagtttgtatttatttaaccatgagggaagttgagcatttctttatactgattactgtctttcctgtgaatttgcgggcatctcatgcttgtttgtggtgatgtcccttttagcccagagctgtagtctggatgcttccctttctgccaattttctgggagctcttcagtgcccttctgtgggagcccattgaggtttttgtggaagcagagctctaagcctgtgtgttccggtctccaccaggtggccccaatgtcagtgtatgcttgtctgggcaatgatgcggctgccattcgtgatgccttcctgacccgattgcagagcaaaattgaggacatgcgcatcaaagtcatgattctagagttcctcactgttgcagtagagacccagccaggcctcatcgaactgtttctgaacctggaagttaaggatggcagtgatggctcaaaggtaagcctgtaacctgggatgacactgggagttggctcactgggaggcagatgctgggctctgcaagtacagctgctggcagtggctgtggaactgaactcttacctgtcccttcttgcaggaattcagccttgggatgtggagctgtctccatgcagtgctggagctgattgattcccaacagcaagatcgatactggtgcccacccctgctgcatcgtgccgccattgcctttttgcatgctctgtggcaggatcggagggacagtgccatgctggtcctccgaaccaagtaagtctgcctctgggagtagtttcattgttctggtctataaaatgggagtaataatagctcttatcccagaggtttgttgtgacagttcactgggaataagagtgcttagtcctggttcaatacctgggagttttacactaattctctttctaatgctgctgcaagtattaaggatctttaaatattaagcacctggaaggttcagttgcttttgtgttcctgccttttgctaactagctgcatcaaaactcattattcttgagaaacagtagattcaggagagaggcgcttgctcaagtcactggattgaatgaaacattccgttctattggacctgctggcacaaagggaaggagtgttaaaaggctaaatttgggagtctgctgtcttatttccctccctcctcttctgtggggcttttgggaatctacagtggaaggaatcttgaagagtttttattgatcaactctataatgcataagtgtgattcatgagaggaaaatgtaattttatctatggaaacctttcatttatacgggaacaactgacttatcagacacatattaggattgagactggtaaaatatgaagtgaccaccaaagggagcttgagagaggagaaaatgactgtgagagggaaaaagttatgatttcaaacatttatttcctttttagacccaagttttgggaaaatttaaccagtccgctgtttggaaccctttctcctccctctgaaacatcagaggtaagctgtggcagagggcaggatggtggctacaagtcccttggaggaaaggctgtgggctgtgagatggggccgtagacaatgatacctcccctaattaaacaacagaatgttcccttcactagaaacgtctttctcagggaagtgccagctttctgtccctttgatgtcttgctttgggaaggaaagtggtttgcgctactgtgtgttggtggctctgtggtcttctccattcagttggagacgttgtggacctgacgcctctgctcttgcaagtcaggacattcacattcaacaggggttgtgctaacttgttctgcaagtgttgggcccctgctctgttccctgtttgatatactgggggagatcagtgatcagagatgtgataattgcctgttctgctatctccacagcccagcatcctggaaacctgtgccctaatcatgaagataatttgcttggagatatactatgtagtaaagtgagtactttcccctcttgagattttaactgaaggttgggggagtgggagttggtggcctaccactgggtgcatggctggaagagccaaggcagaggagagaactggtttggaaccattcatggaaggccagtgagctgtgttcctggccaatccaccgatggcatttatgattgtcagaaagagttattgtgaagcaaactccatgcaactgggattttatggaggaggaatcctggaaaggcctcagcctaacccacacgttggaggtgtcctggagccgtctgcctttaagcccatgcaaggtcgttttctctgcctcaacaagggtctgtacccattatattcccatctgctttcaaaatctaactggaggttttttcttgacactgtaggggttcattagaccagtcattaaaggatacactgaagaaattttccatcgagaaacgctttgcctactggtcagggtatgtcaagtcattggcagttcacgtggccgaaacagaaggcagcagctgcacctccttgttagagtaccagatgctggtgtccgcctggaggatgcttctcatcattgccaccactcatgtaagacccttttggggagagttttcactttggtaccttagcaatgatgtgttgacatgagcctagcagatacagctccttgtgcggaagaattaatcagggtttatccctgagagctaaactgtaataggttctatgctgagagattgggactgtggggtatttgagggtgttgggtccaggagaccattaagaggaatgcagagaagtgatttgaaatcctttcagagttcctaaagcctcctgtacctcccttaggccttggctgggtcttagctgctccctggctgcatctgcctcttgtgcaaaggcataactgtcttctcgtgctgtgtaccttgtagatgctaggtcaataaatacttgttgactagtcagcagggagctgtgacagctgcagcagcaccctctctaaaaagcagtttgtcattggttctagaaactgcatttcctggtcttagaaaaagaacagaggccattgtctctgtactctgtctactgggagttggttttgagagagagagataacatctggaagaaatgcattgttcttggcttttttgtggtttgactccgtcacgctgtatcataaggacttggtattgaagtgttctttcttggggtatccagattaatttttttttttttttcttgagacggagtcttgctccgtcacccaggctggaatgcagtggtgcgatcttggcttactgcaacctccgccttccgggttcaaggaattctcctgtctcagcctcccaggtagctgggattataggtgcctgccaccacgcccagctaatttttgtatttttcgtagagatggggtttcaccttgttggtcaggctggtctcgaactcctgacctcaggtgatccacccacctcggcctcccaaagtgctgggattacaggtgtgagccaccacgcttggcccagattaatcttttgacttcatgaacaacttcagcttgatagatgcctcctttttccaagcacctcctacatctgtgaaatttgttgcctagtgccagactgcccacatgcttggagctttgagcctaggaggggcaggtttgtggctactcttgctgtggcatggtggttttggacccctaaggctccaaacacacttaaaggctcacctgtctttgagaatggttgattccccagggtataacctttatgtcacctgccttttaggccctagttaggcagcagttcttgaattgtagctctgaaaatcccaccatcctctttccccaaaggaaacctatctggctctctgtctcacctgtctacctatacaaaagaaaagaaaaaaaaagagaaagaaacctaagtccaggatgttggtcacccattcattctcttaatggcattagtggaacgcttccaggcattgagatgcagcagtgaataaggcagataagatctttgatcgcatagagagtgccctatgatggaggaggtaaattataaacaaatttagcaataaaaaatatggtttcagatagtgataatttgctgtgaaggaaataattaaagtgctgtggtaatgaacacatgagatagaagtagtcagggtggccttctctgagtggtgatgtcccagctgagagctgaatgtgtgaagaagccttccaggtggagcccgtggaggagagaagtctaggcagatggacttgcaagtgcaaagttccagcagtggaaaagagcttgatatgttcatgaaagaggcaagcagggttggactagagtgagcacagatgggactgatactacatcagttggaccagatcctgtggggtctttggaccatgttgaagagcttggtttgcgtttcccgggcactgggaagcctttcaaggattctaagcagagggaggacagagtctcaaagaggaggtgaacctgggcttgattctgaccatatctaagggttgacagaagaacagcagggccttcaagccctattttactttattttttagggaacaggatctcactatgttgatcaggttggagtgcagtggtgcaatcatggctcactgcagcctcaacctccagggctcacgtgatcttcccacctcagcctcccaagtaactaggactacaggcatgcaccaccatacccagctaattaaacattttttgttgttgttgagatagggtctcatcatgttgcccagactataagccctattttattttatttatttatttaagacggagtctctctctgtcgccaggctggagtgcagtggtgcgatctcggctcactgcagcctccgcttcctgggttcaagcaattctcctgcctcagcctcccgagtagctgggactacaggtgcgcgccaccatgcctggctaatttttgtatttttagtagagacagggttccaccgtgttggccaggatggtcttgatctcctgacctcgtgatccgcccacctcagcctcccaaagtgttaggattacaggcatgagccaccacgcccggcctatataagccctattttaaatcagggagactgttttaccaatgactaattgcctagcagaggaccccatgtttcttggcctctaaaatctggaaaattttcccagctgaaacctttttctgttcctttgcaggcagatataatgcacctgactgactctgtggtgcgtcgccagctctttcttgacgtgcttgatggaaccaaagcattagtaagtgtgtctgggagattttacatttctcccagggaggttgtctttgaagtcaaatagcagaggtcatgagtctgccagccagccgcacaaatagtcaggtcacagggctcacgttggcctgggaggcctgagactgtagtgggtcagcagagctctgctgctgccatgccaaccctggcttctccccctccactccactcctgtgagctcactgctggggaagaaaggcaatgaggccggaggtgccctgtggatggcatgcgaatctttccactgacttctgactggtgtgctgtctcctttcagctcctagttccagcctcagtgaactgccttcgccttggctccatgaagtgcactctgctgcttatcctcctccggcagtggaagaggtgaggctgtgccaggagaggcaagcccgaggccagagccttcttgtcagtgcctgcttgccttcctgaaagggagaaatagtgggtggaagctgggctggttttccatcttgaggaatgggagtgacatagcagataggagggtgaggcagactggtggatatcctgagatggagcaggggcagtgtgtggccttttatgaggtattttgtctcactccccaccccgtattcttttttttttttttttttgagacggagtctcactctgtcgcccaggctggagtgcagtggcgcgatctcggctcactgcaacctccacctcccaggttcaagtgattctcgtgcctcaacctccctagtagctgggattacgggtgcgcgctaccatgcctaatttttgtatttttagtagagacagggtttcaccatgttggccaggctggtctcgaactcctgacctcaggtgatccacccgccttggcctcccaaagtgctaggattacaggcatgagccaccacgcctggcccacccagtattctttctagagagttaggttctgtggatgaaatccttggacccttgacggagatcctggagggagtgctgcaggccgaccagcaactcatggagaagaccaaggccaaggtgttctcagcattcatcacagtgttgcaaatgaaggagatgaaaggtgaggggcagaggcagggggagcagcagctgcagtctgcccactcctgctgacagccaggcagggcttccttcagcttagggccacacatttcttctgggacttttgagtttccagtcatggaattcttaccccaagaaagctatttttttccctcatgtgtctctccctcctctcccactggacagatgctgtccctcctagcgccctagtacatctccagccccttcctaggaaggaaaccttggtgtacagtgagagttggcctggtgagcatgacagtgtccctccctgtctattctacagtaagtgacatcccccagtactcccagctggtgctgaatgtctgtgagaccctccaagaggaagtgattgcactcttcgaccagacccgccacagtctggcattaggcagtgccacagaggacaaggacagcatggagactgacgactgttctcggtcccggcacagggaccagcgtgatggggtgagacagtgccctagaaggccatccgtcctttccactgcccgccagctctgtgcctgactctggggataagtagtgatcaagacagatagtcgctgcacttctggagttcacggcctggtgggaaaggttaatagatcagacactgcagaaaagcagaagcagcccattgtactgcaggagagaagtgcagggagaacttagtctcacttctgacttgaactgggacttaggtgccttttcagcaatgacttagagattgtagccgcgggcaaatgcaggatccgaagtgaaataggaaatgatgtaaggcttttaagcaggggaaaaagttgatctgatttttactctagaaagatcactctggacttaaactccaggcctcaagccatcctcccagttcagccttccaaagtgttgggattacaggcgtgcccaagaaagatcactctggatgcagtattgaatagtatttttcaaattgtgggatcatgacctattagagagagtcttgaaattagcacattttgttacaaccagtctcgctctgtcgcccagggtggagtgcagtggtgcgatcttggctcactgcaagctctgcttcccagattcacgccattctcccacctcagccacccgagtagctggggctacaggtgtctgccaccacgcccggctaactttttgtatttttcatagagacggggtttcactgtgttagccaggatggcctcgatctcctgacctcgtaatccgcccgccttgatctcccaaagtgctgggattacaggcgtgagccaccacgcctggccacaaccagcatttttttaaaataaagtagaataaagtgtttaagaaaatatcactgtgctttgtgtgacattagggtaggtattattagtgaaaaactgtaaacgtgtacatgaggatacagtctaaaaagtctttatgggccgggcacggtggctaacgcctgtaatcccagcactttgggaggccgaggcgggcagatcatgaggtcaggagatggagaccatcctggctaacacggtgaaaccctgtctctatgaaaaatacaaaaaattagccgggcgtggtggcgggcacctgtagtcccagctactcgggaggctgaggcaggaggatggcgtgaacccaggagcggaggttgcagtgagccgagatcgcgccgctgcactccagcctgggggacagagcgaggctccatctcaaaaaaaatgtctttatgactctgggtcatggccaaaaagaaggttgaaaggccactggtacaaggatagattagagaggatggagcaggattatttaggagatggttgcagtagcagagcaggaggtggcatcgggcagggtcgtaggggtccctcagactccatgtggcagagttggttggagtgtccaacatgagacgaggtggctctgacaagggtggtggcagtgtgggaggtgggagggaagaggcgggggtagctctggtcagtttagggttgctcattagattggctggagttgctgctgttcattgagagctggacataggagaggggcagggtgggagagagtgtgcattctgtgttactcaagctcacttagcaatgtgtgtaaccaagcaggtcttgggcaaccaggcccaccgctgcctgtcgtcctcttcctcctcctcttcttcttcccccttttactcatctttgcctctgggcaggtgtgtgtcctgggcctgcacctggccaaggagctgtgtgaggtagacgaggatggtgactcctggctgcaggtaacccgcaggctccccatcctacccaccctcctcaccactctagaggtgagccttcgcatgaagcagaacctgcatttcactgaggccacattgcatctgctcctcaccctggctcgcactcagcaggtaggaggccagcccgaaggcaggagggagcgtccttgcttgcctgggtgggttctgacaatcccagaagctgtgatctagcctgagagccctacctaccctaggcagggcaggggcaggctccatctcatttcctgtctttccctcctcccagggagccacagcagtggctggagctggcatcacccagagcatttgtttgccccttctgagtgtgtaccagctgagcaccaacggcacagcacaggtgagtgtcaggagcttgccaggaggcccagcctgaccaccctacagttccagttgaaaagtgtcctcccctacctttccccggaagttgctttcctctaaattgcctaatacactgatggtgaggaatcttccctgcccccaggcggatctctagcaagagaaactcaccactaaaaggcaccgcctggcctttgtgcactacctctgggagatgggatggattcttcccattgcaggtgtgaggaagactaaaccagattgataacacatccctggaccaggcctctagccaaggcagctgtcctctcctgtcattcccaaagacagtgtgtcattgtgacttctccacccctgcaccaccagaccaggactgggagaagggaagtgggtggtctgggggcttgatggggcctcagcaccctgccctctgtgtcccttggttatttctagtttaacagatacctcctaatttcaaaagagtagtcttcacctgaacctctctctctcatgagagtcgtgaagtatttggtcatctagcccagctaccccttagaggaagtatgtaggggccagagcagggcagtgacatgtccaggttcgcatagctcgtcagtggcagacctgagtctggaaccctgggtcttgtgtctcagcctggtgctctttccttgaatctgctggtgttggcccctttctggccctggtggccagacagtggctgtgtctattctgggagatcttttcctttcagcgcagctgggctgccttagttgctgtactacaaggaggtcctgcctctcagcagggttcctgagcttgtctgctgtttgtatcttagacacctagtgcctctcggaagtccctggatgccccctcttggccaggagtctaccgcctgtccatgtccctgatggagcagctgctcaaaactctgcgctacaacttcctgcctgaggccctggacttcgtgggtgtccaccaggagcggaccttacaggtgaggggctgcctgcattgcaggggtgggagtttcagggtaaaaaaggtactgggccattcatggggcaggtgggtgtggagcctgggcctcagtagcggagggttgtcgatgccttcatttttgagatgctctaagtactctgctggctcactggccagctagtctgctgaaggacgggaacggtctcgggtcagaatcctggttgtaccactaagccatttctttgccaactcagcatttgggggcctgggacgttgcctctccacaggagggtaggtgtgggtatgtcaggtccctcagccatccccatctttccctgatgtgtgctttcctcccagtgcctcaacgcagtgaggacagtgcagagtctggcctgcctggaggaggcggaccacaccgtgggttttattctgcagctctctaacttcatgaaggagtggcacttccacctgcctcagctcatgcgtgatatccaggtgggggcccaagatggtgtcttggagtctggggtaatgcttggagacagggaggctgtgaggtctcactggggcactcctagtgaattgcaggatgttcctgaacgggggcttttcccttggggagcacagggtttgctgtcatgtgcttactctggctaaatgtttccttccatagtcaagggcagccatgtaggttaagaatttggacttttatcagttagatcttggttcagatcccttaagaatacacttggggccgggcatggtggctcacgcctgtaatcctagcactttgggaggcagtcaggagttcgagatcagcctggccaacatggtgaaaccctgtctctactaaaaatacaaaaattagctgggcgtggtggcacgtgactgtaatcccagctactcgggaggctgagttgggagaatcgcttgaacctgggaggcggaggttgcagtgagctaggatcgaaccattacactccagcctgggtgacagagcgagactccgtcccaaaaagaaaaaaaaaaaaaaatggccgggtgcaataggctcacgcctgtaatcccagcactttgggaattcaaggcgggaggatcatgaggtcaggagctcgagaccaggctggccaacatggtgaaaccccatctctactaaaaataacaaaaattagctgggtgtggtggcacacgcctgtagtcccagctactcaggatcgggaggctgaggcaggagaatcgcttgaactcaggaggtggaggttgcagtgagccgaggtcacgccactgcactccagcctggtgacaaagtgagactccgtctcaaaaaaaaaaaaaaaaaactaaactaaacaaaaccaaaaaaacacacacaactggagctgggaaccagctggagaagggaggggtgaggaaggaacacaggctccagagccaggcaggcttctcttatctgctggttgtatgaccttggccaagtcacttgttacttgtaaccttttattcttttcctataaaatggaatcagccataatcctcatcttattttatttatttatttattttgagacagagttttgctctgtcgcccaggctggagtgcagtggtgccatctcggctcactgcaagctccgcctcccgggttcacgccattctcctgcctcagcctcccgagtagctgggactacaggcgcccgccaccacgcccggctaattttttgtatttttagtagagacagggtttcaccgtgttagccaggatggtctcgatctgctgacctcgtgatgcgcctgcctcgacctcaaaagtgctgggattacaggcatgagccaccgcacccggcctcatcttctttactttaggaccttacaatataccaggcacctagctgggtctcagggagacagtccagtcctgagccctgctggcccaagtttgtagccctgagtacttagtggctataggggctttaagctggaaagtggccaggggagcatgagggaaggagggagagaaggggagcatgagggaaggagggagagaaggggagcatgagggaaggagggagagaagagcagcagcgagtgaggagcgcatgggtgttacatggagggctattgggttggtctggttgggtgactgggctgctgacaagagaatccgctcatctctcctgtgtctctcccaggtcaacctgggttacttgtgccaggcatgtacctctctcctgcacagtcgaaagatgctgcagcattacttacaggtaagcgtcctatgccatgaggtcctggaatacctcacgctagcttcccaagctccaccttcatttcttgactctccttagaacaaaaatggggatggcctcccctcagctgttgcccagcgagtccagaggccaccgtctgctgcttctgctgccccctcctcctcaaagcagcccgctgctgacacagaggcatcagagcagcaggccttgcacacagtccagtatggccttctcaagatcctcagcaagacgctggcagccctgcgccacttcaccccagatgtctgccagattctgctggatcaggtactgcccatcatctgttcagcaccacctcccctaaaggctctgctctgctgtgtaccgagagctacctggggccttaattgggtcctggatggctcttgtcttttctcgcagtccctggaccttgctgaatacaacttcctgtttgccctgagctttaccactcccacctttgactccgaagtggccccctccttcgggacccttctggccacagtgaatgtggccctcaacatgcttggagaggtaagttggttctgtcagacactgtcctctccccccggctcctccccctgcctgccacttcccagctgaccttgggcatgttgggcatggtacctagcctcccaagcctgctcctctctgtaaactgaacatgacagcacctctgagaattactgtgaggattaaatgaggtaactgattaaatttgcttagtgcaggacatgcaagtaggaagctctcagtaagtgggagctgttcctgttgtcttagttttttacccttgcttctcttcagctggacaagaaaaaggagcccctcacccaggcagtggggctcagcacacaggcagaagggaccaggacgttaaagtaagtgctctttctgggatttgataaggggctggggcagtcatgggcccactgttctcaagcttggccagcctggccctctgcagcagtaccaaaaacctgtgtctcctcccaggtccctcctgatgtttaccatggaaaactgcttctacctgctcatctctcaggcgatgcggtaccttagggacccggctgtgcacccccgggacaaacagcggatgaagcaggagctcagctctgagttggtacggatggatagggatacggagggctggaccaatagggccagagccctgtggggtcctgcctggcaacccccaagggtcagaacagtagccagatgtgctgagcctcaccaagccactttttttcttgtagagcacgctgctgtccagcctctcgcgctacttccgccggggagcccccagctcccctgccactggtgtcctcccctcgccgcagggcaagtccacctctctctccaaagccagccctgagagtcaggagcctctgatccagttggtgcaggcgtttgtccggcatatgcaaagatagggcagtgctgttctgcccacctacccctctccaccagcctacactgcaccctggctggcaggggtgctgctggctgctagggcctatacaatggagggcacctcctgtcacccccctcccggagtagccacgactccagccaccacccactgacgttatttttatactagatgaagaggtcaacagcaggcatggggagccgagtcttctgtgctcaggtcctcacgctgcagacgccccctagaggaactttccttcctttccagcattccccacagcactgccggccaggggagaggcggcagcccagcagagggctctatgcacgggtttcaaacctgttttccacactctgtctttgcagttttggtaattctgtggtctatttatacagatattaaaatcttgtttatagaca

SEQ ID NO: 1227 - DNA, 8689 bp, Homo sapiens
aattctctaggacacttaggtccccaaccctccctcgggctgtttatcgttgtgccagatgcacagcacattgtgtgacactgacttaagattctaactatgtgcaagagggaaaaaaacagtggagaaggctgggctggaccacgggaaagagataggaaaacggatacgaatgtaaggcacagagttggctcggcgtccctggcagttaggaagacaggtccctggaggggccttggcgggtctccgctcgcgggagttccgcggtgtctttcccagtgctatctgcaggctggccagcttcctctgcgctccggaaagctgcggcccagcgcggactagtgaggacctccacagctcctgacattgccaggagtcctgtcggcgttttctcccagcctccgccatgccggcggtgctgggttttgaaggcagcgccaataagattggcgtgggcgtggtgcgggatggcaaggtgctggcgaacccgcggcggacttacgtcacgcctcctggcacaggttggtgagtaggggacttaagagttttccgcgcacttccccgcacagaatcagccttccatcttcctaaatactagtgaggtgcagctttcgatccgagtctcattgaaattatgtgacattattaacgtcacaaggctgatgactagaagagttacaggcacttggacgtggatctgatgagttcatttaccttttactgagcgcattttatgtgctaagtattcagaaatagatgttatactgctgtggagtcagacatataaatagatgtttatactacagcatgataaacagtataatagagatggactcgaaatattctgtttaaaaaacgcttagcaggagtatagattccagttgccctgaatatacactccctttttaaaaaaaaattattttttgaaatattctaggatgagtagagagatgagagtggaaagactcccggcttacatgtcagacagaactggctggctttgctatattcatattaaatatttttgttttggacatttggtctttattttttattttattttatttttttgagacagagtcttgctctgtcgcccaggctggaatgcagtggcacgatctcggctcactgcaatctctgccttccaggttcaagcgattcttctaccccagcctcccaagtagctaggactataggtgtgcgccaccacatccagctaaattttgtatttttagtagagtcggggtttccaccaggccaagctggtctcgaactcctgacctcagatgatccgcccaccccagcctcccaaagtgtggaaattacaggcatgagccaccgctcgggcctggtctttgtttttaaaatgggaataatacctgtatcattaggtcttgaagattagatgaaagtaccaaacacggctgggcgtggtggctcacgcctgtaatcccagcactttgggaggccaaggcaggcagatcacctgaggtcggggttcgagaccagcctgaccaacatggagaaaccatgtttccactaaaaaatacaaaaaattaactgggcgtggtggcgcatgcctgtaaacccagctacttgggaggctgaggcaggagaattgcgtgaacccgggagacagaggttgcagtgagccgagatggtgccattgcactccagcctgggcatcaagagtgaaactctgtctcaaaaaaaaaaaaagtacaaaacacattacaacttttaattgatattttaaataagctattatatcttgctactctcccctcaaacacttgcatacataggagagggcagctgacttgcatgtatctgaaaagcctccctgaacaggtgatgttgtgacagatactcactagaaatatatatgtatgtttagcattcactcctctgggcacttgggcactgggaatacaaagataaataaaatactcaatgctttgagatattcatgattaagctgagcaaaccacagaaaattataatgctgtaattgttatgttaaataaatgacatcatcatgcatagagttctgtagggtcacagagaaagaagatcaccaaaggccaggcacggtggctcaggcctgtaatcccagcactttgggaggccgaggcagacggatcacgaggtcaggagttcgagaccagcctggccaatatggtgaaaccccgtctctactaaaaatacaaaagttagctgagcgtggtggtgtcgcctgtagtcccagctactcaggaggctgaggcagaagaatctcttgaactcaggaggtggaggttgcagtgagccgagatcgtgccactgcactccagcctgggtgacagagctgagactgtctcaaaagaaaaaaaaaaaaaaaagatcacgaaagggtatgaggtagatactacttgcattgagacctgaaggctgagtagggtaagaagaagagcatttctgaaagttgaatagcctatatagaagccggaaagagtagatgtgaaaatgtggaagataggatgcttggggaaagtgaaaggactcttactacatcactaaaactcctgttgctttctttaacttcctacctacctttgctacagaaaatccctgtgatctctgacctatgttcattttctaggattccttccaggtgatacagccaggcatcaccgagctgttatcctagacctgctgcaggaggcactaacagagtctggattaacctcccaggatatcgactgcattgcatacaccaagggtatggctgggagagtggtcaacgatggaggaatatacctgcaacctggctaggtcaaaatagccaacaccttacctctgccaccatcactacccctaccccacctcacatcccttatgtcccccactattgtttttttccaatctctaggattataacttccatttctatctccctaggccctggcatgggtgccccactggtttctgtggctgttgtggcccgtactgtggcccaactgtggaataagccattggtgggtgtgaaccactgtataggccacattgagatgggccgcctcatcactggagccaccagcccaaccgtgttgtatgtgagtggaggaaatacgcaggtatttagagggctctacccactccatctcaatttctgaggcactgaaccagtattttctttgttctatctgagtcatgggaatgtcaggaacaaagatggacttatctgaacctaaaatactgtagaccagaaaacccccaacagagtttgtaacattgcaaattttggcagcatgatcagaacattagatggcttatcattatcagactttatatctgattataaagattaggaatttctacttcaggaaaggaatgaatgggattgaaaaggattgaaatcttcaaaataatgaatatctgaaagctcttgcattattttgaagcttattttttctataaatcttagcaattgaaactaacagttgctgggtatggcaactcatgcctgtaattccagcactttgggaggtcgaggcgggtggatcatctgaggtcaggagtttgagcccagcctggccaacgtggcaaaaccccatctgtactaaaaataacaaaaattaatttgatgtggtggcaggtgcctgtaatcctagcaactccggaggctgggcaggagaatcacttgaacccaggaggcggaagttgcggtgaaccgagatcgcaccattgcattccagcctgggcaacaagagcaaaactccgtctcaaacaaacaaacaaacaaaaaacaaaaaaaaacaactaaaggacactacctgatttattattttggggcaagtacatgttttgtttttatattactgggaatgattatgtagactttgttattctaagagtttagaaatataaataactttaaaaaatactttgtaaattatagaaggtattttattttatcttatttatttatttatttatttgagatggagtttcgctcttattgtccaggttggagtgcaatgatgcaaccttggctcattgcaacctctgcctcccgggtccaaactattcttctctactcccgagtagctgggattacaggcacccgccaccatacctggctaattttttgtgtttttagtagagacgggatttcaccctgttggtcaggctggtcttgaactcctgacctcaggtgatccacctgcctcggcctccctaagtgctgggattacaggcgtgagccaccatgcccggccagaaggtattttaaatttataggtgaagctaaagttgtttgggttaccttatatgacctttttaaggttgggattggattcttttccaacagaacacttgattatcattagaaatagttcagcattgtccccagctcatgaaagggttgtgtcgagaagatgaggcacatgtttcccatgaaaatgatgcagaaacttcagcaggtagagggcaagtagttggttgaggcctgaaggatgacatacaaggtcagagacttgggttgtggaaagtataatggaggctacaagagttgatgaaaggagcagtgacggttttgtcttcctcttctcttttaatgtttgcttaggtgtaagaaacagggagggtgattaggtggagaggagtggatagcagaagcagaaaggcaggatttttccttcgcctttgttactgtctttttgacagcagattaagatctgtatcagaaagggaagaaatccctaacagcactgggaagggaaagggacttcttaaggttcgtaggaagccctcggtgttataagtctgcagaatatgtgtcagtaagggacagatattctctgtgctaaaagttggtcacatatgaagaacggccttaatacaaaaaagtggtggtgggtgcctgtaattccagctgcttgggaggctgaggcaggagaattgcttgaacctgggaggcagaggttgcagtgagctgagatcacgccattgcactccagcctaggcgacagaacaagactctgtctcagaaaaaaaaaaaaaagaaaagaaaaatggccttaagtgaattgccattgctgacttggctgggccattagtctgactccatatgagatttttgagttcttcagctctgcttcttggttctaaataccactgcccagctgcatacggtggttcacacctataatcccagcactttgagaggctgaggcaggtagattgcttgagaccaggagtttgagaccaggctgggcaacatagtgagacccccatctctacaaaaatataaaaataagccacacatggtagcccagctactcaggaagctgaggtgggaggatcctttgagcctaggaggtggaggctacagtgagctatgatcacaccactccactccagcctgggagacagagcgagaccctgtctcaaaaaaaaattaccactgccactgtgtcataatttagaaggattcatgttctctgcctccaagcagaaaagccggttacctactatcaagactgcatttaagggatatattaggaacttctaagccggaaaaccaatgtatttgaaatgacaatttatttctgcctgaacctacactgtctaggaatctgttcctggaatcctcagggtatacagatttcttctcaaatcagagctgtaaaaactacccattcaccatttgggaaacacctttcttccacttcttattggaagccctggtggtcatgttgatcctctgctatgtttttctcccaaagccaaataatcctctttacagacttggggtttcatggacttcctcatcacccttaggtgattgcatactcggaacatcgttaccgtatctttggggaaaccatcgatattgcagtgggtaattgtctggatcgttttgctcgagtgctgaaggtaagccagtggggctgcagagaacataaaatgtgggtgaatttttgggaagccatggaggtggagggaggaaatagtaaatgagcttcttatgcttcctgcatatctgatttcatcctcttccattccctccttccttatttttttcttctgctagatttctaacgacccaagtccaggatacaacattgaacagatggcaaagcggtaaggggacataaggtggaagcaggctggctgctggggcttcagggatttccccatatacggtatatattaacaaaatttgggacgggctttggagggtgagaagccagctgactgtaggcttagtgcctcgtacgcttattcccacatagaggcaagaagctagttgagctgccatacactgtaaaggggatggacgtctcattctcagggatcctgtctttcattgaggtgagtgtgagaggtgatgagacgggcactttcatgctttttaaatgaagcatatctgttttacttacgattatatttcgtatagctcagtatattcatgtagcacagtactggtccatatcatgtgctgggtaaattcatttagaaggtattcattgaatatctctgtgtgccacatgctgttctagatagtagagatgcagcatggagcaaaacaaaaatccctgtctacatggagcttagattctaaatggggggcgggggagataagaaagaggaaaataatgaagtgccagatgatgatgagtacaggtgaaaaattaagcaggataagtaaggggtgagagatgtcaggacaagtattcaaaaagtaatgattgcatcttaaatgaaagctgctcattctatgccatgatgccagtgaagggaatgtggtacaggatgtgctggtaacttgaattgtggtgaaacatgatgaccctccgaatgcattaatttttgctctcgtgtaatcccaaaaccatgatttgttgattcttttgtttttccctttaattgtaggatgtagcccatcggatgctggccacaggcgagtgtactcctgaggatctgtgtttctccctgcaggtaatgcagtaaaaaactgggacagaaagttggggctgaaggttttatattgtagagcagaactaatctgggatgcccctctaatattttctccttatctgtccctgacaggaaactgtgtttgcaatgctggtagagatcacagagcgagccatggcacattgtggctcccaggaggccctcattgtgggaggagtggggtgtatgtattattgaaaagtgttcctctttcctattcttaacactatgcgtcttcctcctggtactctaaatcattaagcgtttggagtaggcttcccaatccttgcccctaatcccctatgtcattgttctaagtgagtgcacatgacgtgttctgctggaccatgaagagatggctaaaactaagctaatcctgttccctgcctctttgtaggtaatgtgaggctacaggagatgatggcaacaatgtgccaggaacgtggagcccggctttttgctacagatgagaggtaaagacactttccctttggtttcttttttacttctcctgttatagtgattttccacccttagatcccaattttcatctctcttgcatcccagattctgtattgacaatggagcgatgatagcccaggctggctgggagatgtttcgggctggacacaggaccccactcagtgattctggggttacacagaggtgagtgattcacctcttggtgagggtagattattgggacatagacaaaaacagcagggaagagtccaggaacatgagggcagagaagaatgaaggatgttaagggctcgctctccaccatgtttcttctgtttttccacaggtatcggacagatgaagtagaggtgacctggagggactaataagatcaacagaatcagagtagatagttccttaatcggaacccaaaggaccccgtgcctcaatctctatcctgatgtcatgggagtcctagcaaagctatagactccaagcaaggcttggggtcctttatggaaccccaggatgactcagcaataaaatatttttggttttttggttttgtatgttggtgattggattgtgttgttcaggaccaatgtagatttggtgctggataaattcttgttggagcttgctgctgtggaaccaagaatgaggtatctttttttttttttttaagaaacggaatcttgctgtgtttcccaggctggtctcgaactgggctcaagcagtcttaccacctcagcctcctgagtaaggatgccattgtgcctggcaacaatagtagtatcataactattattatagcatcgggtcccgtgctaactgctttacattcattctctcatttaaattctttgaagtaggtgtgcaagacttctctcaaaatagcctggaggctcacacctgttatcccagtgctgtgggaggccaagtcaggaggatcccttgagcccaggagtttgagcccagcctgggcaaatagcaagacaccatctatttgaaaaatgtaaaaattatctgggcatggtggcgcacatctgtagtcccagctccaagggaggctgaggcgggaagatagcttgagcccaggagtttgaggttgcagtgagctgtgattgagccactgcattccagcctgagtgacagaacaaaaccttgtctcttaaaaacaaacaaacaaacagcctggagattggtctaacttgtaactctaaaa

SEQ ID NO: 1228 - DNA, 15975 bp, Homo sapiens
ctctctccgccccgggtcgctgccgcctccgccgctttcgggcttcgcagcctgaggaaaaaaagagaaaaagataaaaaaaatctgaaaacgcttcaaaatcctgaaaaaaaaaaaggaaaagaaaaaacgaatcctcggagaacccgcggggaagtcactttcgtacgcttccggcctgccccgcgcccgccgccgcagcgcttggcgtccgtcggtctccgtccgtcggtccgggggtgagccgcccgcccggcccgccgtgccctccccccgctcgggccccgagccccgcgccccgcgcctgccccggcgcaccacgtgtccgtgctgcccttcgccgcccgcccggggctcgccgagtcggcgcccacaaagatttggtttccctctgccccggcggttgtaatcttaaaccgccggagcccgaggcctatatttatagagaaacgcgtgtccccgaggccgccgtgggcagcgtccggtcgcctcttaaaggatttttacccttcggaaggggattccccgtttaatttttttcctactttgattttttgaaatttggagcttcgcaccaggaccgcggagaagtgcaaagtcgcggggagggccgtattgtgcggagagccttttgtctgcggtgctgcggccgtgggagccggcccccgcctcccgtttccgtcccgtctccaagcccgccgactccagctcgtcctcgccgcgccggtgccacctgtgagccgcggcgcgggcccgggctccgaaggcgcccctttgtcctgcggcgggcccgataagaagtcctcctggcggggctcggggtggtggggggcggggagatgaacgctgcggccagcagctaccccatggcctccctgtacgtgggcgacctgcattcggacgtcaccgaggccatgctgtacgaaaagttcagccccgcggggcctgtgctgtccatccgggtctgccgcgatatgatcacccgccgctccctgggctatgcctacgtcaacttccagcagccggccgacggtgagtagaagctgtgcccacacgtgcgtgggagcccggaggaccccgggagtcgtcttctggcagggccctcctgccgaggagggcggcatcacgacagcatgttgccaccgaagctgggagcagggtgcggagattgagaacgcggacctggcatcagatgactcgagtttcaatcttgtttctaccacttgctaactgggtgaccttgggctacttattagtgttgctggtagtggggttggaaaccaaggagactgtaaaacaggattagagtgaagccactggcattccactgcgtgtggtccttgtcagtggggctgggctgttagagatccttgcttgtgcccctcacaggctggccaaaaaggcgggacgtttgaaacacaattccccgcgaaagttttacattgtaaagctcctgcccgctccgccacctttactaaccttgactacctgatgttgtgctgataaaggatcagtcagggcaggcaggaagcagggggaaggtttctgtgcgttaaactttcgcagagacttaggttagtgccacaaaagctgcgtgtgccaggccacctccttggtctgtgtgtttgccactggagtggagaagtgctttactctggacaaatggtatccaggctctgtgctgtagagtgtcgtggaggtagtttagggaagcgtcacttgaaaatctggtgtcatttgtcacctcagctgtaacagtgctttgcactagtcagagcccttttatttcatctaatctgaagaaaatgggactcctgagaaggagaacgaatgcaaaaagttggaagccaagttaggactcccagcacagtgctctgccacctcagattgtggccttagcgtggagcatggagagaggtatgctgcaggcgtggcaggagggaggccagaggaaacctgatcagaggctgcacgtgactccagattaaaagggaacaactgcagagatcattactgggagaaacaagccattctatggcaaagcatctccaggtccctagttttggggtcccccctttgttttctgtctgaggcccagagttactacctgcccaggttgcggctgagaccagagaattggacatgttgagagggactaggtattgctactgtcaatccagtgtgctccaagctgagttctgtccatggccataggagcgcaaaggtagctgagtgtggtctttttaagggataatgtaccacattagctgttgtctgccttactgacttttgaacaaaagtcgtgtcacttagagatagcagaagctattggtcagtgtgtctgccaacacatacttctgcaggacttctccctgctataaataagtgcagccagatttgtcagactaagccggcttgccttgtgcagtgctgtctggaaatagacgaggagctgttgttgaagtgggctcctttactgctaattaatgaaatagtttgcgatcccagctatctatctctgatagccatcacaagcaaagtcctctttccctggactgttcctgacttggatcggtcttgtcatctccccttttcccaactaccccccacacagatgaggcccaccttctgaagggggtggggaaagttgttggaaataatgagtgaaaataaattctcccggctaatgaaacagttgagcttgtggagcggcagagttggggaattttgtcccccctttaagtgagatgttgtcctgaggcaaggagcaggttccactgctctgaccctgtctaaatcccctcatggaggaggttctgggtgatgtcaccgttaggagatgccatcatagccttaaggaaaagtggccaccagatctgggcatccttgttgcgattagtgatgagaagtgttttggctggcaggtggtgttattttttagcttttggttctttttgttgttgtttgttttgagacactgtttcactcttgctgcccaggctggagtgcaatggcgcgatctcagctcactgcaacctctgactcctgggtccaaacaattttcctgcctcagtctcctgagtagctgggattacaggcacccgccaccatgcccagctaattgtgtatttttagtagagatggggttttcaccatgttggtcaggctggtctcgaactcctgacctcaggtaatccacccgccttggcctcccaaagtgctgggattacaggagtgagccaccatacccagcccagcctttggttctttaaattgtctctggtgtacacacggacttggttgggaagctaaggaagcattccaaggtgttggatggggaagttggttgagcacccagggtagctgaagtcctagaattctacagaacttccattaaggcttcaaaaggtgggtgcagggcctgccatctgcgcactgtctacttaggcagaaggtatggtggttttatccttgtgatagtacagagaacttttccatgtgtgatcagttgtgtccattttgatgactgatgcttttttgtttaagtcaatttctgttctcagaaattgaaaataaactggactgaattctgaattcagggatagcacctttttttttttttccagatcatttgctttacaggttttgtcacttgtctccataggtggattgcagactaaatgacttgataactttgatgcaatacctcactgaaaaataaatcagataatctagtattagtttcgtaattactagctagctgcacagcttagttaccctaaacataagtttgttcattttgtaaaatgtataatttcagctgtcccacctgagtcatggtgggtggtagtctgcaaagtctcttctaagtggtaaagcttagtcaaatgtgaggtattatcactggatcttggtgtcattaaggccatttagattatctttacttgtggcccctttatccaacaagggcacagacccagaagggtgtttagacttctgtcatgaagtagagtcattagctggaacttatgcttcccttactaacagtgcaggctggaggaatctgatgcccttttattttaatagagttgccttttatcaagagtgattaccttgaaaagtcctggagtaatctgttcttaggctgttggcctgtgggagctgacgttttctctccttattgaaatgtgtttctctcttacagctgagcgggctttggacaccatgaactttgatgtgattaagggaaagccaatccgcatcatgtggtctcagagggatccctctttgagaaaatctggtgtgggaaacgtcttcatcaagaacctggacaaatctatagataacaaggcactttatgatactttttctgcttttggaaacatactgtcctgcaaggtaaacattgattaaatgattttagcagaataattaattgattcttgaaaacaagataaataccaaacagagaactatcttggaattggggaacaagatatgggaattttcaaaatgctggacatggaatcctaaaagttcccataggtaatctcagggccatacccagcgtaaccagcacacgctttcatacccttgttctttactcagcctgaaatatccttcctattctttagctttggaaagcccacgtttttcttttgggatgggggaaagtagaggaccagagaagtgtctctagtcttgaggaaacttaatcactttagaagcataaattcactctattccttctacgtatctgttctatgctgagcactttaaaacttaaacggtggtggtgtatatgtttaatgccatactacactgaaaatctgttgtggccttggaaaatgttttgttttctgcatcaccgtggtttgcacccagatctcttaaaatgtgttgttgtgttttaaagagacagagtcttgctctgtctgtcacccagggtggagtgcagtggtctagtaatagctcattgtagcttcgacctcctgggctcaagccatcctcccacctcagcctcccaagtagctggaactacaggcacgtgccaccacactcatttaatttttttcttttttgtagagacagggtctccattgtccaacgatctggctccaacgatcctcctgctttggcctcccaaagcattgggattacaggcatgagccacagcacccaattttaagtattttttgtttgtttgtttttgataaaaataaaacatttggaatagaagcatcttagtagggctacctttgtaaatggaacacttactaggcacctggtgctgtgctaggtgttagaaaaattatactggtgtacttgaccaccattggccatggatgggctagagtctcctcaggcacaagataccctgaggttctcatgtctcaggagctggccagttctgctaaagtggtccgccttgtctttgacaggtggtgtgtgatgagaacggctctaagggttatgcctttgtccacttcgagacccaagaggctgccgacaaggccatcgagaagatgaatggcatgctcctcaatgaccgcaaagtgtgagtgtcccagtccggagcaacaaccatcgcatgagccagccgtggccccacctcgctattaactggcacacacaaggcggctactggttctcggcccaagtgtggcctgctcctacctctccactccagggctggtgagtctccctgcctgagccgtggcagcccttttgactcgccaaggtgggcttcctgcccaagccatggcctgcctgccgcctctcccttaaaggcatctgtctgtgggttttgtgagcatcaacaactggggctggctggaaagcagctctaagctcactctgagtcggggtcttggccagcggcagagtggagagggccctggactgaccaggagctgtatactagcagtgtgaccttggctttcctgtgattcaggtctgtccatgggtccctcgctagtggttgatgccaaattgtccccgcggttctccattttctaacttatgactcagtgacctaatacaaggctggctccacagtaatacttggtgacaatgaaaaaatcccatccctttgcagaaaaacttcataacagaccttgttgctttgatgtggttgttactgtagaatgcagagagggggaacttaccaaagccatatggggagaagaagagacaataagtcttggctattacaagccaaaataatttttgtcctttgtgtcattcagtatgccagaggatgggttatctttataatgtctgtgtgtgcagtggttgatctacagatatcactaaaaagaaatacaaaaatgtcagtgcatggataaattttcttttaagtataacagaccaaaataaataaatttaaaaagcaaagggtgccccttcactccaacaatctcatatctaggattaaccactgttaacagtttggtttgtatccttccagaccttttctatgcatttacatagttgcacagaaatgaacattttaaaaacatggccatcaggtttcttcatgaaggcagtgtgatgtggtaggaatagccctggtctaagccaggagccctggggctggtcctcacaggatagtcctgcctttttctctttctgctggggacttggggtatctctgagcctccttggtggtggatggggatctcgtgttttaacctctcctgtcagtctttaacctgtattcctttgggtccctggacatcatgttttattcctctgggtaattactgttcttcatggtttcattttagatttgtgggcagattcaagtctcgcaaagagcgggaagctgagcttggagccaaagccaaggaattcaccaatgtttatatcaaaaactttggggaagaggtggatgatgagagtctgaaagagctattcagtcagtttggtaagttggggttccttgtctcctttcacagtctaccagacccatctgttttttcttaagagatgagggcactgctccagagatttgcttcaagtgagtttccagagggaagccttctgttcctgagctgtgctcaagatggtgttactaatagttctgtcctttggtaataggtaagaccctaagtgtcaaggtgatgagagatcccaatgggaaatccaaaggctttggctttgtgagttacgaaaaacacgaggatgccaataaggtgagtataccacaaagattgggaaaagcttttaagaggttgccccagagtatgggtagggtcttgctagcacctacctagagctgggacggtctgagtatctggtagtagatgtaccattactatactctgggatcatcttcctgggttccgcatgttaacttcatgtaggtgtttacaaagcacttggcacatacctgtcacctcagctatcagttgttgaaagaataggacagacgtttgttatgctgcaaaggtgagagaactaaagcccagtgagtgctgatttgataacagcacggcagctacttgtgggcaaagcattgtgccagaccctcaatatttatcacttaaatacccacaaaagcacctgcagaatttactggcagccggaatattatatcgccctaggctcatgtcagcacacttgtgtttatacacctgtactatttctatattatctggatcaataacccatttaaatattaacctcactttacagatgaggaagtttggatttgtgtgacagacttcagaggtggagtgaatttagtttttagtcctatagtagaaagaatattttttgggacttagacctccagaataagaccccatcgctgcaactttattttaaagacatatttttcctctctaggctgtggaagagatgaatggaaaagaaataagtggtaaaatcatatttgtaggccgtgcacaaaagaaagtagaacggcaggcagagttaaaacggaaatttgaacagttgaaacaggagagaattagtcgatatcaggtaaggtggtcttggcccagcctagcaatgggatttgctgtgaaatatttgcagaacacccctatgtttagcgggctttctttttgaggacttggagtgtgttcttcttcccattttacctaaaaagatgaggtttaaaaggatatatacctactacatatgactgattattatagaaccagaaacaagagatgggtttattcatcaagaagctctctattttggaagcctcagcctgttgcttttagccatgtaggttccttttacttaaatgagactcctttgtttggcatggcttcaagaagacccctgctggggtgggtgagtggtcaccagaacagctgtggggagaggtgacaaaaggtgagtgcactgatgatcctgtcagtttcagggcagtagtttcacaactttggacttgcatcagattcatcagcagagcttgttaaaacagatagctgggctccagccccagagtttttcttattcattgggtttggggtctggcctaagaatttcatttctttcttttttttttttttttcttgagacagtctcgctctgtcgcccaggttggagtgcagtggcacaatctcggctcactgcaaactccgcctcccgggttcgcaccattctcctgccttagcctcctgagtagctgggactacaggcacccgccaccatgcctggctaattttttgtatttttagtagagacggggtttcactgtgttagccaggatggtctcgatctcctgaccttgtgattcgcccgcctcggcctcccaaagtgctgggattacaggcgtgagccaccgcgtccggccgagaatttcatttctaacaagttcccaaagatgctggtgctcctggtctggggccacccttggggaaccactttcttagggaatatttgtgatatagaagtgtagttaacagtgatctttttccttcagggggtgaatctctacattaagaacttggatgacactattgatgatgagaaattaaggaaagaattttctccttttggatcaattaccagtgctaaggtattatactgcgatctggggattgaaagcagtggtattccattataggcttattggcatttgtcccattgaaggaatagcatttaaattatgttcatttctgaaagtagctactacgtttttctagcaaaatttctggatgcattctggagaatgacatttcattaggttaacattacactgtttcccaagcactggagtctggagaggaatttgacccagcccctccttgccaactcagagcacctgaatctttcccattccttgctgcctcgtgccggtgtggggacagatggtgctacagaatgagcagaggaaatccagacaggttgttttccatttgtcttggggcctgtctctacagctctgccacattttctccttgagaatgaaggtattttgaagattttggaggtgggcttgggaacttctaccctggtcttaaaaagagaggaaaggggagtggaaggtttttctatgtttcgtagtgtgcatcatttgcttgattttctttgataatcatatcaactaagttagcagggtaagtaggaacctcattttaaagataaggaattttagtccttgaacaagagaatgctgactacatggggatggtgtactgcttgtccttggcactttgggagcaggatggaaactggtgccatctgaacattttgagttatggccggatgcagacgccggtcttgctaaacaggtgtaccagatgccacaaaatcctttagttgatgagaagggaagccacgtgggctggtaagggcttagtggccctgccctggctcttagtggactttgctcccaacctgggaatgtggaaagcaatgttatcagttgtagtagggagttggccagaggccaactgtgggtttgcccagttcttaccctttcgtttttgctatgaccccccccttgactggccctcatcagtgtaaggagtgatcttctatccttgcttatctgcctagtagtcaagttggcatttgttaagagagcagaagagccataccttgaattgtccccattttcattatgatggtgtggcatttttattcacataccttactggcccatctcattggtagagagttatggagtgatgcacttctttacttccctatcctccacttcaggaggctctctgggccattaactaagacataaaacaatgacagtcacaccagagaagacagtgaataaccttgtctattaggaagaatgccatttgtgaatgatgaacttaatgtgggaaaagactgcctgaaccagtagacctgtggttttgtagctgtttggagtatttcttggaaattgagcctcaggaaggcaagtgagactagaatctaggctgcctatctctgagctggtcatctcattgaattaatggtggcagtcattggttacctgaacattttaggactcctgtccacacgtggtattccaaaagtgttatcctgacgttggtaagagcttgttagagtttgtccaccgaggtcttgaagcatatgagatatgaaaataaattgctcagtactactctcaagatgttttgtggttacccggagtagctatccaccaggtatcaggaaacatctttgagttcctggttttattattagccatatcatagtgtttcagaactttagcatcacctggggactcaaagaaaacacctagataccttagaggttgtgacttagttggtctggggtaaatcctgtgccagaaccctgacctagactcagtgactgcagcagaacccaggctttctggttcttctgaatagttccctccccacccagggacatccttttttttcctatttgtaggtttgttttgttttttttgttggtttggttggttggtgtttttgttttgttttgttttgttttgttttgttttgttttggagatggagtctcgctctgtcgcccaggctggagtgcagtggcgcgatctcggctcactgcaatctctgtctcccgggttgaagcggttctcctgcctcagcctcctgagtagctaggattacaggtgtgtgccaccacgcccagctgatttttgtatttttagtagagacggggttgcaccatgttggtcaggatggtcttgaattcctgacctcgtgatccacccacctcggcctcccaaagtgctgggattacaggcatgagccactgcgcctggccctttgtttttttgagatgaggtctcactacattgctcaagctggtctcaacctcctgagctcaagcagccctcccacctcagccttccaaagtgctgggattacaggcacaagccatcacacccagccagggacaccttatttcttaagtagctggtctcattttgtaggtaatgctggaggatggaagaagcaaagggtttggcttcgtctgcttctcatctcctgaagaagcaaccaaagcagtcactgagatgaatggacgcattgtgggctccaagccactatatgttgccctggcccagaggaaggaagagagaaaggctcacctgaccaaccagtatatgcaacgagtggctggaatgagagcacttcctgccaatgccatcttaaatcagttccagcctgcagcgggtggctactttgtgccagcagtcccacaggtgggtgtgctgtttggtcacagctcttgggaacctgccggctggcagtattctgcagtggttggggagagggatttttcgttattagagttctagaatgtcacaataaggacccttcaagtaaaaatgaaggacttacccatggtcacaaacacacacccacagtggcagtggtagcataaaacagtccccattagctgacccctcagctcttgaatagaaagaacatttaaataattagcttaggtcctggttagtgagatgagatgagatacttctctaggatgggttcagtccttaagggggtgtttgggtattcttctgtcttacaggctcagggaaggcctccatattatacacctaaccagttagcacagatgaggcctaatccacgctggcagcaaggtgggagacctcaaggtaggtggtggggaacagtaattgacagcccaggatatacctgtcctggtctcccctgcctttccttcttccccactctgaggcacagcctaggttctggtccacatcacttctcaatgatgtgcaatttttctcttcaccaggcttccaaggaatgccaagtgctatacgccagtctgggcctcgtccaactcttcgccatctggctccaactggtaatgctccggcctctcgtggcctccctactaccactcagagagtcggtgagcaaactggcctttagaagtgtggcctggggaggagggagtcaggatgactaggctctgtcctgggttggtcagtttgttgggctcgaatttatcgagtcctggttctgtaatcttagctgtgtgcttaggtggccacttcaggagcagagaaacagtatgagttctaggtgtgtcagttgcttttaacattctttgctcatcggtgacctatgtgaaaaaggttagttgtagaagtttgctagctggatgaccacagaggcagcttgttcttttgggtggggtgaggaatacaaggaaacagtgtatacagaatatgtcttgtattccaagatgtggaaagagttgtatgttatcctttggctcatcctcgaaagtagtagtggccccctgtgcaatgtgttgcgtaaacgtgctttgaaatttctccttccgtgggacgtggccagttggacatctgccgccaacactgatgtgcatttgctggtctgttgtagggtctgagtgcccggaccgcttggctatggactttggtggggctggtgccgcccagcaagggctgactgacagctgccagtctggaggtggtattggatgcacacagaagggggaaagatgggatttgacgggtctttgcccagactgatgggctttaattgtatttgttctttccctaaggcgttcccacagctgtgcagaacttagcgccacgcgctgctgttgctgctgctgctccccgggctgttgccccctacaaatacgcctccagtgtccgcagccctcatcctgccatacagcctctgcaggtgaggttcaccagacagaatgcttaaaaggatttcccccatttccacttgatgtaaaagaagctgtgcttttgattccttcaacaggtattaaatgcctgctctgtgttatgacgctatgttctgattcactgtccctgcccttcaggggctcactagtgggaaagaaggggcttaaaagtgctctgcctgatgccagttcactcagaaatgcctcagagcgggcagccagtgcttcctcttctgtttgtacgaaataatgtgctcattcagctgtttgagcctccaggtcacttccgcatccaatgacctattggatccttggctgctctgcaagatgattggtacattaatgcaggaaataacttcaacttacagatcggatgttcagcttcaaagatgtaaagtgtgtgtaggaggtgaaggggttgaacctagagcttagattttctaagctgtaacttgctgtctctagacctgtgctctagatgcaactagtttgtttcagagcctaatagcaatttgctgtggaggtgtcaccctaagccttcaggcccataagctgcttaggagattactctttaactgtcctgtctcatactctctaagttggggatttcctagaacttgatgctatgtaaaataccttttctttgcaaggctttgactagcattgacgttgcatgttgaccgtttttaagcatttgatacaaaaacatttggtagaattaaggtgatgtggaatgtaattataaatgtgttgatatttactccctttgatccaatctgcactgagatttaccctaaaggaaaactaattttcaggaaaaggttatatacaagtgtttacccttatttatatcaaggcttttcattcttgagtaactttgggtgtattaaggaaatgtcagaaaatgcttgcctagcactataggtttgttttattatttacgtttcacttcgctttctgatagcatgccattttcattgtaattggttgtgtttatgtccataccactctgttcctcaacacacccctcaatccttcaaggactgaaattagttcctttagagcaaggacagccacctcctctcctctttcacatagtcagatgttcagatattgaacaggcactcaaccaccatcaggtgttgtcctttcctcagtgctaacccactgcctttcctggttcccaggcaccccagcctgcggtccatgtgcaggggcaggagccactgactgcctccatgctggctgcagcacccccccaggaacagaagcagatgctgggtgagtgacccacttgcttgcagaagaagagggtcccagagcctgatgccagctaggacaccagtgtccattgtttactgggatttgatttgtttttttattaactatcctccccataggagaacgcttgttcccactcatccaaacaatgcattcaaatctggctgggaagatcacgggaatgctgctggagatagacaactctgagctgctgcacatgttagagtcccccgagtctctccgctccaaggtgagctggggctcagaccctgcagcttcagttctcagcttgggaagactgggggcaaacttggatgcccaggtgcagcagaaagtgggatctgctgcccccaggacccctctcgtcatgccttgactgtgactggaggctgcagtgggtatttgggaaagtagttagcaccagaagcctagggatcatctgtacagttggctttggtccaccactaggtctgggcactggggaggggtggagtagctctcctagattcactgaccacctgaagatttctcgcaggtggatgaagctgtagcagttctacaggctcatcatgccaagaaagaagctgcccagaaggtgggcgctgttgctgctgctacctcttagacaaggaaaaaccgtatgtgtggctattttcatttttgttcctatgagcattgttcctatgagcattgtctttgtggtttgacctgaggttgtatatatgctcactgcttagctctgggaatacaataagtacagttagttacacggagtgtgttgcaggtgacttcttatcatgaggactgtggactttgtctgcaggagcttgagtgaataataaaactagtactggttgatggttgtaggtgtctccagatagggaaagaagagacagtaaaataagctaaggaaaaagcacatggtaaggaccagagctggtgtgttgggagggttgacttggcatagtcatgaccctcttgtcaagggcctcaggagccttgtcatctagtggtaaagaccagagatgctgctaaatgttgtacagtacacaggaggacagacccaacagaatgtccaaagtgtcaatagcactgaggttgagaaactctcttctagaataccttcctttatccactatatgttaatgaatctaaattatttgattatgcatttatttgtgttggtgcttttctttacaggattcaaaagccaaataaccccttatggaattcaactcaaggtttgaagacttcctagcttgtcctatggacctcaacaccaaggattacaaattgcaaatttaataggtcattttgtatcaaaaggtcaattatgaagcacctagaatttttcaattatacgaatatgttctttgggttctgctgtggcccagacagtgttaactttttttttattgtgggttttgattttttcccccagaaattggttttatttgatgtacccaagtcttacgtttcccaataaagaaaaaaaatctccataaaa

SEQ ID NO: 1229 - DNA, 5813 bp, Homo sapiens
gattatcctgctgctgccgccaccgctgctgctgctctgcaaaattcagctgctgcctctgtcttgaggaccccagcgcctttcccccggggccatgctgcctgcagccacagcctccctcctggggcccctcctcactgcctgcgccctgctgccttttgcccagggccagacccccaactacaccaggtaggtctcttggcatcttccagacagctccagtgaacttcagacccccgattcctttggggttatgcctggagatattttgggttcccttgctgacacaccactccccagattccccaccgcctcacccttctctggcccccaaatcctccccatctgctgcaagaccttggtctcctgcaggccaccactgctcccattcccccaccttcgtcctctggtctcttaagtctccccacccacccagatccttgaccccccatagaacccaagagagagccaagctcctgaacttgcctggtagctggattccaggaaggaattcgagagggattgtagggggaggagggggcagtgagtggagacttgggagtcagaatctgaagtagtttggaacaggggcagggctaaggtgtggagctcgcggagcctggcctccaggttcaatcagagggccatcgccactgcagctccctccatctctccaccccctcccccccaccgcctcgtggctgtgtccacatctggaagtagttaggcggctcctgtccctggactgccaggcagagtgaggcgggagtctggaaggggggccgaggaggattccgggaattcctgttggggtgggggtggggactcttggggttggagggatggtcgagttgccaggcccacttttcccttatctttgtgggagtctgggacaccccagccctgtcctggctggtggaagctgccccaggtctctcaaggcctttccatttcatcccccagcttccctccttggagtttcatcctcatcacctcatccccatcttgccagtgctcccccgtcccacccgtccctgctctttcctgaccccttttctgttctccagacccgtgttcctgtgcggaggggatgtgaagggggaatcaggttacgtggcaagtgaggggttccccaacctctacccccctaataaggagtgcatctggaccataacggtgagaaacccctctgggcactaccccttgttaaagtctcagaggcaaaaaggcctgactgcgaagggaccccccccccgtcccccccgcaccaccttctcaacctggggcagctccaagtgtcttccctctgtcactgaaggcatcattcccaccgtaacacgcatcatcttaacccttccctcaaatcttcattctccagtccccggccctccctcctcttccaaagcctcagctcttgtcccctgcacaggctaccagcagagctgcagagaccaggccctctgctctgcactcacatggaggccccttcccattcagtccgtttctgcaagaaacgcttggggcaggggagctgccctctggctgggttgtgtggggcctgactctgtgggtccccgcctctgtccccgctatcaggtccccgagggccagactgtgtccctctcattccgagtcttcgacctggagctgcaccccgcctgccgctacgatgctctggaggtcttcgctgggtctgggacttccggccagcggctcggacgcttttgtgggaccttccggcctgcgcccctagtcgcccccggcaaccaggtgaccctgaggatgacgacggatgagggcacaggaggacgaggcttcctgctctggtacagcgggcgggccacctcgggcactggtgagaactccctcacctccgccttccccccctccaggccccgccccggccgcagccccgcccccagccctaacctccgccccgcccaccccgcgccccagtgcctagggccccctacctccctgacccattttcctcactaaccgccccttcagtccctcctccccgtcttctctcccctcctcccgcacccacccatccctcttccagggccccccccaggcgcgaggcggaaatgggtcaccgacccgcgggtggaatgggcggcctggggttactgggacggtgagtaactgccggcccccgtccgcaatcgggctccctccgtcgggcgcgagggggcaccccagggctggggggactaggttcctccaaccccggggggcccctacacccagccctgggctcccgattgcggtcccatcaccccctcctggcggcagaagtctcccttgcaatgtttcaggcggggacctccctaaaggggtcctcgggggctgtgccccaagtcgaggacaccctctccagcctgaaaggggactctgctgcagggccggggagatgggatctcctaggggaagaggcgcggtgcggccgcgggtcggggaggggccagaagggggcgtccagccagttcctcctcccgcttccaccgcccgccagtgcgccctgcggccccagacttccccgagccgcgctcctcccggccgctctctgttaacctgcccccatcttacctccccttcttctcgtcccctcatcctgagccccagacatccgagctgcctgccggggctcccagcctagagttctcctgaagctgaccgagggtctccaccgccccccacccccgctcctctctcccctccccagagcaccaattttgcggggggcggctggagaaggcccagggaaccctgaccacgcccaactggcccgagtccgattaccccccgggcatcagctgttcctggcacatcatcgcgcccccggaccaggtaccgaccctcctccccgggctgccctaggggacccaggcggcgccctccagcttgcagccagcagagatttattgaagatctgctgtgtcccgagcactgcgcttgcgctggtgggcacccaaaacagccccaacccctgcatgcacgcaaacaaaaatgtaaaaattacaactgagacaagtctcaggagagcgaggtacagggtcctggtataacacgcgggcctgtcacttgtgagtgcgccaggacttgaccttgccaaccacgacgaccgacacccctgcagggtcccatgggtgtgtgtggtcctccgtgctgtggtgtgaacgccttcaggaggggggcccagaggacgcgggaggtgggagtgggagctgctgcaggcacccagtaggagatgaggtgcaggcgcccaggggtgtcccgccgcgcagtccccgcctccgcccgccgccaggtcatcgcgctgaccttcgagaagtttgacctggagccggacacctactgccgctatgactcggtcagcgtgttcaacggagccgtgagcgacgactcccggaggctggggaagttctgcggcgacgcagtcccggggtgaggggcgggacctgggcgagtccgggagagagtcggcggaccgcacgcacgcggctgtttggaggggcggggttcagctaaagggacgggatctgaaccccagggctccaaaccggcgaggggagcaggttggaggccaggcaaagaggagatttggccccgggtctggggtccgcggatagagaggcgactggggctctgcgaagttgggacgaagttaaaaggccacctggccaggggtagtggctcatgcctgtaatcatagcactttgggaggctgaagcgggaggatcacctgagcttaggaattcgagaccagcctgggcaacatggcgcaaccttgtctgtaccaaaaatacaaaataattagctgggcatggtggcgtgcctgtagtcccagcaacttgcggggctgaggcaggaggattacttgaacccagaaggtcaaggctgcagtaagcctagatggagccactgcactcaagcctgggagacaaagtgagaccctgtctcaaacaaacaaaaaaggtcatggggctgagaagagtgtggtgcacgcccgccctgacacttcccccaatgctcggtggccacctgcagctccatctcctccgaagggaatgaactcctcgtccagttcgtctcagatctcagtgtcaccgctgatggcttctcagcctcctacaagaccctgccgcggggcactgccaaagaagggcaagggcccggccccaaacggggaactgagcctaaagtcaagctgccccccaagtcccaacctccggagaaaacagaggaatctccttcagcccctggtgagtctgggataggggaggaaggggaaacagactgaagggggccatttcaaaaagttctgacctgggctgtggctcacacctgtaatcccagcattttgggaggtccagacagcaggatcgcttaagcctaggagtttaccatagcaagaccctgtcttttcaaaaataaaaaattaggctgggctggtggctcacgcctgtaatcccagcactttgggaggccaaggcaggcagatcacctgaggtcaggagttcaagaccaccccggctaacatggcaacaccacatctctactaaaaatacaaaaattagccaggtgtggtggtacacacctgtaatcccagctactcgggaggctgaggcaggagagtcgcttgaacctgggaggtggagattgtagtgagccgagattgtgccactgcactccaacttgggttacagagtgagattctgtctcaaaaaaaaaaaaaaaacttagccaggcgtgtggtcatagctactccggaggctgaggtgggaggattgcttgagctgggaaggtcgaggcttcagtgagccatgactgtgccgctacactccagcctgggcaacagagcaaaactccatcttaaacaaacaaaaaagttcttccttggctacattcactcattgattcatctggtactcactggtgcctccttcctgccgatgacccctactgggtgctaggaccggaagcctgacagagctctgaacagttcaagtcaatgaggctgttatggggacagtgctccctcctacctgctgagcaggtcaccctccaccctcctccctcctagatgcacccacctgcccaaagcagtgccgccggacaggcaccttgcagagcaacttctgtgccagcagccttggtaagaatacccccaaccccattccagctcctcgaaccacctcctgcttctgtttccagtcctgccatctggaacctcccatctcctcatctctcactcccattctcccacagtggtgactgcgacagtgaagtccatggttcgggagccaggggagggccttgccgtgactgtcagtcttattggtgcttataaaactggaggactggacctgccttctccacccactggtgcctccctgaagttttacgtgccttgcaagcagtgcccccccatgaagaaaggtaacagagatgtggggaaatggggatgggtcaagctaagccacacagaaatgatcaaggtgtggaatcttgagacctgctgacaggtctcaagaataagagatctcaacccctccctccttcttccaggagtcagttatctgctgatgggccaggtagaagagaacagaggccccgtccttcctccagagagctttgtggttctccaccggcccaaccaggaccagatcctcaccaacctaagcaagaggaagtgcccctctcaacctgtgcgggctgctgcgtcccaggactgagacgcaggccagccccggcccctagccctcaggccttctttcttatccaaataaatgtttcttaatgaggaa

SEQ ID NO: 1230 - DNA, 91817 bp, Homo sapiens
gctttccaaccggactttggggctagcgtttagaaaagtctcgacctcctccggcccggtcccatcccaagaaccgactaaggctgtgagtgtccgggaaccagacccgcttggaggccacagccccgacgtcccgcgcccacgcggcagatcgggcgctgcggcctgggagcctcggggagatgcggagcaggagcaattccggggtccgcttggacgggtacgcgcggctggtgcagcaaaccatcctgtgttaccaggtaaggagggaccgcccccagggaacgcgtggaactaccctctcatgtaactcattctccttcccaggtctggccctcttgtgacctgagaccttgcaattaagagtttgctatttgaatctagtccttgctagccagtgattaccaccccattgccaccccgtgctccttaagattcaggggacctaactgttgctacggctacttttcacagaattctttggccattgttcaggatgagaatgagccgcctccgtgcccgggtccaaactgcctctttttgcattgactctgctttttttggacgagaagaggtgtggggggtttggacagactacactgaatgagaacagtagacaggagtgaagaagctcctgaagtttacgcaggactctgcagtgtggggcgacagctaccgtccctcccatgagctgtcttggtagagacccacctgggaagcccttaggggctactttggttgctattttacagataagaaaattgtgaggctagaaaggtcactgcatgtagcaggtcagacccaaaggctcccaagctcacagggtcctatgacactgcccatgtggtccgaggtatgaatttgcctgctatgctttgtattcctgggctaaaattatgtgtgggtccatcagtgtaagaccactgaactatttttattcctagtgaagacagcagctatgtttcttgccctcaatcaacagcaactatttatagggccttcaaagtcaacgaaggaagtggcattcaggggttagaggcctgacctgcaagttgggagccatggtcatttccaaggcactgaccattttcccttcttaactaatttcttagccttgtttcctcacttaggaaatatttgtggtgtatctgttatatgcaaagcactctacaaagtgctggggttacaagaataaatgatcgtagtgcagtaacatttatgcataaggtataggtccaaagtcccttaatctgttttctttgttgttgtttgtttgtttttgagacagggtctcactctgtctcctaggctggagtgcagtggcgcgatctcggctcactgaaacctctgcctctcgggttcaagcgattatcctgcctcagcctcccgagtagctgggactacaggcgtgcgccaccacacccagctaatttttgcatttttagtagtgacggggtttcactgcgttggccaggctggtctcgacctcctgacttcaagtcatcctctcaccacggcctcccaaaagtgctgggattacaggcatgagccactgcacctggcctcagagtccattatctgaaaccctttggaccagttgtggtttgcccatcagaaatgtttggcttttagaaaggtaatatgcgtacaacgtactatatataccataataactgcagccagatctgggcagcaccccttcatcaaacaggttattacttccacatcagaatatgaatattcacataatttcagtaaaggctgaaaagagtttcatattagttcggctcatcttttgccaccaaaagagcttgctgcaaacttacgaaaacactttaaattttcagagcttactggcttttgagattgcacatgaaggatgatggtctttattttgagagctttgaggaaggacccctcgcccagtttgtgggagcagtagaggagtcctggaagagatgatgttcaagttgagagcagaagaagtaggcaggcaaatcaaggttatttttccccttcttccttggaatatattctaattacatctataaagtgttttaaaatccaagttgaaaaacctttcccttcatgactgtgatggagagggctttaaggagagctgatgaagcttggttcttttgtcagacctgggtttgaatcccctgctctgccttgaatgacatgtgtgacctttcttgatcccttctgagtccatgccctcatctgtaaagtgaggataataacacttgcttccactgagtgtttctaaggaaaaaattagtgcctactatcttgtctggcacctactgggcaacagtaaataatgggtgctcttggtggtgttatgattttgatagaggccacacgtttgtgcccaggcctcgtggtccttgcaggagtactctggctcatggtgcgccctttcctgaaggtcctgctacagctccgcattccttgagcataaatatgtctccccattgatgccaagagatcctaagtacagatacctcatcagtttccttcctttgcatcaagcagtggccaaaggcatgaaaggtacccttaagtctttgttggtagaagacttccagcaggacctgagtcatcctaataacccagctatccaggcttgccttccctcagaagcaaaagaattgtcttctcattaaagcaaatctgtgagattggactttcctccccaacattttaatgattaaaaaaaagttgtgtgagcctttagttgtatttattttgggggtagttggtgagtagccctcatgtttgccctctttttcccttcctgtgtcatcaagctcttctggctaaccaggatactcccagcacagttctgccgggaaatgccatgcgcccacaagtgcaggattgcacccattcacccccacaactagtgttcacagttgtagagccctaacccattcaaggcctcatcaccttctctgagtaatcttaggcaggtcccctaactactctagaaaaacgaatgagcacttttatgttatgtatattttaccacaattaaaaaaaaaagaatgagctgcacgaacggtttctaaagtgtatgttgtatctccccacctgctgtagctttgtgcagatgtttaggaggcattttttttagtgtcagctggtaacaagttctaaactctgtttctgatttgctttttaaattgagatcaatttacattggtttcatttgttagaaatcattttgtgttaaatatgccaagctaatcaccatttgaaggggcggcctgcccctccacacctgtgggtatttctcgtcgagtgggacgagagactgagaaaaagaaataagactcaaagacaaagtatagagaaagaacagtgggcccaggagaccggcgctcagcatacagaggacctgcaccggcaccggtctctgagttccctcagtatttattgattactattttcactatctcagcaaggggaatgcggcaggagaacagggtgatagtggggaaaaggtcagcaagaaaacatgtgagcaaagaaatctgtgtcacaaataagttcaagggaaggtactatgcttgaatgtgcacgtaggctagatttatgcttttctccacccaaacatctcagtggagtaaagagtaacagagcagcattgctgccagcatatctcgcctcctgccacagggtggtttttctcctatctcagaatagaacaaatgtacaatcgggttttatacagagacattcagttcccaggggcaggcaggagacagaggccttcctcttttactaatcttcctcagcacagacccttcacgggtgttgggctggaggactgtcaggtctttcccgtcccatgaggccatatctcaggctatctcagtggggagaaaccttggacaatacccggctttcctgggcagaggtccctgcggctttccgcagtgcattgtgcccctggtttatcgagaatggagaatggcgatgacttttaccaagcatactgcctgtaaacattttgttaacaaggcacatcctgcatagccctagatcccttaaaccttgattgcatacaacacatgtttttgtgagctcaaggttggggctaaagttacatctcaaggcaaaacagttgttcagggtacagatcaaaatggagtttcttatgtcttccttttctacatagacacaggtaacagtctgatctctctttcttttccctacaatcattcttctgttagaggtaatagttggttcacataatttcagtaagggctgaaattattaaattaattaaattatttaatattaattattaattattaaattaaattattagttaagctaacatcttaattccttttcctgtatctgtgaaagagaagaacttttcccattagtcatttgccaaatatacttgctgctaaatattatttgaatctttaatgcaaagaatgaaagagctatggttacaaaaaggtccttttgcaggtttgattttgtaaatatatatactctaggaagtatctttaaacatttgttgcctttaaaagaaattcttagattgttttggctcaggtaagaaatatgaactttgtacatttttttcactaacagctgtttgaaggctccttaataaaagtattaagtatgaaatggtgatgagaatatggatcagaaggaaaaacaatggtcaaggcagtgttcactgtaacgacagattatttggtataataaagcaaataactaagagactgggacagtaaatactgttatttaatggccacggaatttaaaatgagaagaatggaataaataaaacatggagtatggaacaaatagtaacaataataaagaggaatttgggagagagttaaaaaagatataattaagtattagaaaataataatatggcagaagaataggaagagactggagtgaaagtgtttttttgttttgtttgtttgtttgtttgttttttgagacagtcttgctctgttgcccaggttggagtgcggtggcatgatctcacctcactgcagcctccacctcctgggttccagtgattctcctgcctcaacctctggagtagctgggattacaggtgtgtgccaccatacctggctaatttttgtattttaagtagaggtggggtttcaccatgccaggctggtcttgaactcctgacctcaagtgatccacctgcctcagcctcccaaagtgctgggattacaggtgtgagctactgctcccggccaggagtgaaagcattctgagggccttatcccattaagaaggaggatgaaggtattatcctagcttttaagataagagtttgtgtttaagcattaccattaatatatgtggcatatataactttatttttattttaatttttttttgagacagagtctcgctctgtcacccaggctggagtgcagtggtgcgatctcggctcactacaacctctgcctctcaggttcaagcgattctcctgcctcagcctcccgagtagctgggactacaggcatgtgccaccacgcccggctaattttttgtatttttagtagatacggggtttcaccatgttagccaggatggtctccatctcctgacctcatgatccgccctactcagcctctcaaagtgctgggattataggcgtgagccaccgcgccaggcctctggaatatataactttaaaaacgattgcagaataaagaaaatctgatcatctgagtgaagggaggaaaaggctgctggggagggtaggaaataaagaaaaaagtgtggtaaatataaagtacaaaataagatgcaaataaatccaactatacagtattagtaatcacaagagtcttcctcattagtatagtggtgagtatctccacctgtcacaacgagtataaatgttgaaatccaccagataatagaaattattattattattattattttgagacagagtcttgctctgtcacccagggtggagtgcagtggcatgatcttggctcactgcaacctccgcctcccgagttcaagcaattctcctgcctcagcctcccgagtacctgggattacagtcaccatcatgcccagctaatttttgtatttttagtagagacgggtttcgccatgttggccaggctggtctcaaactccttacctcaggtgatctgcccgcctcggcctcccaaagtgttgggattacaggcgtgagccactgcacctggcccaggtaatagaaattatttttttaaaactttttaaaaggtgtgtgtcatttgtaagagacaaaacctaaaacataggatactgagaggttgaaagtaatatagtgggacaagatatactggacaaaactaaccaaaaatacgttgatgtatgaatatcagaccgagtagactttgaaaattttttttttgactttgaaattttttaaaaattatattagggatacagaatggtattgctagatgacagagggctaattcactaagaaaaatatagcaattttaaatctgcagaatactaacaacatagcttcaaagtatgtaaagcaaaatttgacctaactataggagaagttgacaaatccataatcttagtgagagtttttaaaccccctctctcagatactgttagatcaagcagagaaataattaggccatagaaaattggagcaccgtaagaaacaaattcgattaagtacacttacatagaattccgcactgaaccaataggaaatacttacttgtttcagcttcacaagatattttttcaaaaagtgatgacagattagaatataagggaaatgtcaaaaaatactgaaagatcaactttatgcatgccacatttttttttggccaaaatgcaagaaaattagaaagcaataacaaacaattgctgatgcctgtcatatatgtttggaaacttagcaagcctgcttctgaatatgtcatggatcaaaaaagaaattataaggaaagttatgaaagagttagaactgaatgacagcaaaagcattccaaataaaaatgtatgggattacagctaaagtggggtttgaagtgaaatttatatccttacatgtatatattggaaaagaagaaagatttaaaaattaataaactcacagttgtgaaaaggacaacagagtgtattcaagaaaatagaagaaaggaaataagggtacaagcagcaattaatgtactataaaacagacagcaaagatggacaaagtgaaaaactgattttttgaaaagactagtaaataggcagacttctggcagggttggtgagagggatcaggagagggaggagggacaaatgaataatacaggagtcccccttattcacaggggatacattccagaccctgtgggtgcctgaaaccacagatagtagcaaccatatataaactgtgttttttccctgtacatagatacctatgagaaagtttataagtaagagattaagaacaataataataaaattgaacaattaaaacaatatactgtaataaaaattatgtgaatgtggcctctctctctctctcaaaatattttattgtatgtagtattttcagaccacagttgaccaccagtaactaaatgacagaaagcaaaaacggataaggaaggactactatattaagagtgggctgttttccagataaaggttaccagtgttaagaaaaaattaaatcctgattagacctgtaacctttaaagaaatggaatgagtccaaaaagtcctagtccaagatgcttttacagagaaggaccaaggaacatttagagattgatttctttatgtatcttggaagttaaagaatttgggccaggtgcagtggctcacgcctgtaatcccagcactttgggaggccaaggcaggtggatcacctcaggtcaggagtttgagaccagcctggccaacatagtgaaaccccgtctctactaaaaattcaaaaattgaccgggtgtggtggcaggcacctgtaatcctagctactcgggaggctgaggcatgagaatcacttgaacctgggaggcagaggttgcagtgagccgagatcgtgccaccacactccagtctgagcgacagagtgagactttgtctcaaaaaaaaaaaaaaaaaaaaaaaaagaatttgacttttattctgagtgagaagggaagccctgagagggttttgagcaggggaatgatatgatatcattcaaatcatgtttgaaaagagtcactccattggctgcatggaatattgactgtaggggaccaaggagcaaagcagaatgaatgaccagttaggaagcttctgcagttggagcatgatgactcagacaacggttgttcaagtggagacagtgtggaatggtgagatttggagtaaatttcgaaggtagagacaacaggatttactggtggagtgaatattgggtgtgtgaaaaaagaaaagtcaagaatgacttcaagattttaggcttaaacaactgttaggatggaattaccatttactgcaatggagaaaattgtggggaagcaagtttagggtggaagatagagttttgttaagttcaaggtgtctgttaggtatctgtattagtccgttttcatgctgctgataaagacatgccagagactgggcagtttacaaaagagagaggtttaattggacttacagttccacgtggctggggaagcctcacagtcatgacggaagacaaggaggagcaagtcacatcttatgtggatggcagcgggcaaagagagcagtgcttgtgcaggaaaactcccctttttataccatcagatcccgtgagacttactcgctatcacgagaacagcatgggaaagacctgcccccatgattcaattacctcccaccaggtccctcctacaacatgtgggaattgtgggagtacaattcaagatgagatatgggtggggacacagagccaaatcatatcagtatccaagtagaaatgataagtaggcagttgaatatgtgagtctagaagttaggggagaggtctgggctagagacagaaatgtgggagtcattggtgtatgtgtggaagttaaaaggccctgagacgagacgagacgagatcacaggaacaagtacagacagaagagagatgaggttcaaagaggagacccccaaaagtggagagatccagattatgagggggaggtactgccaagggggatgagaagaagccatcagggaagtagcaggaaaagcagccaagggtcagtgtcccctcaaagtcctgtgttgaagccctaatctcaatgtgatggcattaggcggtggggccttcgggagatgattaggtcataagggttagggtcctgatgaatgggattaatgcccttctaagaagaaacacaagagagatggttctcaccaccaccaccatgtgagctcacagcaagaaggtggccatctgcaagccaagaggagggccctcactggaacttgaccctgctggcactctgatctcggatttcctagcctccagaattgcaagaaatatatttctgttgtttaggccccccgatctatggtattttgttaaaacaacccaaactgactaagatggaagtcggaaagtgattcaaggaggaggaagtaatcagatgagtaaaaggctaataatgagacaaggtcaagtagcatcaggactaagagttgaccattagatttggggatgtggaagttattggtgaccatgtccgacagtttatgtggagtataagacacaaaaattgggcaagtcgaattcaagagagaagggaaggacagaaactgaagattctgagtttaaattgttcttctgaagagttctgctgtaaataagagcagtggttgggtggagatatggggttgggagggtttttttaaatatgagaaattatgtttctggtggaaatgatctagtagacagggaaaaactgataatgcaaggagcaaagtcttggcgtgcatgagagcagatagattgtagcatatatattgcaggtgaccttagagaggagcacatccatcaaaacgagggaagcagggcacaccagcaccatgttcccttttgattgcttctgccttctcagcgaaatatgaagcacggtcactagctgagagtgaggatggggaggagttattggaggtttgagagagaaggtacgaaacagtcctttaggagaaaaagggaatgaatggacaagggatttctagataatcgttggacagcattaagggtcattaatttaagggagttcagtcagtgtggctgtgtgtttttctctagccacgtttagctgcatgggtgcaccctcagagttggcagaggcagatttagccagagctggcattttgcccagtgagtacaatgcctccattgttgtagacagaggggcaagggattaacagataatccctatcttaaactgtttcagataaaagataaagagagacagctctcaactcctttcagatggccaataccccatgatagtcaaacaaggcatgttaaaacataaaacttacagaggaaagtcacttatgaatattgatattaaatacatgaagtgaaatattcagaaaatgaatcaagcaatgtatataaaaaacatcatgatcaggtgtggtttatcccccaaatacaaggaaatttactataaaatctattaatctatttttaccacattaataaagaagaaaaacagtgtgatcatctcaatagatatagaaaagcatttgataaaatccagtatccattaatgattttaaaagcacctcttaaggccaggcgcggtggctcacacctgtaatcccagcactttgggaggccgaggcggatggatcacctgaggtcaggagtttgagaccagcctggccaacatggtgaaaccccgtctctactaaaaatacaaaaattaggatgtgatgtggtggtgggcgcctgtaatcccagctactcgggaggctgaggcaggagaattgcttgaacctgggaggtggaggttgcagtgagccaagatcatgctactgcactccagcctgggcgacagaatgagactccgtctcagaaaaagcacctcttagacaatgaggcatacaatggaattttattatcttgataaagggtaatgtgaaaataaatctacaaacctcgtaagtaatgtattggggaaagatttaaagtcaagaacttgaaggatccccactatcaccccctctattcagcattgtaattgtgcccccatgtaacagatatgaaaaggaaataagagtcatggagattattatttgcaggaaaaaagtgctacagaaaacccaaagtgactggaactagagttttccatttttcaagcaagcttcccatatataagatctatatgcagtaatcaaggtatccctttatggcagccacaaacaattcgtaaatgttatcatttcttagaaaagcattcacagtagcaacaaaaactgttgaatataatgcaagggctagacatgcctggagaaagttataaagctctattgagggacataaaagaagacaaatatgaggagagacacagcatgttcttgaatgggaagattcagtgttgtaaagatatattctccccaaattaatgtataaattcggtagactgccaatccaaacccaaagagactttttcagggaaattgatcctaaaattcacatgctgtagtaaggggccaagaatagccaagacacattttaaatagaagaggggaaggaatgccttaccagatttcaaaacataaatctaaggtcattaaaattgtgtgatattggcacaacagcagacaaattgaccagtggaaaagaggaaagacctcaagaacagaaaggatagattattcaataaaaaatgttagggcaattggctgtccatatggataaaaagaaattctgactttctcttagaccgtgcacaagaataaattccagagggaataaagacctaaatgtgaaaagcaaagctataaaacttaaaatagaacacttttatgatcttgagacaggaaatgatttcttaaactaatcataaaaatcataaatcataaaataaattgataaattcaactatatgcaaaagcaaaacctcttatgacaagaagtttatctaaacaaggctaaaagatgagctacagaatgggaaagatttttgaatcacgtcttggaagcagatcctctgccctagtcaagctctcagatgactgcagccctggccaacatcttgactgaaactttatgagaggctttgagctagacccacccagttaaagctgcttctgaattgctgacccacagaaactgtgagagataatagacgtttattggttttaagttaccaagttctggaattatttgttatttagcaatctataatacaaaagcttaatcctaagagagtccttagagagtcagccatttatataattgattggattcaggtttccatcttagttgagagcttgttttaatttgatgaaatagcaggtaccatcattgtttagcttctgggtttgtaaatattgtcttttcattacaaagagaagagatatgcaacatagtaccagaataaccaaaaaaatattttaaatccaggtgacttacttcactgtatctcttcaaggtgattcccttcatcatttatagtaattttatatatttctataatagtatcatattctacaatgtaaacaagcaatgtgcagaggagaaagcaaacgggctaaaagatggctcaacttcactagcaatctgagaaagtaaagcaaatctaaacaacaaattcagactgacagatggcaacagttttaaagcataattctaagtgttggcaaggttatgaagaagaggtaagtgtcatgtgtcactcatgagaagatgtattagttaaggtaggctaactgctatgacaaacaaaacccaaatttctttggctaaacacagaagtttattttgtacacatataacagtccattgtgggtccaggtcattgggcggttcacccagatacctgggctaccagtggccttaccatcttcagtgtgcagcttccaaggtcaccctggatgtagacatcccgctggtgtaccaggaaagtactaaacattattcatgggaaggctttatgggcaaggcatggaaattgtgtactttactttcattcacattcctttagctaaaactcaagcacagggccatgtggaactgcaagggatgatgggaaacatagtataactaagtgcctaggaagaagaggaaattggattggtgattaggtagtggtctatgctgcaagatgtaaactacagactgttaattggtacaatcaccttggaaagcaatttgagatggtgaaactgaagcaatgcatgctctatgacccaggaggcccatatctaaatatagacactaatgatgtgctcttactcactgcccaaggaaacatgtacaaggacatttgttgaagcattgtttataaaagaggaaaattagaaacaatctgactgttcttcaatttggaaatggacaaataagagatctagctacactggaatactatatagccattaaaatgaataacccagatttacatgtatcgaactggataaccctcaaacatttaaagttgaatggtgactatagttgactgtagttaataacaatatattgcattcttgaaaattgctaagagagtagattttaagtgttctcaccacaaaaataagtatgtagggcaatacatatgttaattagttcaatttagccatgccacaatgcacacatttcaaaacatgttgtatatgataaatatatactttttttatgagacagggtatcactgtcacctaggctgtagtgcagtggcaccatcaaggctctttgtagcctcaacctcccaggctcaagtgatcctcccacctcagcctccccagtagctgggactacaggcacatgcctccacacctggctaattttttattttttgtggaaacgaggtcgcactgtattgcccagtctggtctcgaactcctggacttaagcgatcctcccacctcagcctcccaaagtgctggggttagaggcatgagccatcacatccagcctaatttttgtctattaaaaaatttaaagacgagtaaaaaaagcaagttatagaacaataagtatagaatattactaggtatgtagaacttttaaaacacctgaaatatggttatatcttgcttatggacacatacttttcttgtaaaaattttaaaaacatggacaagaaaaatacactccggctttggagtagtgtgacagttcacagagggtgatccccagatccccgaaggtccctgacaccctttcaggatctctgtgaggtcaaaactattttcatcccattcgtaagatgtgatttgccttttttcactgtgttgacatttgcagtgataatagaaagctggtgctttagtacaaatcaaggcagggactccaaactagactaggagtcacatactataaaaaacaaaaaaaagaagaaaaggaaaaaaaaaacaattgcatttaagaatgtcctttttggagcattaaaaattttttttcaagtttaaactttatctgatctttaaaatattctgtgtgttgacgtgaaaagtacatataaagcacttccgctgcacaccgaagtacgatggctgcttctaggaaaatcatttacacagttgtctgagctgtgagctgaactagcagtttggtttttttcttggacaccatttttgcttgaaaggttgtcaaattatggtcattcagacttgggcatttggcagacattttctcaaaaatgagcaaagtgagcctattgctgcaaggaaaacaactgacaatatttgttgccagtgataaaatttaaactttgaattgaaatgagattttggggaaacttttttttttttttttaaatatacagagtttctctcttgttgcccaggctggagtgcaatggcacaatctcggctcactgcaacctctgcccccgggttcaagcaattctgcctcagcctcccaagtagctggaattacaggcgtgcaccaccacgccccgctaattttttgtatttttagtagagacagggttttaccatgttggtcagactggtctcgaactcctgacctcaggtgatccacccaccttggcctcccaaagtgctgggattacaggcgtgagccattgcccggcattttggggaaacatgtatgagcttgtgagtcactgtgagcttgacttaaagctcctaatacttgacttaaagcttcctgatacttaaaaaacttttctgatgagattggtggtgatattaacaaatgtggataatgaaatatgtcaacatttgggctaactgcataactcactaaactgatgtattccaaatgaccaatgcttgatgttataaaatcacacatgggcaaatgattcattcaaagctcaagatagaccaatggattttaaaacgtcagagtacataaagctcattgttatgatttcagattccacatttcaactggcgtttaagaaaccgtccacttgttgagttttgattgtatcaaataatattcttaattatccaaaaagacttaaaatagttctccctgcatatctgtgtgaagctggattttcttcatatacttcaactgaaataacgttgccacaaagtgaatacagaagcatatatgagaatatagctatcttctattaagccggacattaaagagattttttaaaatgttaatcactgccattcttcttgttacttttttgttttgaaaaaaaatttttttaattttttgtagagacaaggtctcgctattttgccaaggctggtctcaaactcctggcctcaagtgagcctcctgcctcagccttccaaagtgctgggattacaggtgtgagccactgcacccggcctgaaaatttttttttaatgttttgttttgaaattatacaaaaattttacttatgttgacatgcggtaggtttttgttaacgaattagtaaatatttaaaaatttttcagttttaatttccaatatggtaaatatgagtagctagaatgcatataaacaaaagctcttagggggtctccagtaatttttaagtgtaaaggggtcatgagaccaaaaagtttgagaactgctgggaagtttgtgaaccattagagaagaccacaaggaaggcttcaacttgatctttaactttttctttcttcttttaataaaggaaagactggcacagttacagcagaatgctttcatttgttggatctgggtgatggttatatggatatgggctatattgctttctctttgcttccctatatgtttgaggctttttttttttttaaataaggctatattaaacatagtgtaggagtcagctttgattcctcctagaatggaaggaaattccccaccttgaatggggagaattttctaatggatagagaccaccgaaacacatctcagctccacccacttctgtctgtattcattgtcaccaccctcatcgaagccaccgtcatctcttgactggaccacccctcttgtctcctaattcattccctgcttccactttcagactctcctctccaaagtagtacatgatcttccatcaggcaccagactacactactttcctcttgcagccttcccatagtgttcgtaactcctagaacaaaatgcagagtccctcctgtgactggccagcctctgtgagtcggctgcagccaagccagcagctgccagtctcccctcactcgccaccagtggggtcctgctcagtgcttagtaacaggctccactgacttgaaaactttgcctctctgtcaagagtgaccccaggagaaaatgagagaaagccacccccagtttctcattccttccagcaaacccaagatctttgccaacaagtctggcaccaccacccagtcggcagcctaggagtctttttggccccttttttcccctctcccacctatatccaatccatcaccaagccctgttgattttacaccctaaacattcctcaagcccacctgctgcctctgttcctctgtcaccaccaccattcttgtctgagccaccagcctcgccgtccctcctcctgcagtagcttcccctcccgtctttttcctgcatccagtcagtcccttccctgtacttctccccgctgaagccaaagtgcccttctccagggaccagctccagcatttcgggcagcactgggtccaattggggcagaggtgacattcttagtgcctagttagacagggactggctgacaggtggttgtctggtctttgtgttaaagggatcactccatagataacattttccccctcctgggataacccagggccctgccttctgcacctcctacttcagctctttttggggacagccaggaggaaggcttttgctcttttctggacagcgtttaaataatttagtgtcagatgaaaacatttgagtaattcatagaaaaaaagtgctcaaatcctccatttacaaatcaaggactgcaataactcacacaagggagagatttggaattgtttcaagctttgcagggatcaaaaagatctagtcagatcacttagttgccttttacagttaaagaaccccaacgggccagacatggtggctcacgcctgtaatctcagcactttgggaggccaaggcggggggatcacttgaggtcaggagctcaagaccagcctggccaacatggtgaaaccctgtctctactaaaaatacaaaaaaaaattagccgagtgtggtgtcgcacacctgtaatcccagctactctggaggctgaggcaggagcattgcttgaatccgggaggtggaggttgtagtgagccgagatcgcgccaatgcacttcagcctcggtgacagagcaagactccatctcaaaaaaaaaaaaacaaaaaaaaaacaaaagagccaccaccaagagagttgaggggacctttttcaaggtcaattcttctcgtgagctgacagccctgtgtaagcactgtcttgggccaggccagataagtggagatacaccagattgctgtgaatatgaaacaaagttgcattctccttactttatgtgttaaaatagtgaaactttaaaaggctatttatttaaatattccactaaacttagttctgccatattgttccttgtcgcttatatttgaatatcactgttaactagtgaaataaataccacacctgtctcacaatgggtagggagaacataattaatgttcataaaatacatctagagaagtggttcttgatcaaatgggttacagatccatttgagaatttgatagaggctgaatatccaatgctctccttagaaaaaacgctcgcacaaaaatttcaggagtctcgtagccttccgtgtccctgtccacaatgtgcaccccccacacacaccccagaaaggcgattcatggactcgtagcggatcctctggaggccccaggttaagagccctattgtagagtgacatgtggtgtcttcatgctccaaacccaaaccccgacctgaaacatttggaataaaagtcacgcttataattgaaaatatcaaataatgacatctgtaatacccctgttcagctgaaagttgactagcgcagcacccagtaatccaccagtacttaatatttcaggtatcggcaagagggaactgacagcccccctgagctgaatgtgttctgtatgtttccacaacaccaggctcaggacttacatctcagtaatcctccctccttactacacgaattagtgagagaggcaaagaattaaagtctcctaggagagtggtaaagtcgtttacacgtttgattgtagctaaagagcccagagcggtttgtgtgagtttcgaaagttttaagatgagcgtggggatctggaacgaagctgcaccaagtggatgcctgcaatgcttggcttctaacccagtttatttccctataggccatcattcatcatgtcagatggtgcaaatacctcggaccaggacagcttgcagcttgtgcattgtttgtaaacccagaggggagaatcgaataagcagcaatttagacaaaaatacattatttgaaagtgagaattgcacacctgtgatccctttaagtaaagcatgaggcatattagagcttatggtttaaagattattctccaagccacctgaggtttacctaccaaattgtacaaaatctatcttttaaactaacttaaaaagaaactgttacttatacaatcagtagtctcaattgtagatgcaatcattttaaaataaatgctattataattcctcctttagaacacatctcaggtgtaaagcattgctcttccccactcctctttaatatttcaaaaggcagtagctggaacagaattctggtacaagtgaatttaaccagttgttggcgttattgtaacaggatttttcactttctattttttgctttaccaatggagagtggtggtaagaaatcatgtcttttcaacatttatcctggtctcttgtgcgtattttatttgaataattgaactatactttcttccctcgaaactgagcaaggtggggatatgcacttagcgattcttaatccaaaggaaaaaagaccaagggtagggttcgtctgaggcctctgacctctgtcccatggagtgaaggaaagggaaccaaaggcctgggagatcagggaaggctttgcagaggagggagctcccacaggagaacagtttgccaggagagctttacaggcagagggaggagcaagcgtgtgcacaggcccggaagtgccagagcagtgtgtgtgcaggaaacactaattcaggttttcttgggggctgaggagggagtgtcaggtgatcaggtgatcaggctggatgtgaggggaagagccaacacatgagccttggatggcaatcaaagggatttagattttatcttgtaggcactggagaattctgaggagtgcagaaatcttcgaattctaggtctgtgacctagagacacagaaagggtggtctttctgtgaccaccctttcaggaggatggattggaaggaaccaataccagaagcaaggagatcagtgaggagctatttcaattttcctgtgggacacaggtaggggaaaaagggaattggtactttgtgttatttctggtgggtagatgacaacattcatctctgtgccgtccagctagaaattgaattgcaaactgttagatataagtagtttgctgctaccatcaggcatatgtcttttgcctggtattgcctcactcttccatgtctttaatagcaccaaacacatgttttatggtgtctagttcatcatggccatataagcattcatggttgtatttgtcaggattctttcagttgtaaatgacagaaactcacctcaaacagccttaagcacaagagagaatttattgctcaaataactgaaaagtccaggggattggcctagattcaggcatgtctggatccaggagctcaagtcatcaaatatggtatgtctctttacagtgccctgtttgactctgagtgggctttattctctggtagggttgtcccaggtagtgacagaggtatccctgggagctgcaggtgatagtcttctagagtggcagcctccacagaaagcaagcttttcctgtagtggctccagcgaaagtcctgactgacttagcgtggctctcaggtggtccaacttgggttgtctgcccatctctcaaccgtgcccagattggccaggcctggaccacatatccttccctgcagctgggccaggaccaaagtaagccccaccagagccacactgggcagagcaggggaaattataggccactactagaaagggaggagacaggggctggacaggcagaagcaacaacatttccatcaggacagggacgaaacgaagggcccaaggggacaccctgagttgaaatcggaagagttcagtaaagggaaaaattgaatccctcttggagaggacaacctttcagctctttgaagcctccccttaacacctatgttcttcctccttcccatgatatgtggcttttagctttttcattgccctaatcaccctcctctggctatgctctaggtagtgaatgtctcttttaaaacatggtgtttggtggtaacagagtacaccagatgtactctgccaggctggcgtttggtgaggctcttatttcccttgttccgaaaacaatacttctgttaacacagcattggctttctggtacgtggtactcacactgttggtagggtgctgttaaaatttgcagtcagtatcatccagttgaattttgtttgtttgtttgtttgtttgactgtggtataagatgggtttagtagactggcttcatgaattttcttgtacctaagtgttgggcaagctgtggctgggtcacagagtggctgctggtgtgaaaggtgatttggcagagagaagaagctctgtttaaagatttattgggatcccaggggtgggggtgtatgtgtaaagggagctgagtcaattcaaatgtgggagtgatggctaataaaattagttcagcaaaaatttatgaaacatgtgagcccaatgtacaaatccttgttgaatgctgtttagtttgtttcaatctattgtccaagtccttggcattctgctgttccagtattggctcagcatccattttgcagtccttacctgcccctccatgcccatgcacgcacccacaaaggagcagtgtatgttactatttcaacatctctgccttcttctgttgttaaaatctaacccatcccctgcttgcttggagaatcatcatctttgtattgccaccagtcaagaagattgtttaagtgttgtttctcaagctgatgtgatgaagactttagttttttgtttttcattttacaatacaaaattataatgttgaatctgtgtttttaaattacacacacaccaccctagggagtcatgtatcctgtattctctggtcagcttccaccactgcaccctgactcccactgaaattcactaccctaacttctgcctccttaaacttcacctccgtcctgtgacattactgttctctatttgacccatctcagctctgagttgagcaatgagccatttcctgtacttgaagcagctccccggttttgtccacttttctacttttaaagcaaaaatgaggctttagcttctgcttgagtcattctcaaggttcatgttgtgtatatctgatttatttcttttgagtttcctaaagaaaggctgaacagaaggacatgcataataataaaatgagctttttttttttttttttttttgagatggagtcttgcgctgttacccgggctggagtgcagtgtggcaccgtctcagctcactgcaacctccgcctcccgggttcaagtgattatcctgcctcagcctcctgagtagctgggattacaggcacgcaccaccatgcctggctaatttttgcatttttagtagagacagggtttcaccatgttggtcaggctgttcgcaaactcctgacctcatgatccacccgcctcggcctcccaaagtgctgggattataggcgtgagccactgcacccagccaaaatgagcattcttaagtggtaaatttacttgtattagctatgtataatacaaatatatatagacagagaatgtctatacttttaaatacctttgaaaagatatttcagactgtaaatcagtaaaaatatagtgatttattatatattcatttatttatttattaggtacctaactaggccaggaccttgcgctagagtggtaaacaaaaaagataggctttgcctttaggaatcttgtagtatgaaaaccatgtttcagattgtgccagaaagacatcccatgtccatggatcagaagactcaatatggttgagatggtagtattcttcaaactggtctacagctgtggaattgagattgaggttctttttcttgcatgtgtatgtccacttgtcccaacactgttaaaaagactgtcctttcttggattgtctttagatctttgtcaaaaatcagtttgccctattcatgtggatctatttctagactctgttctgttctgtccatctatgtgtttattcctttacctcttgttaggttcatacacgtctaagattgttttatcttcatgatgaactgaccctcatggttcgctgtgtctttcttctcctgtgcacagaatgggcagtgatatagtttggatgtttgtccctgacaaaatctcatgttgaaatgtaatccccagttttggaggtggagcctggtgggaggtgattggatcatgcagatggatttcttatgaatggtttagtatttgtgagaaatggtttagcaccccttggtgccatccttgcaatagtgagttctcccgagatttggtagtttaaaagtatgtggcacctcccccatctccctcttgcttctgctctcaccatgtgaagtgcctgcttccgttttgccttccaccatgaataaaagctccctgagacctccccagaagcagatgccccatgcttcctgtacagcccacagaaccatgagccaactaaacctcttttcttataaattacccagtctcagatatttccttatagcaaatatgagaatggcatcataacagtcagtgctttagatacaagttgcttgagtagcctggtttctagagggaagataacacagagcagaaccacagccggccaggggtggacacaaggcatggacaagaagcaaacgtttgttgtaataagccactgagatgttaatgttgtttgttaccagaccataggggccaagctctgggcccaatccattctaggtcgtaggggcctgccctttatttttcatcaacaggagccaacaagggcacttttcctacattagaaacccagaagaggtggagaaggtaagagaggtgaacaagtggctggagataaaggacaagctgttcagctcttggccccttgcttttgatgaaactcagtttctattaggctcctctgtctctgtggccccttctcatagagtttaaggatatcattggcaggttcttctgaggcagggatgctaactgtcagtgcaggttcaggctatctccactaagaccggcttgtaatacctactgcttatgattcttagctatcctctgagttgccatatctagagatctgccccatttcctgtccttcatgactctacatcaggtcacctgatataggtgggagagtgggagagtggatattattacagaatttgcccctgatattaatttagtcatgatttttttcaggcaaagtatacagagagtttagcaaagtaaacagagaaaatttatatgaatgagcaaaattcaaggctaaacttgaaggggaaaggcaagacctgggtgtggagaggacagagtggccaggttttttgtttcaaaaatgtcaatgtgataaaatatcttcaccagtaatgtttatagtaatgataaaagagggcaccccaaactttggtgtttttttctagtaaaaatgatggttacatcgaactcacttgcagattcctcccctagctacatcatctgacttcctgaaattattgtaattatatgaagaagaaataatgctaatgaaagccgttcaaacaggtgaataatattaaacatcgcaattattgagcagttatgtgtgccagacagagtccaaaaagcttgatacgaattaattcatttaatcttcacaaataaccctatgaggtgtacacattgttataatccccatctgacaggtggacaccgaagtcatttgctcaaggtcacagctggatgataggagagctttgaacacggcagtttgattctagcctgctcttaaacacaatacatggaaggttgtctttctttgtaggtagaaatggtgaaatagtacctggttaaaaagaaactaggccaggtgtggtggctcatgcctataatcccagcactttgggaggccaagtcgggtggatcacttgaggtcaggagttcaagaccagcctgaccaacatgggaaaaccctgtctctactaaaagtacaaaaattagctgggtgtggtggcatgtgcctgtaatcccagctactcgagtgactgaggcaggagaatcgcttgaatccccgagacagaggtttcagtgagccgagattgcaccactgcactccagcctgggtgacagagtgagactccatcacacacacgcacacacacacacacaaaagaaactgaaacttaatcagctcacagaagagcaaatccagtggcccgccctccctcccagacaagaatgactggatggttaaattcactggtagtcagggaaataaaaattttaaaaataaaaatggtgatgagatatcactttacatccatcagactgacaaaaaattaaaactattgataacttatggcagagatagcgaatagttatgaaaatttaaagtgtatacacatataatatgccaacccagcagtcccatttttgggattctattccatggaaataaaagcactgttgaatatataaggatatttattatagtccttgtattgccaaatttaaaaaaaaatcccagaaaacaaatgaatacccattattacaggtatcttctatggaatatgatgcagcctctaaaactcatgaatttgaattatgccagatgacatggagggacctcataggtcctgttgaaagagaaatgcagggtgcagcagtgtgtatcatatgatcccaccatcccgctcgttaaaaacagtgaccctggccgggcacggtggctcacgcctgtaatcctagcagtttgggaggccgaggtgggcagatcacctgaggtcaggagttcgagaccagcctgaccaacatgatgaaaccctgtctctactaaaaatgcaaaaattagccatgcatggtgtcatgcacctgtaatccgagctactctggaggctgaggcaggagaattgcttgaacccgggaggcagaggttgcagtgagtcgagatcacaccattgcactccaacctgggtgacaagagcgaaactccatctcaaaagaaaacaaaacaacagtgacccccaccttcaaaaagaaaacctgtgcatgaacaggaatttatatataattatatatatgtatatatacttcacctgtttaaggggtacaattatatatatatatatatatataatctggttttagtaacacataggaaaaaatgtatatatgaggctgttatatggagtgtgtggaattgctgacatgaggggaggagggaaccaagcaaaaaagagaaggaagaaagacaactgaaaaagatacatctatctgcttatggttacgtatttctacaatgctctgtgtgggtgcagatatagctaaatagtgtttttcaaagattggaaagcaacatatggttaaaatgatcacatctgaaaccataggcttggcttggaccaatctccccaccatcctcctgtggtctgcatttgcctgtgtttatgtttagcttgcagaatggcatcagacagggcagcctttttctccctcctccattgccatacttaaagtaaagactccagagctccaaagagatggacctgttcaggtggttcataagcatcagtaagtgagagtacagatatggcagcatagtccatctccaggcaagggaatgactcaaagacaaaaccactgggtcatccctattagaagggaaagcagtggctgggtgcggtggctcttgcctgtaatcccagcactttgggaggccaaggccggaaaatcacctgaggtcaggagcacaagaccagcctgactaacatggtgaaactccgtctctactaaaaatacagaaaattagctgggtgtggtggcaggcatctgtaatcccagctacttgggaggctgtggcaggagaattgcttgaacccaggaggcagaggttgcagtgagctgagatcacgccattgcactccagcctgggtgagaagagtgagactccgtctcaaaaaaaagaaagaaaaaaaggacagcagagcagaagtggcagagtatctgccaatctgtggtcatttcagtttttatgaatcacatcaaaatggaaccacccccatcttcttccaacacaatgcactggtttttatagacttaacaagagaagcaagtcaaaaagtaaatattcctattgctgagtgcagtaacaccctaattttacacggcatgtatgtgtatggttctgaatatgagaatcccctgaaacattcagactgcttctctgtagttgaatgagggggacagacagtatagctttgggtgaggatgaactaatctactccaacagttaagcgtgtctaaagagtaagatagatgactttcagttaacaggacagggatatttcataatccaaaccacacttgtcactatgtgtaagcgatcactgctgtgtcaccagaaggttgtttgttttagtagactcatggttggtgggcacacaaggaatgggttgagttcttactctgggtctcctgatgtttccctgtccccggcttacccaacagacctcagaacagataaagatgcttatgtcgttgttgttgtttttgagacaaactctcactctgtcacccaggctggagtgcagtggcacaatcttggctcactgcaatctctgcctcctgggttcaagtgattctcctgtctcagcctcccaagtagctgggactataggcgcgcaccaccacacccagctaatttttgtatttttagtagagatggggtttcaccatgttggccaggctagtctcgaactcctgtcctcaagtgatccacacgcctcagcctcccaaagtgcttagattacaggcgtgagccaccgtacccagccaaaatgcttatgttatacgttatttaaaaagaataccagtagtccactattggaataagatttgtactttcagtcattcctaggtttcaattctggttgactttaacatcagtgattcatagttgttggccgtagaaccatgtcaatatatagaatgccattgcccctgtgggtaatatcagttgagttttaaatgttttgatagagggcatagatttgttagaggagaaagtcaaatatttaattccttaggtgggaacatgtgaaaccatgccagtgttttttacttaatattggcagtatcactatgaaagtacccagtgcagttttttcatgagctctcttgtaaataatatggtgccctttacagtaatgtaatttttttaagcttacaaggttctgattgttatgatacattttattagatatgtacaaattttcaggaaatgtcaacagaggctttatcattatgtgactctttaatctgatttctaggcagagtttattaggactggcttttaaaaaattaatagctttatttacttaccatacaattcacctatttaagctgtacaactggatggtttttagtatattcacagatttgtgcattcatcaccacaatcaattttcgagcattttcatcaccaaaaaaaaaaaaaaaaaactactagcagccactgacttccagattctacctctactcccagcccagtcaaccactaatctactttatgtctctatagcgttgctttttctagacttttcatacaaatggaatcacacactatgtagcctttggcatctggcttctttcacttagggtgatgtcttcaaggtccatccctgttgtagcatgcatccatacttcctttttctgccaaataatgtttcattgtttgtatagaccgcatttcgtttatccatttatcagttgatgagtatttggcttatttccactttttggcttttgtgaataatgctgctatgaacatttgtgtataattttttgtggcaaggtctggctttttagtgactcagttgcccttttaaatacccgtgatatcatagctaaataggactcccagatgtcctcttgcttggcaccttctgtttaggcacatgaagtatctggattgcccagagagggaaagtggcttccctgggcacacacagctagagagcggagtggggccctgcctccaggtttcttgctcacaggttcaatgctttacctattagtgcggacacatgaagactgaagaagacctaaggtctgcaatatgcagctttgtgaaagccttgcagtcttttcctgtttgctgtttcttctgttttaccacttacaacagtgtggtctcgtctgaaagcaaaagaacataagagctggaatgtttctgagagattttctagtcacatatcctcattatacaagtgaggaaactaaggtgctgagaaggcatgtgatgtctcacccaagatcacactgttaggggcagagcaaggactggaactttggtctccctgctccaggtcccggtcctcatctaccctgttaggacaagcatctgttacccagggactgcatgaaggatggcactgagccattttgtgtctcttctctaatagaatcccgtcacggggctgctgtcagccagccatgagcagaaggatgcctgggtgcgggataacatctacagtatcctggccgtgtggggcctgggcatggcctaccgtaagaatgcagaccgcgatgaggacaaggccaaggcctacgagctggagcaggtaatagtgactgacagctgtatctcggctgctcagccaccttctccttgaactgaaaaacccacagagaagtagctgtgtgtgcagaactgtttgggtgtaggcctctcctctatttctgctatagaatattttggggaggtacttagattatctcaacctcacattggtctttctgtttgagtttggagattcccacataaaacaatgacaacatccaaaatcacaccaaatagaaaatgaaagcaaccacatttcttttttttttgagatggagtctcactctgtcacccaggctggggtgcagtggcgcgatctcagctcactgcaacctccgcctcccggtttcaagtgattgtcctgcctcagcctcccgagtagctgggattacaggcgactgccaccacgcgcagctaattttgtatttttagtagagacagggttttaccgtgttggccaggctggtttcgaactcctggcctcaagtgatccgcccacctcagcctcccaaagtgctggaattgcaggcctgagccaccgcacctggctgcatccacatttctaaccccaaagtgtcaatttgtataattagttacatttctttcacacgtactttatccattttgtacatatttatacacaagacatcatcataaactgatatgttttttaaaagtcacctcaccacagcttcacattccaaagcatgtactcttcagagtagtcacactggaaggatatttatccaaacattattgccactgcttaaaatatttttgaaacttcccttaaaaatacgtttctaatttgaaccattccaggaaagcaatcttattaatttatggtcaccctttaattttgaaccaaattggtgttatccaatttgggggcctatattattcaccatacaggacaatgaagtccttttattgttttccaaaatccagaaccaagatacctaccaaagatttgccatcactgagtttgtaacaaaataatctgtccctgaacacaggaggtattttccaagtgttttgagtggtagcattgaagtagagagcactgaaatataaaaatcattctcttggcatgagagcccttgggatttatctttgattcagacattcttcgatggcctcacggtcagtggatcgtctgtgacatggtgtctcatgtattaacgtagcattattgttgttatttataatgaggataataagactagtaattggttacaataaatcctattattcagaaaccttggctgtcacttgcattttgttagagctttactcggtaattcagtgatggtttcacaaatggccatgttggcaaacattacttttgggcaggcgtggtggacttagtgtaagaaaaataaattaccaagaaatgtgacataaagctccagagtactacacttacagaaattgtgttgctaagatgtcaacgaggagtcactgaatttcagaggtggcagatatcatctgatccaacccctttatttgagataagtcactttgtcgagatttttctttctttatgatggagtggagaggacatgaaccatcagaacactcacgtaggctcgggactggcctttccagggcagttgctgggcagcactggcttgccagccacagtgatcaggaggtgattttcctgcagcaaggaccctgggccgtgttgctgattctgctttatctccacagaacgtggtgaagctgatgcgaggtcttctccagtgcatgatgagacaggtaggcagaacccacacacgtgtttgccaagtgggcattccatgtcattgtaattgtgacagttaacatgcttaagacgttttgtacttttcttctcaagaggaagagaaattgaaaatattttgcttactttctctctctcttttttttttttttttttttttgagacagggtctcacactgtcactcaggctgagtgcagtggtgcgatcatggctcactgcaacctcaaactcctgggctcaagtggttctcccacctgaggtgtgtaccattcacctggcctttttttttttttttttttttttgtagatacaatatctcactatgttgcccaggctggtcttgaacacctgggcgcaagtgatcctcccaccttggcctcccaaagtgctcggattacaggtgtgaggagttaccatgcccagctaccttctctttttaaaattattttcagtaactttactattgtatcacagtctcaaaggacagtttctgagaatctcttttgaagaggtacatggataaaaggagaaacatgctttttttttaatggagaagaaaacatttttttttaaaagccacgtctagaaagccatatattattgtttattccatcatgtttgtaaaagggtatattttcattgagatgaaatgcttgagttttaaaaacttgatattattgtttagtggtattttcagtgaggggtaaataaaacaattcattgagcatgtactgcacacagaacattatactaggatctgcacaaattcaaagacgaagacaaaacagtcctcactctcagtcagcgcaagaaaagacatagttgctcttttcctttcaacattaagaaacaagaaattgaaatttaaacaggttcctttcctcccctccttttctcccttcttccctccctccatctctccttgagtatctaccgtgtgtcacagctggggatatgtagacaaggacaccctttgtcatgacccgtcactcctgcagatgagactccccccaggctgggacattttaggcaagtgggcgaaaagaatccccagcacagtccctctgtgcggtgctgcctagcagctgccttccatccctctggctcccagaagtagcagataagagctctagatccaggtggctggccatggccgtgatctctgccagccatgaacccccataactatgcagagcgggcttgccttctccctcaggtggccaaagtggagaagttcaaacacactcagagcaccaaggacagcctgcacgccaagtacaacaccgccacctgtggcacggtggtgggcgacgaccagtggggccacctccaggtggatgccacctctctcttcctcctgttcctggcccagatgaccgcctcaggtgagctggggttgctggagcccattgtataaggagtgacaatccggaaaaggggtgggaggaggacaggtagcggccagtgtgtcaggccatgtgctgcttcactgctttaataaaatacctcagacaaggccatttatacagaaccgaaatgctttttctcgcagttctggaggctgggaagtccatgaccaaggcactaccaggctcagttgtccagtaagggctccatcctccaaagaggaggactgctgtgccctcccatgggggagaccagaagggcaagagagccagaggctccacgaagtgtgttttgtaagagccttcatcccatgtaggatatgtaggatgggaggagtcctcagggcctaatcgcctcttatggccccacctcttaataccatcacattggccacacctcaattttggaggggacacattcaaaccgtagcaatcagtattataaatcagcagtttacacaaaagaaaagcatgcttctccatattctgtgcatttgtttctgcaatagggcagggagtgcagggaccctgcctgtaacctgcagagaggacagtcaccctccacctgggcaccagcagggtaaaggccgttgagctggctctcttagcttccctctgttgaacacagaacccctttactgtcactctctcctagttcctggagccacctaggtctggtctaactttgacacttagctgtctgcagaccatctcacccctgctcttagacttttctcctccaggatcagcagccctgtcctttcagctctcccactcactaccctggtcaccctcttctagacacaccctcacttttccaaattatatttgagcaccaccatttctgccactcagcagtgtgcccagagcgggctgagcagcccgctactcagcgggctgagtaggctcacagtttgtcggcggtgtgccttgttcccattgaagccagagccgctggcctctgtggcagcctggacgccaggcctctctctttcccactagggtctcacaccaggtggtctctctctcacaatggcatgtgccacagatgctcccccaggttagggcacttaacggctatgtctgggagttcttatcacctaccagtccagtcaactgatgtgtctgaggcctcccattcattgcagactgcaagtgtgaaactctcaaaatcccagaaatcagtaagcagtattgttatggctgtgtgaataaatcacacatttatgaagttacgttttggctatgaaagttaatatgagctcactgtagatattttggaaaatataacagaatacaaagaaaaaaattccactgccaactttcatttggctgcatcttctccaagtcttttttcctgtgcattttttacatgtttaaggtcacattgtacacataaacatagtctttttattacgtagcgttataacaagcacttctcccgtgatataacaagctcttcataaacattattttagtgagtttatcagtgggtataccataattaatttaactattccttccttcttttattttgctactataactaatgttgcaataccaactttgaccccatcttcatttacttccttctgagagttagatatcactcaaaggcaactcatatatattgccaaattgttttcagtttctagttaaacttagttctgattgaaattctaatctggcttactagttaagctgccctcattgatgtaagagtccatttcctatcatatccatagcagcttccagaattcatactttaaaaatacctgtatttgttataactgactatatttttctgcagggtggaaggccagctcctggagctggggactccctgtctcccactgggaaaagtattcacccttctctttggctctctcaaagatagagacagtgtctctggttcttctggactaaaatccttgctctgttggaaccttccccgcatcaatccaacctgtaccagaggtcccaaatctctctcatccctttctactcataggcacacacaggaaagtggagcccttcctttccttctccttattttccttccttccctccttccttccctcttttcggagattagacactcactgttatgccttacttaagacttcatttttgatgcctttggaagaaaaatgaaaatgagggtaaaagggtttatttcctagtgtgatatttgtaatttgtgactggcagctctctgcaacatggcttcataacctcattgtttttctttgctaggcttacgtatcattttcactctcgatgaggtggccttcatacagaatcttgtcttttacatagaagctgcatataaagtcgctgtaagtatcaaccctggtagtcttttcagatgttccagtcaacaaaaagaataaaaatcatacagtgttttgagggccaggctgtttggggctcaccaaaaggttagcgagactagcgctatgagattgtgtcacctccacacacaaactgcatatttttgtcctggaatagagttgggggtttcaggtttttggaatgtactctgtgctctgtctgaatccattatgcttgttatatttttttatttattttgtttatttatttatttttaaacagagtctcgctctgtcaccctggctggtgtacagtggcatgatctcagctcactgcagcctctgcctcccaggttccagtgattctcctgtctcagcctcctgattagctgggattacaggtgcctgccaccactccccgctaatgtttgtatttttaatagaaacggggtttcaccatgttggccaggctggtctcaaactcctgacctcaggtgatcctcctgcctcggcctcccaaagtgctgggattataggcgtgagccaccactcctggcccattatgcttgttttattttattttatttttaatttttttatttccataggttattggggaacaggtgctgtttggttacattaaagtcctttagtggtgatttgtgagattttggtgcacccatcacccgggcagtatacgctgcaccctatttgtagtcttttattcctctcccgcttcccacactttccccctgagtccccacagtccgctgtgtcattcttatccctttgcatcctcatagcttagctcccacttaggagtgagaacatatgatctttggttttccattcctgagttacttcacttagaataacagtctccagtctcatccaggtcgctgcaaatgccattaatccattcctttttatggctgagtagtattccatcatatatataccacagcttctttatctactcgttgactgatgggcctttggttggtcccatgtttttacagttgtgaattgtgctgctataaacatgcatgtgcaagtgtcttttttgtctaatgacttcttttcctctgggtagttacccaggagtgggattgctggattaaatggtagttcccattatgcttgtttgaaataagatcctaacatgtcctacgggatgcatatgtgctggcttgagttggggctaaagaggtagcagcattagcaccttggtgggagctgggatgccatgagcgtcgccccaaccaggccacaggtagaggggcttgagccaggcagagccccagcctgggccagatttgctgagtataaatgtgtataaaccccctttcctccgagcttctgtctggtttggaaggcaaagcctgaggcacctttacacaacaaccccagtgtgtaaagctctcagggaaggagggaaaaggtaaaggctggttttaaaaaagccactatggtctaaaggaaggtcagcaaaggttttctgtaaagggccagagagtaaatatggtcggctttacaggccctagggtctctgtcgcagctacttggctctgcctttgtagcatgaaagcagccatagacaacacgtaaataaatgagcatggctctgtcccagatagactttgcaaaaataggtgggaaactagatttgttccaaagactgggtggagttccctgaccccaggtctaaagcagtgattcccaacgagaggcaatcttgccctcccaggagacatttggcgatgtctggagacatttttggttgtcgcacctggtcagtaggtgttcgtggcatctagtgagccaagactaggactgctgctagacatcctacaatgcacaggcccccctccccccaccccaatgactcagattacctggctcgaaatggaatagtgctgaagttgacaaaccctggtctgaagaaacttgagaagtctttgtggaaagggtgggcattgagttggaccttggaagctgagcagagtctagatcagcagaagggaggagatagggagtttgggtgcaggaatagcttgtgcagtcccagaggcaggaacaggctctgagtgtggctgggtgggctagggggtgcttgaggaaaagggtacagaggaaaggagtagatttaggaggaaagctgacattggaaaagagtagaacataagtggatcttatgttccactctcagcttgtgggtgtgtctaaggaggccaaatcatggggcatatggccattcagagagagagatgtgaatgtgatccactaggaaatacaccacttgtcattttagaccctgaaacaaggggaagcagcaatcaaagcagtttttgaggatgaatcacccagtgccggggttggaggaaaggtgggttgggctgcaggaaggcgcagatgagaagagtgctcaagggaagaagcccaggctcagtcaccaggcacgctcagcagggaagttgctctaggatgcccgagtctcaatctctatattttgaaaatgttctggccaggcgcggtggctcatacctgtaatcccagcactttgggaggctgggacaggtggatcacctgaggtcaggagtttgagaccagcctgaccaatatggtgaaactctgtctttactaaaaatacaaaaattacctgggtgtggtggtgtgcgcctgtaatcccagctactcgggaggctgaggcaggagaattgcttgaacctgggaggtggaggttgcagtgagctgagatcgcgccactgcactcctgagcaactaagccagactccatctcaaaaaataaaaataaaaaaaaagaaaaaaagaaaatattcttttttggagataaaaaataaagattgaaatgttggcatcagtcttgtgtgtgttgggtggtcagctttcagtagtacacatagaattgtttaaaacagcatcccatatgtggattttttaatgaaaatatgaattatacattaggtacacatgtatcaagtcctctgggtgccagcattgtgagccaatccctagtaatcggtttgtaaataccacgtaggttcagtgttctgtgtctcagttgtgactttggctccagttacttgctgagcattttttccccaagaggtaatgctaaaaataagtactaaattattttaaatgcttttgctggctttgactagttatgacccatgtgctaaagtttctgtcttccattttacaacataatataagttcaaaggcattgactagagaggcagcattttattcaatcttaagaagataaaatattttgttctccatacatccagagtttcttacaaatgaataccttctagaaataagaaataagaaatttgagagtgttgtggcatgcacttttgtcccacttgaatattttcttctaaaattctgcacagaggtcgcatgaactgaaattgaggaagagcacagtatgagtctacaaagcctccgagaagatccacttatgtttcagtgtggctgcaggaacataaaggaagcatttttcccatagcacttcttatatacctctttctcccctctgattcccacctttttctcccccaggattatggaatgtgggagcgtggagataagactaatcagggcatcccggaattgaatgcaagctccgtaggaatggccaaggtgacagttgtcctgtttgttcttccttctgcatgtttttactgctttgatttggttcccttcatcaggagtttgtatttaatctgattagcatatttgtcaaaagtcagcatcaaggatgtgaaattcaagtggcacagttaccccagccacctgaaattctaggtaaagaaggtaggtttccaatgctgaaatctgcccatggcagaaagtaagagtgctccgtcctggttagctgctgccatcacccatgggtctaagctcttgctgttgtttaagaagctgcacgtgtgatgtccagtcttcttttctgggtcacagagaggactggagaatatcaccactttgtaggttggactcacaagttcaaaagtctacaaggtcagtcaaataacagtacgaagtgaaactagccagacagcaaggtgggggtcaggggaggaattggggacactgggaaactttccctgaaggtactctgattcaaactcatttaaaatactcttcaagccaaacaaaacacacctatggggcagattcgatctgtgggtcaccagtttgcttctcttgccatagacatatggtgtgcctccttccctccctcctccagaatgtaatgtattttttggacagagtagagcctccagggctataatttttaaagcaacaaaaaatatgctctattgaagtaaacagacagaaagtgtacttattactaaaagaattaactttctgaagtgccagatgtttgaagttaactgttaaaacatgtgagagaaaagacgaccatgaatttagtgcacacacacccacacacacacacacaacgttatgaacttgttaattcatttttaggtagaacactaacttcacttgggaaaatgtttttctgttttctctttcttgtttccataatgagcagcaatgtacaggagagctctgatccactgaaaataagaatagggtcgggcacagtggttcacgcctgtgatcccagcactttgggaggccgagatgggaggatcacctgagcccgggagttcaagaccagccctggcaaaatggcgagaccctgtctctacaaaaaaaaagaaaagaaaagaataaaaaagactagaacatgactacaggagtctagctggatttttaaaatgtgtttcattacctttgggaaaacatgtatactagattgcttaatgaaaaaggaacaccagatattggagtgtatgtttattagaaagaaaaagtaactcatacctgtgtttgtaggcagctcttgaggcaattgatgaactggacctttttggagcccatggaggacgcaagtcagtgattcatgttctgccagatgaggtcgagcactgccaggtaatagcctcttgcatttcagagagcagggaaggagagtcctggcatggaaggcctgggatccagtgcagattccccaccttgctggcttggtgatactttgcttctttgagcttcagttttctcacccataaaatgggcatcctggaccctctggcctcacaagctagttgtaagaatcagtcaacttagtctgtctaagcactttgtaagccagaaaagtataagacaccatgatgctgtatagatggaatcagcaatccaagcagccttgttttgcaagaggcaaagtctgttttatgtcttttgagcacatagatggttttctttcaggtttagttcacagtgcccccaaattgaatgatgagcaagcactagttcacttgggggtgaggggttggggatgggtgaaataggtagtggagaagaaatgagatgggaaagatgggaaattagtacaacctctgtgaaatacaggtcagagaaaggagtgatctaatacagattggaggattctattgagcagagtgcacgtcatcaattgctaggccctcagcaaactcttatttagcgagggcccgctgtgtgccaagtacgttgctggggctaaagaaggtcagatacataaagacttgtgaatggagagctttggtagaagtttgtgtttccaggcagagaaaccctagggaagagtgagttacagaacagggccctgggctcagttggctatagaaaataaagctttattctgaagctgaagggttccacccatcttgaccctatcttccagctcactcaatttttcccctttaggtagtcccggtatttcttggggtatagtctattttttttttttttttttaagaggaggtcttactctatcgcctaggctggagtgcagtggtgcaatcatagctccctgtaacctcaaactactgggctcaagcagtcctcccgcctcagcttcccaagtagctaggactacaggcacgtgtcacccacacccagctaatttttttttaatttttttgtaaagtcagggtctcactctgttgcccaggctgttctccaattcctggcctcaagtgatcttcccacctcagcctcccaaagctctggggttgcaggcatgagccactgtgcctggacgtggtgtgcatcttaatagatgtgtaatccagtggaaatgcgtgagctttgcagccagctgggcctgagttagaatcctagttctgtcacttactagctgctcgaagtctcagggtcctcaggtgtgaattggacatggtaccctaagtccttcttcatatgaaagattcaatgagcttatgtttgcaggggtctagccccatgtctgtacgtgttagatctcagtgttaattccttcctttcccaaacttttcctgataatttcaactcctttacaagtttccagcgcctaatccagccacttatttataattgaggccatattatagtgcctctaagtaaccctagaaagattctaggactaaactaattctgtggtttaccattttgtctgagtgttcatgagatcttctggatttgactcctcctttaagtggtttctggatcacccagtccaactggtcacattccacagaagccagacatttctccaagctggccccatgtatgtgttcttttctggtctctgtcttcatagccaagacagcttagcctactgacacaggtggccctatagttcctcccctacatgtcctaaaggtctggcaaagtcaatagggcatggaaggaagggagacaagcagttcttagcgtgggcttcagacagtaccatgctctccccaagccctgacttctcgcctgaggaataggaatcattggctggatatacagtgttggccagcaggggccatgttggtaggacaaagctctactcaaaattggcaaccgtattcgaatgttcccttggggccgagctcatggtccctagatactgcgcctattagcgcatctccaggttaaaccacctctttgtttttcattcagtctattctgttctccatgctgccaagagcgtcgacatctaaagaaattgatgctggacttctttccattatttccttcccggcctttgcagtggaagatgtaaaccttgtaaatgtgaccaaaaatgaaattatttctaagctccaggtaagcattagtcatgctggtgcccttctgtcctgtgtgatgtgcatggagcagctcacccatgcctcagttccccatgaggttaattgcttgatttatctaagcagatgcatacagcgttcaaagctgagtctacaggcaagaaaacaaagtctccgagtgatttagtggcttggttctctccttgagaagcagaactggcactcaggcaggcacctttgaaccccagtttgtaccagtaccatacttctaaggcagagctacttaaccctttagaggtcacagacagtgtatagagtcactgccagaaaaaaaaatgcatatgtcccaatatcctcaaactttacacacaatttcaatggacttgccaatcccaaagttaccttcaggttaaaataatccctgttttgaggtgaaatgcagtaaccgtgatacactaaactgagaatattaaatactccagccagttgaaactatcggtaaaattatcaaagaatgtaagtttccctaagctgaaatctgcagattgattgtcctacttaggttccatgaaaaatgcttttgtcccttggagtccctatgtctccaatcatattcccaaaagaaagcagctgtctcagtcagggttcagtgggaaaaagggaacccctttaggtagttgaagtaggaagggaatgaatacagagaatgaagtgtttacaagaagagcgggttctaggctcagcctcctgggatgactcccaggacagtgcggtgctggtcgctagggctagggacgtggttgcctccatgaccctcgcgagagccacatctgctgtagcagcctccacatacttacggaactggagaatggacacccaaagctgtgatctatggattaagggcgtcagattaagagagtgctgcccctgccctcctttcgtagcatccaggaagctggggcagaaccctggagcctgcagcccaaaaccagcagcgacagtcctaagcacaggaagctgccccctccctttctgctaatctttgtggaggtgcatctgaccttagagcctcctctgcagccaaagcctaacttccaggagcctggggaatgtccttgcagctttccaatcttgcaagtaggagcaaaccaatccaagtatctgccttggtggcttttctaaatagtgagggtccttttaggtctctgtgtaatacagtaaatcagaatgaaggcatggtcgttcactgaactcttggtaataactcttgcagccctgatactctgatggaatgttttggcgttcccttccaagtaccgatcaaacctgaattgattttgcttattacttaaatatattaataactatactgacagcaaagaacacttggtataaaattcattactaaaagattcatgggaaagagggtgcagggctgacttgaattaaaaaggcaaaaaaatttctctgagctcatcgaatgtactttctcttattaggggcgttatggatgctgtcgcttccttcgagatggttataaaactccaagagaggttgtatttaaatattgtttcttatctttcctcaactgtttcatctctaagttgccaatgtgttgttctccctctgctgattataattttatgttggaatattggaaagggaagtattaattttggagtcagcaagcctggagccaggcaatagcatagtatctttagtagggacggtgagctggtcatttaaaaccagcttggccaggcgcggtggctcacgcctgtaatcccagcactttgggaggccaaggtgggcggatcacgaggtcaggagatcgagaccatcccggctaacacagtgaaaccccatctctactaaaaatacaaaaaattagccgggtgtggtggcgggcacctgtagtcccagctactcagaaggctgaggcaggagaaaggcgtgaacccgggaggcggagcttgcactgagccgaaatcgcgccactgcactccagcctgggtgacagaatgagactccgtctcaaaaacaaaaacaaaaacaaaaaaccaacttgtaggccaggtgcagtggcctgtaatcccaacacttggggaggctgaggagggaggattgcttgagcccaggagttcgagaccagtctgggcaacatagtgagaccttgtctctacaaaaaaaataaaataaaattagtgaggcaggtgtgatggcatgtacctgtggtcctagcaactcaggaggctgaggtggtaggatcacttgagcccaggaggtcaaggctgcaatgagcagagatcacaccattgtactacagcctgggtgacagagtgagaccctgtctcaaaaaaataaaaatttctttaaaattttaaaaataaataaaaccagcttgtagacaaggagaactggttctgtggctcacacatttttcttaaagaccgactgtggcctcctcctcgggtttctttgccacactgactaatataatgatataaatcagatcctctgccaaacttggtggtagacatattgctatttctttgttagagttataggaagctttagtataataaactaccaaggagtcttgtgtatgtttctgacttactttctgaaatattaccatggcaaactgccaaaaacagcatctcattatagtaaaatcctactcatgccaacttcaaagctgtaaaaatcagtcaagcatgggaaaccccatgaggcacaatggtattatgtatgtattctgacatcaccttttaaaagtttgacttatttgattctaggaccctaatcgactgcattatgaccctgctgaactcaagctcttcgaaaacattgaatgtgagtggcctgtgttttggacatattttataatagatggagtcttcagtggtgatgctgttcaggtgagaaaatgctgggtgttacgttgataattattttcattccactggtatactgattattattagaacatagggttatgcaagaatttaggtcactgtttcggttatctgttcccacttagcaaactttcccaaaactgagtgaattaaagcaacacctattttatttatttgctcatgattctgcaatttgggcagagcccagcagggacaggttgtctctgctttacctgctgtcagctgggatggttccatggaagtggagaatctatttccaagatggcctcactcacatggccaattgatgctggctagcagctgatgctgggaactcagctgtgctattggtgggggccttggttctcctccacatggctagcttgggcttctcacaatattgtagtctctgggccattaattttacatgttggttgttttcccctcagaacacaaaagcagaagctgccaagcttccataagtgttaggcccggaactgacaaaatgtcactttcatcacattctgttggctaaaggaccatcccatattcaagcgggaggggactagacaagggcatgagtactaggaggcgtggttcactggggtctagcaagaacattccatcacagacaggttttgttgttgctgttgttctttccagatcagccagtggtttgctgtctttagccctagtttggggtgctcttggataacatcttacttcatgtaacagcctcctcactcgaatctcagcctccggcctggttccctgctgtttccattcttctcacccatgccagagtgatcttattaaaaggcaaattaggttatgctactgccttgcttgaaagcttgcttgaaaaccacttcatgcgttttgtggggttccatatgatctgatccctgctttcacccctgtagcctcatttcttagtgcttctttcttgagttctgtgatccaagcacaatgaaatcctttcagtcctttaaacaggccatgtgccctcctctcttctcaaaggccgaggacattcttttcttccccaattgcccctcccccttcccttggttcaatgtaagtgtgtcttctttcagaaagctttctctgaccctaaaagctggggcaggtgctcctacgacccacaactataacagcatgggtcacactatgttgtatctcccccttacctgtcaaaggacgctggtagaggccatctctctccagttcacgggtatagtccctgtgcctagtgcatagtatgtgctcagtaaacatttactgatgcaactctcatttgttcatgacctatctctttagcttctacttggtaccatgctctgtgctgagccctgagcatactttgttgaacagaaccgacctgtctttgtgcaggttacatgaatgactgacatcgcagatgctttgccattttttcaactggttctgatcacatgtttggtgggggtggggatgagcaatcagagattcactttagctcttgacagctctcctgctcaggaatgctggggggcttcagaaccagcagtcagctggaaatgttaatatttccccactgttgatgctttctcttaggcttcagtgattatcttaggttttctgtcattttatcccagaattgaaagatctcaaaagaattgacttagaatttcagttgtgaataggcttaacaatgatggggggaagaaaactcaggagaggaaaatgactgtgtttagcgtcttgttgattaagcttcatggaatctactacccttctacacctttgctgtcgctcacacttgttgcccaatgacatttttaatatggggtcaacttttttagcgcccacacatgagtgagaacatgtggcatctttctgtgcctggcttatttcacttaacacactgacctccaattccatccatgttactacaaatgacagaatgttattctttttttatggctgaatagtaatgaatgcctcttaagtggaaaacttaccaagaggtggaaatgggtacactgcttaagatatagcttcccccacaagaagtttataatccggttactgagacaaaatttaaatatatgaggggttaagaatgaaataattacatgacgagttaaagacagaacaggaaagacatctgatacacagtgtagatatgactactagaggaattttgaggaagaaacagctactgtatgatgggtgctctgtctctctttctggaagcaagacaggcagggctgagcttagatacactcctgagaggaatagccgatcgtgtttagctcctcctaacactgtaagtgtgcctcctgcactcctggagctgagggtatttgtgcatttctttgccctgtgtctgaactctaatctgttgccatgagagctttttttctatgttgcaccgctgttacagcaatcatgaccagacctccttcctgccatggatgatggggctgttttccaggtccaagaataccgagaggccctggagggaatactcatcagaggcaagaatgggatccgcctggtgcctgaactctacgctgtcccgcctaacaaggtaacccagtggcagagggccctttgcaccgcttatctagaaataagtgactcattgcttggcctgttggtattctttatcccctttttcgaactaatgaacactttttctccaaacatggtttcaaaagccttaggtaggctgggcgcggtggctcacgcctgtaatcccagcactttgggaggctgaggcgggtggattacttgtggtcaggagtttgagaccagcctggctgacatggcaaaaccccatctctactaaaaaaaaaaaaaaaaaatacaaaaattagccaggcatggtggcacatgcctgcagtcccagctacttgggaggctgaggcaggagaattgcttgaacctgggaggtggaggttgcaatgagccgagatcacaccactgcactttagcctgggctacagaacgagactccatctcaaaaaaaaaaaagccttaggtagtgttcctgtctatcccaaggaatcatgactttggaaaaatatgtggaacacgcttgaccatgggtatcctggggaggcagcagttgaagaccttcaaatgatacctgtccctccccgaaccctgacacaggctctctaaagagcgtaaacccattgtgcaccgtgttcttacacacttccacagacgaaggccaatgtacaggggtattgagaatctcttcctttgattcaagcagtttgcaagctagagtttgagtaatcacttagaagccattctacatcagggagagaaaaacagtccagttccaagaaaatgcccaaacatagttttattctatcaagtttcctaaattgggtcatgatggacctattatcttggcaggaagatttgtctgtcaatatctcatggttagaagaagaattcttggttcctggctgtcccttggatgcttttggtgcctcagggcttgattattgtgtttgtgggatgaaaaggccttcagaggaccgtgtcttccccaaaatcgccagggcctggaggaggttgtaagccagcagaggcctggcatatggcaacttgggtttaggtgttctgtggttcaatcaggcccacacacacatggccacaggactggcagggccttttaaagtgtctgcctcagctcagagaggctgtggaacctgtcagagctcacacagcactgggctccgccctggggccagaccccaggttcagggccttgctgccaccccacactgcctcctaatgggtggtacatttctgtgtgatggaagtatctacacagtggatgctctcactaggcttctgaaagcaatagtatagtggacttctttacttttccatagaatataaattttaaagcaatctgatacttgatccttatggcaaaaaaggtaccaccgtgtatcactttgagccttattttcatctaaaaggaactattacgtgttagatcactgaaccagttaaaccaagtagaaaatcaaaggaaggagtttccgtgagaagtagaatgtgccattgccggaagcattcagttttttgcatttatatcagcccatcttgttcactgggccccttgaggtggctgcttgctccaggtgggctcaccaagccccaccagcctggacccttagccctgagctccggaatgttgatggcccctcatcccaacatgaaccgacagcccacatcatccaagctctctcaggactgattttgttccagggttaagggccagactttggagaggaactagtcttccctcactctgcagatcagtctacggagcctgctagggctgtgttccttctaagtgtcctcagcctagatcccctgcaaataaatgtattccttttagtacgcgtgctgcggtatgtgggttggggcagggctggcagtgggggctgggttaccttccagcagctacatgttcatatcccgcttcaggtcgctcctttcccagtactgaggcattcgggaaaaccgaattggtaatgagaggtaatttggaacctggaagcagagcaagggaaaataagtgccttcaggggtattttacttattctatggtagagaagagccgtccagttctactagagggcacgttttactgactatagtaaatgccaggtgttaagagctacgcttttctttctttctgatgaacagtgctgactacacattgtaaaaaattactctgtgactttctgtcttctaaactccacactgacctttgggtttctgcttgtcattacaatgtcctcagcatgtttacactggtgtgctaggcactgattttgcacactctttgacactgattgcattttgtgttggctccttccagatgacagctgggaaggtttatcagtcacatcaataacatgtagagaccaccaggaaggatttctgcacacagggccaccacaggcccatgtggcacctgtgtgcaaattagataaaaggcctcatcagggtagccgcagccctgggccagggtggcatgcagcttggatgtgagccccactcatttcctcagccagatgtgcttgtgcagggcaccataaggccctctgtggacagctggagaccaatgaaagtgtccccgcaaacatggattgagcagccactccgtgccaggcaccaggctagctactggggcacaagggtggctacagcgccagctctgtccctgtgagcttgcaggttagcaggggccagacgagctggtccatgagatggagggcagtggcagcagcaaaagcatagcacctttgaggacctgtgggcagttcagaaggaccggtgtgcagagaggcagagggggatgcctccatgcggggcaggaggtggctcatgggtgggaggagtgcaaagccaggctgtcttgtaaactggacaccttgtctgctctctattgaatatttctcattctacatctctgcagtcttttttttttttttgagacagagtctcactctgtcacccaggctggagtgcattggcacaatcttgtctcactgcaacctctgcctctcaggttcacgtgattctcctgcctcagcctcctgagtagctgggattacaggcatttgccaccatgcctgactaatttttgtatttttagtagagacagggtttcgctgtgttggccagactggtctcgaactcctggcctcaggtgatctgcccacctcagcctcccaaagtgctgggattacaggtgtgagccaccatgcctgacctttcagtctttcttaacacgacttacatttcaaatagttttaacatactacctgattatcatacaagtaattctgtgcacgacaaaacatctaggattctgtagaaagaagaaaacgttatctctaattctaccacccaaagattatgacattttggagaatctccttccacactattgtcctattggattatttgattactaatgacatttaattctgttcagttcatgcactaaagtttttcttattgaaaaaattttaaattttactaaatatgttaataacatcattgattaatctgcaagcagaagatgagtctcctcatggtgtgatgttccccttgggagaaggatgtttcctatttcctttggttgacttacgttttctggaagacaaaagcggtcactgacattacccccaaccaatgatgtgatgactgaaatgtcaaagtccagcatggagtttaaaagagagaaagttgcagactagcttacaatgcgcagccagccctgtcctccagaaagaacaccaaagtttattttgctgagacagaagccccccagtgggttcagctttttgaggccctgaaggaggggttacaggctagtagtccaagtgtttttcctcggtaaatagtgccaccttctggcaattctcttgcattaggcgcacagtttataaacccctagggatggctccagcgatgcaccgccacagctggaggctgatgttttccatcatttcacccatcatgcagccaattgtaagcatgagccatgagagttctcatggccagagctgtgcgcaaagcaggcaggccaggcatccggtgctcgtggccttgcgtgtgcctgtaggaagagtgcttgtccagaaccaggccgcgatttgacttccacctccgctgctttgtagccttgcagccccgaggaaggggcttgctccccagcctcctggcacctgcacagaattggcctggaggatgagtaccatttcataaatcctcagtgcattccccatggtcaggtatcatggccattttatcctctgactttctgactttggatttgtctctctttccaggtagatgaagagtacaagaatcctcacacagtagaccgagttcctatggggaaggtgcctcatctgtggggccaatccttgtacatcctcagctcgctgttggcagaggtaggggcttagtggcctcacagactggaaaccatgtgattggaggttcagggaaccccagaagggcatagggactctctgccaggcgtgcgtgtggatgtcttttgcatcttcattcgtttaaggtcaactggaccgtgttggctccggggcttgactctcagccttgtgtgtccatatttccattaaaccagctcaggtccatgagggcccagcactccccatcaccccctgccagcattcttcctctgtggctagaatctgttccagttgatggtcagaggagctggaagtttctgggccaggattgttagcacatctgatcctagaagatacaagatttgggaaatgactagattggcccctaggtgcccctgccccagtcttaggagcaggaagcacaagggccacagatctctacagaaagaggtggcgggccggattttctctggtgaattttgtgtcaggtgttgccccggacaacctgcagcacccttccttctgcagacaactgcctcttgacacctttctttttgttcaccattgacttgtccccaggcttttgttttaatatgcaaatactttggagccgcctcaaatgaatcccccactcctcagtatgagtgaccttatcagatgggctgtcgttcctgagagggtcctgcccagctgagtgcttcggctggaccccggggaggcagggaggggaaggagcccagggaagggctgaggggctgccaggctctagaaaaggcagaaggggtggtgggtcagcatgccaccgggttcctagagtgttgaagcccaggatgaaagataccaccgtggaagcagccctcaggaacactacctgccgagctgaaacagttgttttacaggtacctcaagactccccagtgtcatggtcatgtccttggagtaggggctgtgtcttccactcctgtctttattagtagggaaaacgcatatatctcctttgaaagccagccctgtctctcactagttctctgatcccgggcaggtctctaatctctgggcttcggtttcctcatctgtaaaatgaaaaggatggacttgatcatctctgaccttccagctctgatttctgtatcagtgagatgggaaacgagtaactcccctcccctgctttctcctctctgatgtaaaggctttctctgggcccagcgctaggtccagttgctcctcagaactcccagaacaccttgatcctctctctcggggttcgtgtcatttgtagaaagtgcaaggaggtgcatattcaaagagaatactttgcaagggagtggggttgtgggggccaagtccccactcagccacttcccttgggtcattatcttggtttccccacctgtacagtggtgatggtggtagcgtgggggccaaggtgttctcctaaaggtctgatgaaaaatcactgacatgaggcagattgattaataagaaaaaagggcatgcagatatacttaacatgtatacaggggagccttcagaatgaataccccaagatctaggggaaattttctgtttttatgcatagtttcaacaaaatatggacagctgtgtagaaatgtgattagacaaaaggggcctgatgaatgctaatggaccaagtggggaaacccagcgaggcctttctgtgcagcgctctttccttctgagtgtggggcaggtccctccctagagtggggcccttatgacctacagccaaacaaggtaggtgagggaattttttatggccagtttttacagagaatatttgtaggttttgtggctggctttggggaaaagggattctggtttctatgcccaccttggggaagaagaattctagtttctgtggcgcctccagaagaatggactgagagagagaggcaggagaaggtcagaggaaaacttatgcttctgaggctgctgctgaggtctttgttttgggggtgttgttttctgagccccaaaagtagtgcctacctgtcaggaggcataaatatgacagtgcgcatacagtggctcaacacaatgcctggcatgttactgtgagctcagaaagtattggttatcattctttttgctcatacaagatggtggcatattcgacgagccctagagagctaggtgcaaaaatgtaatacgtttatcagtggcagtttgaatgatgttactctgtttcacagaaaataagcaattgactcgaaaaatataaagaaaaaagtcttgaatatgttgagccccaaaatatttcattttcacacttcagtttaagatgaaattttagttaatcaatatttcatagtgttaatgctcctcttttcatagggattccttgccgctggtgaaatcgatcccttaaatagaagattttccacttcagtcaaacctgatgttgtagtacaaggtttgtgagcgtgtttactgttcatatttaactttgtaaaaccaatgttattttaattcaaattgttgcctagtttcttatttaatttttttaaagtgtgtatgtgcctatgctttagcatgtagcagttgtgtgagatgccttatataactcagtggcttccaaaggcaacagaattcttcccaaccacaaaatgactttctacaaagcaattgttgtcttgaatataaaccttgattgcaactggggcacaagtgattcgttgcgcgtcatttatcatcattgttattctttgaaaaatagagcctaagcctggtgaaaactcagaacccaactgagggtcattcattcctcccttggagtcctgacatctttccgcctttcacctgtgtccacctttcctctccctcctctccagccagcccttcttctggagaggggcgagaccagcccaggctgctgctgccctccgcctagccaagtgatttcacccttctgtgcctcagggtcatcaggacttgagctccctgactggggcttcctaagatgtactgaggctgcagtgggaaagcgcttggtgtagtgcctggcctgtggtgtgcacccgggtggagcagttctcttcctaccttccttcttagggaggacctcctggcagtccagtaacattctctgtgccccatagagcacaccagctagtgtcatagcatgttgtgtgtacaccatattgcccctgagactgtacacttcttaatgacaaggcctatatcattcttgcagtttctatgttgattggcacatacgcacccatacgttgaaaacagtgattgaacaaatgacaagcatttctctgtagccactggctcattttgcttcgggggctcatgctgtggtgagatgagctgatatcacccagtcaatagagccatgagatacacctgtcacagcattctgattaggtaaagtttgagatgatgatcatcatctccaccttacacacgaggcttagaagttaacccactccctcaaggacccacagctggcagctgtaggtgtgaatccattcctgacttccaggtggactgatccagctggactcattgtgcctgcgctaagccagagcatgtcctgctaattagtcccttgaatctattaagaccgtttttccacctgcaggctgggacactttgatgggtgttgaccagcatttgtttaatagaacagtgtagaaattcccagaaggtcaggcacagagtaggggaagtgcagtttcagaaacttagccacatccagctgcacagatcatgaggctcccaggtctcccccaaaaccactgcactaaaggagttactcctacagagagtggctgctggggttttgataaatgtggagtcatgcctgtcattggaagctttagaagagacaggtgttaaggaaagccacctagccagccctgcatggctgatgttcccatttgctgagggcctgggagattaggtttcagtccacgtgcagctgtaactggccagttgagcatgcaaggcttccctgggggcttgttgtgaaggtcagatgagataatggatattaaaatacttgaaaaggcatcaagtgctgtgtaaatataaagaggtgacactcaactctcaactgcatgtatatgtattgtacattccggccccactagcctgtgagtacaatgattgtacttaacagtagccaatcctgcgctgccctgagcctctgcagcttccagggggctcggccgcagctggacatggcaccaacctctctccctgtggccgtgctccccttttccagtcccatccctgtactccttccctttgccaaagcactgtcccttctcagaaaggccagcggtactagtacagcaggtgcagcctagccgatcccgggttgtccccggtgatggcctccctcctccatgggcccccaggtcccaggcacaatcagctccccgcctgctggagagccaggtgcccagcctctcccaccagagatggggcccaggccagccctggggtgctttttccccaccggtggggccctgtgcgggggttctgaatgggccaggctgctccactaccgccagcatccccactcacagacctactttgctttctctagagggaaggatgtcccctcagaacatcccctgccagcaggcgcccccatcttactcttctttcccccgtcctttgggagcaggggcacaggcttctggcatcccccaagtggagctgtttccactcctgaccctgcataaaaagggacaccaggcaggtttagaatagatgcagacccagagggaggcaagacattacttgagacggggcagtttggcttgggacttattgaggacaatttctagaagtctcctatcagactatcttgcacaatgaaggcacttgataaataggcgttgaggttgttgaggggtggcaaggacagaatggggaggagcagcaggacgaacactgtcatttccaaagccagtcattgcatggaagagcatgctgatgtgtatgtcaccaggcagaagagggcagtaaggaacacgtgtccatgtgaagagacaagagtcatgagctaacgctcattctgtgttcttgttcacagttactgttttggcagaaaacaatcacattaaggacttattgaggaaacacggggtgaacgtccagagtatcgcggacattcatccaattcaagtccagccgggccggattcttagtcacatatatgccaagcttggtaggtttggggaaattacctgggcctttttggcatgggggcatctcggttctagatttggggtctgagggagactgtgatatacgtaagttctaaagacttggacaaaaactaaagcaggcggttccaccgcttcgatgtgaagaggaacgggcaaaccagcacgttctcacacccgttcagtgggcaccgtcacaggtggccaagcattcgccggatctgttgtaaaataaggagccaccttgaaaaatttacaattggaaaagtcatttgtgtcttgataatgcttctcatgtttacctttagtatcagaaaatgctcatttacacattaaaatgggaggaggttctctatgctttttctacaatctgactttgtttactattatggttcaatactaagtaaatcgaaagtaaatgttctatagtccttttagtagttttattccatgcagttccaactgggtactgttcatatacattcatgaaaagaagggggcgggatttgttttaatattcagcttcgtgccattttaaaggatgatggcagtagaagaaccaagccccaaaatgggttgtctaatctagaaataagctcagtcttagcctgagttgcctggattacttgttaaccgtatttcctctaactccaatttatcttttacttctcaaacaggacggaataagaatatgaatttgagtgggcgaccgtatcgacatattggtgtccttggaacctctaaactatatgtgattaggaaccaaatctttacttttacaccccaggtgaggagagcaggccaacgagcatcttttttttaagttctctttgctgtctggtaagcttttctcctgtgaatatgacagaattctgcatgcataggttcaaatagagacatatgaaatgataccaagagcctagtacaagtctgcccgtagtaggtgctcggtaaatgctttttgagacaggcgtgccatcacttccagtcatgaatattagtgaaattcagactgctttagaagtttgctgttgacatgtcacttgactcacagcccttgtgcccctaatcacaatcatctctgacccttgtgcaagctgtcatcagaccctctgtgtaacacacagccaggctgattttctggccacaccctcgcttactgggatactgaatgtactcatggaacttactggagagctttggtttccaaagaaaactagtcctgtggaagtacatagaaaatatttttcacccatttgggcagctagaaagaccaacagtgggatcgctttggcagtgcagggcacaatccctgcttacctgggcacagggttggtcatggggtcttgggtcaagctgctgtttcatcctagcccctgctgctcacagaaagcttgtgagctatttcccttagtagcaaatttcagtccagagctgagcatgcactagtccagaggccaagagaacagtttgatttgttctcaacatcaggcagcagtgtctttagttgacattaaccaaagccatcaatcaggtaaacagagtgtccacctcccacctgctcacagtgcccccacttggaaagcatcttcgaacccatagccctggaaggatcaggaattaaggagttattgatttgctttcagagacagcagtgttgggcaagatgcttaaatccccatctgaggagctggaaataaatctagcagtgcacctttcccttccaccctacagcgacagctcccgggcaggcagcagactgatttgtctgatcttgagcagggcagccccatgactgggtggattgaaacgagtactgagcctcttgcctggcaataaaaccccaggattagtgctgacctgagttgtcagctggtgtttccaggtaaagaaagggtggccgtttacccagcctcctctgactttcagttcaccgaccagcatcacttctacctggccctcgacaatgagatgatcgtggagatgctaaggatcgagctggcctacctgtgcacctgctggaggatgacgggcagacccacactcaccttccccatcagtcgcaccatgctcagtaactccagggatttcagcaggctccctcctgccccaggggtggtttgggctcttacaaatgtttaaaatggctcccatggccagaactaagcactgaaggggcttcttagcagtttggtttcttatctcgggaatcttctatgccagaaatattttaattagatggtgttgatgaaaatgtttcagtgcataacggaaaaaaagtctgcccagactaaactaattcatcactttttttccttagcaaatgatggctcagacattcattctgctgtgctctccacaattagaaaactagaggatggatattttggaggagccaggtaatttgtgatttttttaaaaaatataagagtagcactgacctttcttaaagtcctttgctgcccttgtcccatttttcatattaattgttgaacctaaaagcatgcagttttagagtaagcaggaaggtaacacttctctaatccagtcgcccgtgtgaaacttggctcatctctgaaacagcactcggctgatatcttttaagctttacaggcaccaggaggcctcggacatagggaggtgaaccatcaagtccctctgaaacatctgttcttcttggaacgcatgtatggaattctgtgtatatttctgttaaaaggtgtggaagaaaatactctgcctgggatcctgcaggtgcccaataaatgctccttgcaccaacttgaatatgctatcaccttaagattcatttgcaggacttggcaaattccttagagccctcacagcagagcacctgaatgagtctgtgtaggtcactggcccctcaccttctgtggaatgagcccccttctggtttacaggccccaagtagggaagacgtacccaggtattatgcttaagcaccttgagtgatagagggcttgccctccaggaataccccttccatttttgtgccctctactgtcacaaggcagaggtcttctctgtagtgtctattctctcatcttcttccatcccctaggatataccagaagggccccaagagaatgctgtggaccaggcacggtggctcacactataatcccagcactttgggaggctgaggcaggcagatcacctgaggtcagaagtttgagaccagcctggcaaaaccctgtctctattgaaaatacaaaaattagccaggcatggtggtgcacgcctgtagtcccagccatttgggaggctgaggcaggagaatcgcttgaacttaggaggtagaggctgcagtgagccaagatcataccactgcactccagcctgggtaacagaatgagactccgtctcaaaaaaaaaaaaaaaaaaaaggagaatctcactgtgtagctcagccctggtgtagcctttccagggctcagggaggcttctgtttggtccctgatggaattccagttgctaaaacttttggagttgaagcccaccctttcttctcacatcctctcaccccagggacactcctaccacagcaaagtcactgtcgtttttttaaaattatggtaatttacctataacattaccttaaccatttgtaagtgtatagttcagtagtgttaagtacattcacattgttgtgcaaccaatctccagaactcttttcattttgcaacaagtaaaactgtacacccattaatagcaactctacttccccctcctcccgcccctagcaaccaccagcctttctgcctccatgagtttgactgctccagatagctcatataagtggcatcatacaacatttatcattttgtgactggctcatttcacatgatgtccccaaagttaagtccctgttatttctaaccctggccttgagcgatttgaagagcccgctgaggttggtccctctgcccacagagcttcttgcaggttttgctgtagacttgaagtggcccttgatccaagcttctcctggcctttctcgcgagactgtccccagtgttttgctgtatacactttcaggactagtgccataccagcaatctgcatccacttttgcacattttacctccaatttgcttcagttaccacctggtgcatggcatcataactgagagagaataccaaaggcctataattaaccattttgcaaaataattttttttttttttgaaacggagtttcactcttgttgcccaggctggagtgcagtggcacaatctcggctcactgcaacctccaccccccaggttcaagcaattctcctgcctcggcctcccaggtagctgggatcacaggcatgtgccaccacacctggctaattttgtatttttagtagagacggggtttcaccatgttggccaggctggtctcaaactcctgacctcaggtgatccacctgcctcagcctcccaaagtgctgggattacaggtgtgagctactgtgcccagccgcaaaataaatccttttattgagatctaatcattgtaaaaaggaaattgtctgcagttcactgagcactggccgtgtattcaatgtgttgtctcattgaggcttcactttctgacttggggtgaattcccatttcatagacaaggagctgtagactcagagagccattggcagaagaggaataggtgcagcagctctgtgtgaacccagaacccggcctctaagccctggtgctgagctggatgagggcttattggtgtcaggagggccccttggttatagaccatggcagatgattcagagagccttagaagagactggaatgcctaggctacttctgctcagttcatgatcattaagagctttataaataaaattaatatagttataatttagtatatgatttatagattacatataggagttataactatgtaacacagtgttataaaaattatattgcaaagataattaagttcttgataagttgagtcacagttttggcttttcctctatttctgagggttgttgttgtttttcttttgagacggagtctctgtcgcccaggctggagtacagtggcgcgatctcggctcactgcaacctccacctcccaggttcaagcagttctgtctcagcctctcaagtacctgggattacagatgcctgccaccacaccctgctaatttttgtatttttagtagagaggggtttcaccatgttggccagggtggtctcaaactcctgagctcaggtgatccacctgccttggcctcccaaagtgctgggattgcaagcataaaccatggtgcccagcctatttctgagggttttttaaaagctgaactcaccctacatacccactggatccacttggggggggtgctcaattaaagaaaggcttttctttccctcgggctgtcattctggttatagcccttttgaggctgaagctctggcacctctgatactattgcattacatatgcctcaattgactctttaaacgtttctcagccttttcaactaaatcccaatctggtgctgataactctgagggagggatccattgctttctgctcccccggtgtaaccttttaagaatgttttcttctgtatgtgcaaatcgctcccagcgtgtggggttggacctgcagaacctcaggccccaggctgccaaacccagcgtccaggtttcagtggaactgtgcccagcctaaggtgatagggccactcagggcttctgctccagtctggggatggcttccccattgaattccttctagagggaacctgacctcttccatcatagcacccctgtccctgtgtgacagtgtttcgtggtagggactcataaataatggaacgagtgtgcccagagaatcactgcttctgggccagtcgttttgggggaaaaaacaaaacaaaaacatgggttggttctgtttaaaagtagtttgcgcaatatattttgtcaaactgttggttggttcagtaaaatagagtcgtatttgtgttgggttgggagtaagaagtcagtgtgattcatttggcttttaatatgctgtgcgcgttcacttcatacttgctattgaatttttgtttgaatgtcttggctgaccgcttatatggggcaatctgcagagtgatatatgtattgattctggcagaagcaccacatggttgtgcaaaagtctctcagtgattcatagtggaaggttatccacacactacctgtgtccctaacacggtgtcttcttggcagagtaaaattagggaacctttcggaatttctcaccacatcgttctacacatatctgacttttctggatccagactgtgatgagaagttgtttgacaatgccagcgaagggactttcagtcctgatagtgattcagatttggtaggatatctggaagacacctgtaatcaaggtacagcttggaatgcttttgtgggtagttcgctgaatttatttaaactttagcattgtgataaaattgccctaagactcaaatatagacaatgattgataattaaaaacaaggaaaaacaaaaaagaggcttctgaaacttgcatatattaaaatgaataaaatgcccgtttaaaaaccgaaactgcaaatgatgtccttgaaagtggggcatttttaaacctagaaggacaaagagtttcaggaatggggactttttttcttttttttcttctctctctctctttttttttttttttttttgttgttgtttgtttttgagacagggtcttgctctgttgcccaggctggagtgcagtggcatgatcatggctcactgcagcctcgacctcctgggctcaagcaatcctcccacctcagcctcccaagtggctaagactataggcctacagggaagcaccaccatacccagctaattcttttatattttatagagatggggtctccttatgttgccctggctggtcttaaactcctgggctcaactgatcagcctgcctcgtcctcccaaagtgctgggattacaggcatgagccaccgtggctggccaggaatggggactttgcacagaatacatacattctgaagacagaaacatactgcttgaattttcaaaggagtggtagaatgatctaggtttggttggatatgagtgatgaaaccctacgtatataacatttgtcagtctgaataaggttttgaggtgatctgtttttcacttttagatagtagttggaattagggctgggagttccataaggcttagctcactcatgacaaattaaaacaaaaagcccagacttcggctgctatccttcaggctgtcttacatattattcagttcatcttgggaggacgagatgtaaacactatcttgactggtagtttttttttcctgggataaagtttttccaaacagcaaatttctacacacatacattatctctgtaaatctcttcttactcttcaggggtgagtgggagtgcaaatatcgatatctcagtgttgtcatctgctaagcctactcagtgctgcttgctacccatggtcactattgtgtagtcatatttctacagcttggtttcattggctctttttcttgcttgtccaattacagaaagccaagacgaacttgaccattatatcaaccaccttctgcaaagcacatcgttgaggtcctatctgcctcctctttgtaagaacacagaagaccgccatgtcttcagtgctatccactccacgcgggacatactttctgtgatggcaaaagcaaagggtttggaagttccatgtatgttattaactcttttctgcctgttaaaataccttcttttatcaaagtaatgcagggacataatttaaaagccaaagaatcctagaagacaacaaaatgccccccacgtgcttctacttagaggtaaccactttcaactcttttagctctttcttctggtatgtacatatctccatatttctcaaataatgtgtacatactgctgtcttcacatgcattgacttgattcggtacttgttgactttcgattaagtgggtaaggatctggctgtcttaaatcaccactcctctgcttcactccccctaacccaccaaggggttaaagtttagttaaatcagtattcactctttatatcattgtatgtacacaaatatttccaactgagcattatagtatactctgtttatattcccatttttactctgttttttcgaaaggtaaagttaccctggcttttcatttgctttgctttctttctacatcttccagtggcctcgcaatacaaatttccacaagctcagtcgtatcggtgaatctctcaattccactgcctttcttagagtccacgagtctccttctatctgtgctgactgcgctctaggcctgttgcatatgtgtcatcctgggagtttccctggcttgtctccttagttggattccgtggttcctgaatctgctgtgttcccctttctcaatgtattcttctgttttggtggagcacattctagaatagtttcagtaggtttcaaaaaaaaaaaagtgaagtggaagagggcatggtggtgacagctctcgacttacttgtttttgaactgcactgccctctgcccccttctggcttggttgccctcagtgtctgaggtgctttttaccctgggatcttccccggaggcttccttgacttgtctcctgggatggctctcctgtgttctgtatcccaactcttctttcttggttcactcttattttaatagaggacatgcagtagtttcctgagaaacagcgcacggtgggtaaaattgttgaaaccttgccattttaaaaatgtctacaaatgttccagacccatttgagagtttggctgggtatagaattctagattaaaaatacatttttttggctgggcgtggtggctcatacctgtaatcccagcacttttggaagctgaggcaggcggatcacttgaggccaggactttgagactagcctggccaacatggtgaaacgctgtctgtactaaaaatacagaaatgagccaggtttggtggcctgcacctgtaatcccagctactcaggaggctgaggcagaagaagcacttgaacccgggaagcagaggttgcagtgagctgagatcgtgccactacactccagcctgggtgacagagcaagaccctgtctcaaaaaaaaaaaaaaaagacatttttttgcagatttttgaaagtatgacttattgtcttcttgctatcagtgtgttggtgttgctgttgagaaatctaaacctgggcaggcacagtggctcatgcctataatctgagcaatctgggaaactgaggcaggaagatcgcttgagtccaggaatttgagaccagcctgggcaagatagtgaggccctgtctctacaaaaaatagaaaaaatagccaggcatggtggcacatgcctgtagtcccagctacttgggagtctgaggcaggaggatcacttgagctcagggaggttgaggttgcagtgagctgtgatcacaccactgcactccagcctgagtaacagaacgagaacctgtctcaaaaaaaaaaaaaaatgtattagcccattcttgcattgccataaagaaatacctgagactgggtaatttataaagaaaagaggtctaattggctcagggttctgccggctgtacaggaagcatgatgctggcatctacttggcttctagggaggcctcaggaagcttccagtcatgacggaagacaaaaggggagcagacacttcacatggcgacagtaggaacaagagagagtggtcacacacttttgaacaaccagatctcatatcccttgtgaactcagagtgagagctcacttatcaccaaggggatggcccaagccattcatgagggacccacccccatgatccaaacacctcccaccaggccccacctccaacactggggattacatttcaacatgagatttgagtgagacattcaaaccatatcagaaattaaacccattctgattgtttgagacaagagtatcactctgtcgcccaggccagagtgcagtggctcgatctcagctcactgcaacctccgcctcctgggttcaagcgagcctcctgggttcaagcgattctcctgcctcagcctcccaagtagcggggattacaggcacccaccatcacatccggctaatttttgtatttttagtagagacagggtttcaccgtgttggccaggctggtcttgaacttctgacctcaggcaatctgccctcttgggcctcccaaagtgctgggattacaggcgtgagccaccgtgcccggctcattctgatttttgatacttcaaatatgagctgtttttctctttgaaagtgtttaggatcttctctgctcccggcttctgacatctcagtgctgcaccttaatctctatctgggtgtgttttcatccattgtgttggatacacactgggcctttccaatctggaaatttgtttttcagtcctgtaaagttttcctaaaaagtttcttgactcatttcctgcccaacattttctctgttctttctttctggtgttcctatgattccaaagttgacttcctagagaagactttatcatttttttccctctgttttccatttttctgtcttgtcctgaaagccattgtctcaactttttgttccatcccctcaatttagccacttttgctatcatgttttaaatctttgttccccaaattgtgtctgtttttgtttcacgtttacaatataatttcttggccagacgcagtggctgatgcctataatcccagcacattgggaggccaagacaggcggattccttgaacccaagaattctggaccagcctgggcaacgtagcaagacactgtctgtacaaaaaaaaaaaaaaaaaagattagccaggcgtggtggtgcatgtctgtgatcccaggtacttgggaggctgaggtgggaggatcgcatgagtccgggaggttgaggctgcagtgagccatgatcatgccactgcactccagcctgggtgacagagcgagaccctgtctcaaaaaaatagtaaaaatacagtataatttctttttctgaaagagagaaagaaaaggtcctgctctgtcacccaggctgaagtgcagtggcatgatcatggctcactgcagccttcacctcccaggcccaagcgatccccctacctcaacctcccaagtagctgggaccacaggtgcatgccaccacacccagctaatttttatttttatttctgtggagacagggtttcaccatgttgcccaggctggtctcaaactcctgacctcaaacgatctgcctgccgtggcttcccaaagtgctgggattacaggcatgagccaccatacctggcaatttgttattattctaagaatattaatggcagggctttttgttttggtttgtatataccctttttactctttgaatggtttccattcccccaagtcaccttttccggtttgcttaggtttctgtcttccacatgagcgtcctccttcaaatgccctgctcctcctcgcttacctggtcatgcatgagaatctccaagcccatgggtggggcttgttgactcggagttatttgatttcccagagatactctacaatctcctagtggatttcctatttcaaggattagggcctggttgcctggagctatatagttacttataattcccttaaggaatgtatctacgccttcagatgtgctaatcagcagcccctctctcttcgagccccttcctcctttaccctcttctgagagaccctccagtcttctgtcagagtgagtgaggtggtcatcaagctgggtgtagttgaagcggatgtccagggagctcactgcttctcagatagcttctccccagccttccttgttttggacaccccttctaggccccagttccagaagcacatagtgcagcaggccccagggacttctgatgagccttgggtgtaactgaccagctctcggatttctccactgcagacttgggaattggttgccttgtgtcagctaaatcacttatctttcatctgtcagctttcccgcttctgaaattctgttcctgtcgtcttctttcttgtttttcttcattctcaaggatttgtcttttaaaaaaaaatatatacagttatgcaccacataactttttggtcaatggcagaccgcatatatggcggtggtcccctaagattataatggagctgaaacctttctgtcacctagtgacatcgtagctgtagtgactttgtagcaccatgcactgctcacatgtttgtggcgatgccagtatcagtaaacctcctgcgctgccagtcgtgtacaggtctagcacatacaattatgtatagtacataatacttgataatacataagtatgttgctggtttgcgtatttagagtgtactccttttacttattaaaaaacgttaactgtgaaacagccgcagaccagttcttcaagagggattacaggagaaagcattgttatcttaggagatgacagctccatgtacattactgcccctgaagaccttccagtgggacaagctgtggaggtggaagcagtgatggatgatcctggccctgcataggcctaatgtgtgtgtttgtgttttcattttttaaaaaaagtttaaaaagtaaaataaataaaactaaaaaatagatcaaagcttatagaataaggacgtaaagaaaatatttttgtgggccggctgtggtggctcatgcctgtaatcccagcactttaggaggcccaggtgggtgggtcaggagttcaagaccagcctggctaacatggtgaaaccctgtctctactaaaaatacaaaaattagctgggcgtggaggcacacacctgtaatcccagctactcgggaggctgaggtgggagagtcgcttgaaccagggaggtggaggttgcagtgagccgagatcgcaccactgcagtccagcctgggcaacaaggcgagactccatctcaaaaaaaaaaaagaaagaaaatatttttgtacagctgtacgatctgtgttttaagctgttattacaaaagtcagatttttaaaaatttaagtttataaagttacagtaagctaaggtcatttaatattaaagaacactgtgtgatgaattcagtgcagtgtgaatgtagagtatttatgaagtctacagcagtgtacagtcatgtcctaggccttcacattcactcaccactcacccagtcacccagagcaacttccagtcctgcaagctccattcatggcaagggccctatagaggtgaaccatttttcatcttatataccatatttctctttttttttttttttttgacagggtcttgctctgtcacccaggctgaagtgcagtgccacgatcagggcttactgcagcctcagtctcctgagctcaagcgatccttctgcctcagccctccagtagctgggactacaggcatgcaccatcacacccggctcattgtttttgttttgttttttgagacagtttcattcttgttgccgaggctggagtgcaatggcatgatctcagctcaccataatcttcgcctcccaggttcaagcgattctcccgcctcagcctccggagtagctgggattacaggcatgtgccaccacacctggctaattttgtatttttagtagagatggggtttcgccatgttgtcaggctgatcttgaactcccgacctcaggtgatccttccgcctcagcctgccaaagtgctgggattacaggtgtgagccaccacgcctggcctaccatttttttttttttttaattttagtagggatgaggtctcactatgttgcccaggccagtcttgaactcctgagctcaagaaatcctctcacctcagcctcccaaagtgctgggattacaggcatgagccaccatgcctggcctataccatctttctaccataccttttctatgtttagacacacaaatactattgtgttacagttacctacagtattcagtacaggaacatggatacaggtttgtagcctaggagcaatagcctctatcatccaacctaggtgtgtagtaggctgtaccatctaggtttgtgtaagtacactctatgctgttcatgcagtgaggaatttgcctaatgacacatttctcagaatgtatccctgtcattaaacaatgcatgactgtatatattttctgtaatgttagtggagggttggaaggaattaaaattacagtgtgtattcaattcacaaatataacctggaggtctataaatgccttttaaatatgcatcatctttaccttgaaaacttcttgttctcctgagatgacatgatatagcctggaagacagggatggcttaatgaataaatatcaataatgataatatccagaggtggttgaaaaacaagccctactgcccagcagtggcagagtgaagtgcatactggaccggaagccaagacaccttggttatgggaagtgaccttggacaaatggtctgccctctctgggtctctcagtttcctcatccgaaagaaaaagaggtcaggcgaaatcacttctgagcttctttccagtcctgggatgttgtatcatttttcctgaattccaggagggaaaagcgaaatccagttctcaaagcaagatctatgcctgctcacttcttattcccagatttagcacatgaggtggctacatgataaattcttgttgaagctaaactaaataagtgatctttccttctgttggtttgtgttagataaggagcagccgccatacttctcaaaagaagtattggccgggaacggtggctcaagcctataatcccagcactttgggaggctgagacggctgtatcacctgaggtcaggagttcaagaccagcctgaccaacatggcaaaaccctgtctctactaaaaatataaaaattaggctgggcctagtggctcatgcctgtattcccagcactttgggaggctgaggtgggcagatcacctgaggtcgggagttcgagatcagcctgaccaacatggcgaaattccgtccctactaaagatacaaaattagccaggcgtggtggcacatgcctataatcccagctatttgggaggccgaggcaggagaatcacttgaacctgggaggtggaggttgcggtgagccaagatctcgccatcgcactccaacctgagcaacaagagggaaactctgtctcaaaaaaaaaaaaaaaaaattagctgggcgtggtggcacgtgcctgttatcccagctactcgggaggctgaggcaggagaatcgcttgaacccgggaggcaaaggttgcagtgaggcgagatcacaccagtgcactccagcctgggtgacagagtgagattctgtctcaaaaaaaaaaaaagtgttgttcttcctcctcagaataactctctttattcttttgttttccagttgttcccatgactttgccgactaaagttctaagtgcccaccgtaaatcactgaatcttgttgattctcctcagccactcctagaaaaggtaaagtatatggaacagctttttttaaaagtatggtgttctacaatgcaggatgagtccccaaactcttccaaatggctaaactcaaaagaaacagcatatttctcgatatcagggacctttcagtttagaagctctgggcttgggtgtgaacccaatcacttcgttgtctggaatctgacttgcatcaatatgtacattgaatttgatgcaaacctttacattttgcctgtagaaaaagctactaccttgctgcctactcatcagagtctatgtagccactagaggaaaaagctcactacctaaccccgcctaactgtttagccagccaaggtgggactacttggggaacagagtacaggactctttgttcctaatggcctttttaaatttttcttagagtctcgctctgtcacccaggctggagtgcagtggtgtgatcacagctcactgcagcctcaacctccaggctcaggcaatcctcccacctcagcttcccaaatagttgggactaccagcgtgcgccaccatgcccagctaatttttgtattttttgtagagacagggttttaccatgttgcccagactggtctggaattcctgggctcaagcgatcctctcaccttagcctcccaaagtgctgggattacaggcgcaagccactgcacctggctcctaatgctcttaatgtaagaaaaaacagtaaaagattccttaggatactgcaggaaaaagatgggcataaaaaaattttaaaaataagattgctcaggagaataaaatctcagcctgttccattaattcccacaatttgttattttatccaggactcttccctgattctaccccacacgaacagactcagtggcacactcagtgcctgttggagaagattttaccctgatttcaattttaggttgtttacatcctttttgcgtttgttttgcttccaaataactataccatatatgcagcatggtgcagaaagcaggaatagagaagcgagaggtcacctccaacccctccttagctcttgtgagggcttttcggctccgtctagaagccgcttgacaccaggcatctgcaagaaaaagcatacaaaggtgattagctgtctgggtacatggggatcttcacaagagagtgaagtctgaagaagtggtcaaagcaagatgctttcctactttttaaacaaagagtgataaatttgagaagctaggacaggacaaggaaaatctggctagaggcagttactaggagatatatacacagggtgtgtaaaactagtggaagataaggtttccttgggtaagtgtatttatacaggtccattgccgcccccagttcctgggctctggtgatatgggctattttcacgccctaggagtgtacccctcccagaggcatccttatggcttgctgcctgcagaaagagacaggtcagctacccctttctgaaactacaatttttccaatgttttcaactcaaaattgtcaatataccaatctggcatatttggggatagcacatccttcacaccttcagctcaatgaatgatcaccaagccagtatacctggatcaatgaccaccttctgtgcccccctcccatctctttctccttttctggtccagagataactgctgtcatgattcctaacaccagaggttagttctactggtctgtgaaccttccataaataaaactcacatatattttaacctattcagtccagtctcttgcaaatgttgaccagcacagtgattcactgatcaaaaatagtaaaagcctataaataaagaggtacaaaaagtcattgaaaactggagcacagcacagcaatagagttccaagaccagattggtgtttcacttcttgatcttccgaaagttccatgcctagcccatctccctgctttctggctcttgtatgaacaggttcctgaaagtgactttcagtggcccagagatgaccatggtgacgtggactgtgagaagctggttgagcagctaaaagattgttcgaacctacaggaccaagcagacattctgtacattctttatgtcataaagtaagtgtctgagtccattcgggcagttataacaaaataccatgaacagattggcttaggaacaacagaaatgaatttctcacagttccggaggctgggaagttgaaactcaaggccgatttgatgtctgggaaggcctgttttctcatagatggcatcttctcattgcatcctgacatggtggaaggggcgagtgagctctctggcattgtttttataagggcactcatttccttcaggagggctctgccctctgacctgatgacctcccaaagtccccacctcctaatgtcatcattgtgggggttaagatttcaacataggaattgggggaaaacagacattcaagccgtagcagtaagtttatggtctttactaggctaagctttctcagttctccttaattttttccgtagtattcttggccttctagccagcccaggtcatgattatattcaccccagttacccaggatcaccaggaatgagacttccatccccttctctgcctactgatgctggtcccccagcatgagaaggctatgtgaggccaggaggccaccacgtcctgatgttaggcttctgtttcaaaggacatagggaagctttggtcgggcgtaaccctctcagtgagactcaggggcactgggagagcccaagtgctgtgcaaaatgcacagtgatccattcctctcccagtctaaactttctggaccatatttctgggtttttctacctcttggcaggggtcccagctgggacacaaatctctctggacagcacggggtcaccgttcaaaaccttcttggtgagctctatgggaaagccggcttgaaccaggagtggggtctgattcgctacatctcaggccttctcaggaagaaagtggaggtcctggctgaggtcagtgcgactgtgcaggctgcccatgtgtgctcactagctcgtgcccccttcctcttccacttccaatctcccagttatacctcttacttgtgaaggagccccattctttaacccacaggtggagcgggcccttctctcctgcctgcctgctgctccaggaaggcgagcagagggaaggaaatgcaagtggattggttttgttctttcttggctacggaaaaagtctcgccaggaaatcaaatgaaagtgctctgtggcctggcagcctcttagagctctctttttttcacacatccacagtacagtgatcattaatatttataaccccaaggccaggcaaaatccagagctgctttctaagacactcgagttcagtgtcatgatggtaagatgatggcatttattagatgtgaataatggggaaacgggtaacttaggaattgaatatggttattaactcttaccatcggtatcttcggactcatccctgtctcactcaatagcagggagtccaatgtgtttgctagtggatgggcattaaacgcccactgacgggcccttcggagccaggcttggggccacacattggagacagagaccacagacacccatccctgtctgggttgcttagtctggggtctaggtatgaatttttcagatcaagggcaacatgggtcactaagtttgtaaaggtaaatgtacgatctgattggcagtgtctcctccccactgcctgtctgtcgtctttgccagtatctctctcgcgctctgcctctcacccttccccttaactgcgcaggcctgcacagacctgctttcgcaccagaagcagctcaccgtgggcctgccgcccgagccccgggagaagatcatctctgcgtaagtcctcagccttggggacctcaggtttgcgggggagccatggggaaaacagcgcttcccagtgttcggaggaggggctttttaaagacactctgtcacatggatgcgtctagcacagaaaataagggtgttccatggagggcgaggaggcactgtctcaagacacctcatcacattcgtgacacaatgctcctttctaggccccttcccccagaggagctcacaaaactcatctacgaggccagtgggcaggacatcagcattgccgtcctcacgcaggtctggggctggtgtgggaggggtcgggccacagccttcctcagagtggaggggacccttcagccactcaccctgtctctgaaaccctatctccgtgtgtgtctgcctcaggagattgtggtttacctggccatgtatgtcagggcgcagcccagcctctttgtggagatgctgagactccggattggactgatcattcaggtgatggccacggagctggcacggagcctgaactgctcaggtgagatgcccgcagctcctgcagctcccgccgcaccccaccccaaccacccggccacggcctccactctcaggggaagaactgcttaggttatctcgaacccagcatccaagcctgtggcaagctcaggccttaccagcttctctcatttagatggaactcccatccatgcggcatagagctgaagttcataagtcagggagaatggggctctggtgatgtttaccattatagcctcaaaggcgatgtggaatcttccgccctgtacccgacatctaagctccttcctggatgcccttgctatgagatgtcacccccattttataacaccttcactgggagaaaccctaccaatttgaatataaaaatccatcatgagacatccaacgttggggatcatacattgtgaaacatcatgtgtctaagaattaagcagatacatgatttaaacggcagcatttagaatccccacggaacagtgcatttcagccccaaagcaatagtgaggttctcctgaacagggggacctgccatggcatctgctatcacctccctccccacccacgtccacctgaccctacctttacccgccaccagccctgtgtttgggacacttacaagatatttgtttttaggagaagaggcttctgaaagtttgatgaacctcagccctttcgatatgaaaaatctcctgcaccatattctaagtgggaaagagtttggcgttgaaagaagtggtaagttccatgctcctgttaacgtcttcagggagctgcctcctttacatgcagcagacattagaaccagcactgtggggcatagcgaatgtgggaagagaaggctcctacctgaaggagatggacagagtcctaggctcaagcttcctgctttgggggctttgagacttgctcgcagtgtgctgggcgagcttttcttgcccaggttggcacagcatgtgggtgtggtataccgcctcctgtagtcgtaagcacctggcaccatcacttacgcaaaagtgttggctgggctcggtggctaacgcctgtaatcccagcactttgggaggctgaggtgggcggatgacgaggtcaggagtttgagaccagcctgaccaacgtggtgaaaccccgtcactactaaaaatacaaaaaaaattagtcaggcgtggtggcgcgcgcctgtaatcccaggtactcaggaggctgaggcaggagaattgcttcaacccgggaggtggaggttacagtgagctgagatcgcgccactgcgctccagcctgggcgacagagcaaaactctgttctcaaaaaaaagtgttagaagtgtgggggaccccgaatgccagggtgaaagggctgtcctttcacaccacctgagcatcctgccctttggtttgggtaaaaacattctcaacccggcctcacatcaccctccacagggcagggaggagacccctctgtgacctcagcatgctcgagctaacttattttgctttgtcctgcctcgctcactctgtttttatctgaaccggaaccctgcttgcagtgctgggaaacataatcacccaagtcctggcgtgattcttgttctcaaatgttccctaattataattgaagcaattatcatttctcctcctcataaaaaagctaaatgatttgcaggcacgttggtgaatttatttcatcaagccaaagaaatgcactgtgggctatcattcctttattatttaataagaaggacattgggtactttgtatgtttcctgagcatgtgctggctgcaaacaaagacagcatcgtgcagtcagatgtgttttggtggtttttctcctttcccgaaggaggggtgctcagaatgcttttgcaaaagtaatttccagttctttccaaggcagagtccttgaaatggtaatgtacgagataaatatttaatgtgttctgctcatcattatagtattcatggcttgacacagataattactaaaaatttgtcattagatgtacagctatagatgctatgaaactaggaactgagtaatgtcatttgaaagtcataaatatgtgcgattgcaagcaagagcagaagacatgctgtctttttaacatataacatcatttgttagctgtcctttgtaattgctcaatttttgtaaattaggaagcccaaataggcttagaattttgattaaatcctgagatgtctgagataaatgtttccagcgaacacccaccccagacagcccctcttgtagcttccagacccttctccttctgttttccactttcctgggtctgtcctccctccccagctcatcactgagtctcccttatgggctcctgcctctctgctgtcctttaaatgttcttgtccccaagttccttatttgtcactactcctcctgcacagtgccctccactcccatggctccattggggtcaggtgggatggtgaggcttgcaggggatgctgcccgaggaggtgacctttgagctgggcctggccttccagcacaggcagatgcccagtgcggtgcaggtggccgggagttgaggggaggtagggctcgagttggtagagtttcaggtgatgctgggaggactgtttggcctttgtcctgaagacagctagacctgggaggctttggagtgggcagtgatacgatcacacttgccttttagaatgattgctgttaccacagcacagaggccaggcttgtgggtggtggggctagggaccggtttgagccccgaggctggtgcgataggttgggagtgagaggtggtggcctggtgcagtgcatcagtggcctctggttgcctccacctccagcccctggcagcctggctttcctagcacttccccctccagcccgaggcccttctccagctgccaccttcatttcatttggcaccttgccctcaggcctgggcatgggctctcctccagaccccgctgtggcactgaattctcctgcattcacacctgcatctgctgcccagacagggcctggcaccaggaggccctctggatcatccagcccacggccacagctgcccggggtgccagcccctcgggcccacagcagttttgtcattttccaggggcattccgagagtcacacgggactggggacagagcccagcaaggtccatgtgggtcctacacattagtcatgacgaaccctttagaaaaatattaatacaaataggattgggtatattgttgaccagtcaacactcaccagatcaaactccatgcggtcatgaaacatgatgtgatagaatatttaatgccagggagagacattcacgatacaagtacaaaaaggcaggtcacagaaccataccacagaatgtatgtatccatctcatgtttctgtatctatacgtatgtatgtgatggtactgttttgttagttaaaaacatacacagtcatagggaaaaaaactggaagaatcatgactaaaatatcaagagatgttagttctagcttctgtagttcagtggtctcagttttctacaaggaaggtgtgctttgggttttttttaaatttttgtttatttatttatttctaattaaatatagatacgaggtctcaccatgctgcccaggctggtcttgaactcctgggctcaagcagtcttcccacctcggcctcccaaagtgctgggattacaggtgtgagccaccgtgcctggcctcgggtatgttttttgtttgtttgtgtattttttgagacggagtttggctcttgttgcccaggctggggtgcaatggcacgatctcagctcatcgcaacctccatctcccaggttcaagcaattctcctgcctcagcctcccgagtagctgggattacaggcatgtgccaccacgcccagctaattttgtttttttagtagagacagggtttttccatgttggtcaggctggtctcgaaatcccggcctcaggtgatctgcccgcctcggcctcccaaagtgctggaattacaggtgtgagccaccgcgcctggccgggtatgttttattagaataattttttacttatccaaaagcaagggtgggcacggtggttcatgcctgtaatcccagcactttgggaggctgaggcgggcagatcgcttgagcccaggagctcaagaccagcctgggcaacatggcaaaaccctgtcttcacaaaacatacaaaaaattagccaggtatggtggcgcacacctgtggtcctagctacttgggaggctgaagcggaaggatcgcctgagcccaggaggcagaggttgcagtgagccaagatcgcacactccagcctcgggaacagagcaagactctgtctcaaaaaaaataaaaaaacatggctggttgcagtggctcacgcctgtaatcccagcactttgggaggtcaaggtgggcggatcacaaggtcaggagtttgagaccagcctggccaatatggtgaaaccctgcctctactaaaaatacaaaaattagccgggcgtgatggcgggcgcatgtaatcccagttactcgggaggctgaggcaggagaatgtcttgaacccaggaagtggaggttgcagtgagccgagatcatgccactgcagtccagcctgggcgacagagtgagactccgtctcggaaaaaaaaaaaacatatctcactgtgtcggggcttcctggccactgtgttataatggtgcttaagtactctgcacacttccgtttactcctttaagagctgagtgctgcacctgtgctgctctcggtgctggagacacagcgctggccaggcagagaaggccctcattgtcaagtgggggagacaggggcagatcctgcctcgggttggatgctgtagagttcctgagaaccacgtgtgtgtgtttcccacccagtgcgccctatccactcctccacatccagccctaccatctccatccacgaggtgggccataccggagtcaccaaaactgagaggagtggcattaacagactgaggagtgaaatgaaacaggtaagaacacctcagtggcagcgagggatgagtggtggtctccctacctgggcttaccccagaaagcgacagaaacctagggcatgaggctgcagcccactgtctgtagagtgggaggtcccttctgtctgggatctgaacacacccctgtccccagatagatattccagagccggtcatgcgcacccttacccactcatccttaaccttaacgtgatgttctcatgaacgttccagaaaatacccttgtccatgtttgcctctgttcccgagaaccactcttaggagtgggccacagccattgaaaaagtagagtcatgcaaaaagtcaccgaatcatctgtgtccttcaaacgaaatagcaagagggctctggaaatagaccagaatgcccatgatacttggattctccaccagccacaggggtctcttttcttagttcacctttaattcctggtaaaaaaaaaaaaaaaaaaaatccttttgaactgaccgcacagggccacagctcaacatcggagtcttaacgtgctgggtgctgtgctaggccttgcccaggatccatgctgggaaagagtttccctctgaccatgagaaatgcactcgaattttctgctccattttaaatgctgttcatgacccactaaatggagtccatgatgcactcatgggtcaccccctgcggtttgaccaacacggccctggattaagagagagggcaatagaagaagcacgcgttcttggctcaaagctggttttgatttcctgatgtatttttgctttcagatgactaggcggtttagtgctgatgaacaggtgacacccctttgccttgttcgtcctttacttcctgttctttctggcttgaatgtggaaagtgaggctgtgactccgcagcgtgtgaatgtgtagagggcggctctatccagcaaacgggctggggcacaggcagagagcaggactcgagggcaggagagacgaccttgccccatgcctttaaaaataatctgtttctcaaactcttgggctttgtagggtactttgtgaaagagatcatccaggctctgcctcagtgggagtttctattcaaaaagagggaactaaatagaaaactaaatgggggggaaatgcggtcattggttatatcagtagaaagaatgctgctattcctgtcctcagatcgcctggggggacttaaccctggaaggaaaaacatgtaagggtgctcttcttttatatcaccctggtgacatatgttctccacccccctctgggacactggagtcgcatttctaatattttgatgtgtattaccacaagagcctagagacatcttaatgacatgtaaaggccgattccacatgttgcccagaggtaaaacatgctttatctctcctagtttatgctgtttccaagtagggaactgccttttcaaacatcttcccttgccagccactcggtggcaccgtccctctgtccccgcatcccgatggcctgaccgtgggtgaatctgagtggttccttccgcctctatttcatgctgttcttgcgtgttacggggatgaagtgatcacctctgttctttgctgggcttagagtcacctagctagtacaaactttgaccacttacgtcaaggaacatattatttgttccaaaaatgtaataggtgttatggtattttcaatctctagtctcttttgtaagaataccttgtagatagcacactgtacccttgcaaattaagggtacattctagattttagacgaggaaatacttatgtggccaaaggtatcagcccgatcatcatattcattcatttaatgaatatctactgaatgttaggtgcagcatgttagtgtcagctgtaggtatttggttcatctgtagattttcacaattcttaccataaaatgtgagcatttcatggctgtgagtttggaaaataaatagtgtcctaacttgatgatgcaccctccacatatgacaggaacatttaatgtttacattcaatggtaacagttcatgtttttaaaaagagcagttagtaagtttcacgtggagtcgaagcccagagcggtgcttgcaggtgcccctgcacctgagcttgcctatgtgcgttgctgtggcaccttctctgcgcccgcattctctgctgctgctttctgtgggtgtttcggatgctgctccatgaccctcctctctgctgtgtctcttggtgtcattgctgtcaactgagtggattctttttgttttgtagttcttttctgtgggccaggccgcgtccagcagtgcgcattcctccaagtctgcggtaacagtgcctcgggattattgtgtccgtccccgctcctcctcgcgtccttcctcatgctcccacctcatgcccaacttctgaggattcgagcagggctgaagtgttttcagcgggatgctcacaggctcctccaactggaattctgaggagggtagaaagaaggccccaaagtgcttgccctgagctttgttctccgtcttaagctctcagttctctgcctgtgctccttggcacagtgtgggtgaggagtttccttctcaccaattcccagagcttctggaaacttcggggcattagttccatgcctctttatggagccaggatggtgagcccttgcccacatgtgccaactagcactctgcacctgccatgccccagatctcgtgcagggctcggattgagctcaccgcagagcagaggctgaatcttcctcctgaaactggagggcccggatcagctgagtcattgaggagtgcagctgtaattacttttatttgtgtctaattgttgccttaagtggcagtaatgagcccaatggaataacccagccgaactgccttttcaaaataagatctgttgaaatccaactgctgcagaaaggagagctccacctcctgccctgctagcacacttcaggatttcactttaaccctttacatttgactgtgcacatttgatgtgtggcactatcgagaaacaaaagtgccagatagtcccaggcaaagagatgtgtgagagtgaaggttatcccttctcgacctggaggtctcgaagctagaagccccgcagggcaagacagaaggctgggagctttgccgcagggaggggatgcgcccccactcacagaggcccgccccgccagcggtggggagcctctcagacagtgtccccctctggagcctgaatcagtccagccaatgttgaggtgggaaggagatggcgccctcttccctcacttcagcaaagtcagccccagttcagaggcagccattgccccaaattaagataaagcccagtgccaagaatagggaaagccggaaatgggattgcaaagggtgggtggatggaccctgatctgcgaggtcctcgccactaaacgcgggcttcactgtttgtcttcccccgtgtcatgtattgccttctctgtggttcctgtcctgtggaaacgtgtctgtcacttctctgtggcactgcagcaatgaagtgggcactatggagtttgtctccctgagccatggatgcctgctccgagggcccgttgtcaccctcaaagctctcccactgcagtggcacaggcgccacgtgcgggtgacagctgcccctcatgggcacttagcgcacactaggtatgcctcaggggcttctgtgtctccacgtggtgaaggcttccgggcagctctttataggatgcctgactgtgtccccactgtgcagatgagactgaggcccagaatcagtgttcatggcagggccagacggcctcgggtgtgtccttggcaccgctggcattgagtggggattagcactccggcagtctgacccccaagcccgtgctcgccctgttcggcctcctccttatgggttctagctttgggggtgggactgcctctcggggggcagggcagagtgcaacatggaatgaagtgatcaacccaaagtatgcgagtcatctcacatgaggaaacagacaaggtggactggaggaaccgtgttcctctctggcgagtggtgttctggcatttgtgcctaggtcgcagggccgcccttcgagatggcgcactttccctggggcacctgctgcgtggcttctgaggccccaagctgtctgtcttgcagaggtccagcaccccatcctcgcccactggcacgtcatcctcagactcgggaggacatcacatcggctggggtgagcggcagggccagtggctgcgcaggagaaggctggatggggccatcaacagggtccccgtgggattctaccagagggtgtggaagatcctccagaaggtaagccgagacgcgagctcctggggaagtgaaccgtccccttactgtcctggcaaggcatggtggcacctccaggcgagcaaacacacagccctgaggatggcttctctgcctcagcgctgttggcacctggggccgaggcattctctgctagggggcctgtgcgtggtaggatgtctacagcatccctggcctctacccgccagatgccagcagccatctcttctccccaccccacccccgtgtgacaactaaaagtgtctccaggcattatcaaacatcccgtgggaggcagatcaacccagttgagaaccacagcaagtaagacaaggtggcagtctaggttgtggttgtgtgggaccaacttggacgtattttaggaacatagaagaacagggaaaggctgggaggcttcagatgaaaaccctgtaaaaccacccagagcagcacctacaggcctggaacctggaatgacagttcaggaggggcctggagtaggccagccccccagcctcccgcacatccaggcaggagtagtgtccctgctgttcagcgatgtgactgagccccaccctcccagggtacctgccgtgttcagtcccaaggtgtacagaggtggagagcttccagtttagccccaggtcctgtgtgccctgaaggcacaatctccctcacaccctggggccccactcccctcagccagccggctgttgcgcttcccatctgcctggggccgttcacgtctccccagctgttgtccctgggaactgtggtgcctgtacctgagcacaggagcacctccctgagcgcctgttgtcaaggaggggggcagcattctctgtacccccccagtgtctcccttctgcatcagcccgagagagtttatgcagctccctgggctgcaccaggccctccctgtcttttcccttgaatggaaggacagtgtgcctcgcttaaaagctgtgcaaaccaagacatttttttccccccagaactattttttagttcatttcacagtgggagagaagagaaaaaataatcccagtgacagcatacaacagcccccttcccaaagccatggcaccacttgctcaaggttctttctgtaacaggggcccctgtgcttcatgggccccaaggtattcctcacggccaccgcagagggatgtgaggaggtcggagcaggccctgcccgagcagctggactcctgggacccaggcaggatcctgcaggggctcatggtgcttgctccacttcccgcctctcttaagggggtgggagtgtccactgctgttctgccctcagcccactggggacgctccaggccggggtgctgggatttagaaggtggccagttagactagaacaagctgttcctagaaaatttccccactcttcctggggcatcacatgcttccgctcggactcactggcgcaataccaagatatttctattatgaaaaagcattttgtgttgagctggcactcgatatttatatacatgggtgtgcatgtgcatgtctgtgcatgtgctggaggcttttgtgattggtgcttattatagaaatctcaaaaatagatgcctgcaaaggcacagaagcatcccttccccagcaggagccatgaaaatccccctttattatggcaccaaaggggcctcgcagccgcccgggcccagttgccaagtacaatgcggagcctcccgggaggactcggcagccccctagggcattgttcgggggagatctgaaagatgcctgctgggttccctagaattgttccatcgaaaacacagcctgtgggcagtgagaacaagctctctaaaaataactctgacagtctggcgtgtcccagccctcatatgggtttccagggcagagggtgctgtgtgtgcatgcacgcctgtgtgtgcatgcatgtgcttatcccattctggaatctgactgaaatgcgctctattctgcctccagtgccacggtctctccatcgatggttatgtcctcccatcctcgacgacccgagaggtacgatgagaaaaacgcagaggcgggcccctctgtgggttcacaataagggcttcattgcatggactctgacctcttgtgctccttttgggctcattctaattgacaggccatttgtagctctgagctgtctagccccttcaccctcatatttggcaaaaatgtctttccagcatttattggcatcagcctttttcttcacctgagactcagcatttctgggctagcaagctctttgcatttgccagacaccccttagaaccctggtgaaagaaaggagccaatctccatgccaccctggcctgccccatgggcagccttctcggcccttttctccaactaaaaacagtaatcgtccctaggtgatttgtcattctttttaacatggatttttttttagttttaccccacccaaagcaccatgcttcatgctggaaggaataatgaagaggaaagagaaaccagaaatggtccctgctccctggaagctgtagtcgatggggggaagggtagataaatcaggcgaggacaggctggctcctggaggcatactccagcctcctgctctgagggccactgccagcaggatccagggagtggccagaaaaggggcagcagtggcgctgagccccgagcccaggcactgctacggtcacccttggttactcggtgattgattgatagggctgcatctgtcctctcactggtggttgcctgcctgtccctttggtagatgaccccgcatgagatcaagtttgctgtccatgtcgaatcggtgctgaaccgcgtgccgcagcccgagtaccggcagctgctggtggaagccatcatggtgctgacgctgctctcggacacggagatgaccagcatcgggggcatcatccacgtggaccagatcgtgcagatggccagtcagctgttcttgcaggaccaggtgggggtgccagggagctgggttggctggcatttatctctgttgaggctggagattctgtgtccaataggaaagaatatactcgaaccaagaaaatgtcatcacagatgatggggaaaaaatgtcaaccacttgcttagaaaatggtacagtggccacttgggaaatctcaagacctttggggatggataggcctgtctcaatgcaggttttcgtccaaacaccaccacttgcaacacatgtgaccatgggtgaaccccttaccctgtacacaaagtcaagttcaacagagtagtcctcattatagtcaggagctacaaactagggtgcgtgataacagagtgcagtgcccagagaggtagggcattccccctggcagcgctggcttcgtgccctcatgccctcagaattggagcctctcagaaggccaaggctctactagagcaaccctcacccctgcccatgttgacccgctgccaccaccacgcagaagcgtgacggggagtgggggctccgcttattgtcccctctgccctttcctactgcaggtgtcaattggtgccatggacaccctggagaaagaccaagccacaggaatctgccacttcttttatgacagcgctccgagtggggcttatgggacgatgacctacctaacaagagcagtggcttcttatttgcaggaattgttgcccaattcgggctgccagatgcaatagggtctcacctggaaacatgatcacactctcaatctgtcacgtgccccctagccttactgggaaccttctgtcccccaagatcccctgtgctatcaggaaagcatgtcccatcagaaacactctcggggggcaatggtagcactcaccctgaaactgatgtatgttaaagccacagagatagagctgaggagtcctgtgttcccccgcaaggagcaccccgggatcattttctaggttcatttctctggaacatttgctgtagcatctggtctcacggactctgaggaggaattggaaattggtctcttttgagtgcagagggaactgagacgccagcttaaattggctcttgcagagagttacagaaatagtttcgatgagctagtgacacatcctaaagatgcaaagatcctcctggcggcagtagccttgacaagggccacctcttcacaggatgcagtctgtctgtgcaccaaactcttcaccaaatagaacacttgtgtctctctgtggaatgggggttttcttgtgccttgcttgctttcatagccttccattttattggcatggctgccttgatgtaacataattctctgtccccaagatttagaaaattcctcttcgttcaccttggctcatggtcttccagggtttttatcctggctgtctatgaactagggttttctcctgccttaggaaaaatactgcatcttctggaatctagaaaaaaaaaaaaaaaaagacaaggctcctcttatagccaggcaagcagttgtttagggctagacctgttgtccccgctcgcgtggggtgaacgccccgcagtggatactgtcctcctgtgctctgggcgaggcgtcatagggtgagcacaagtcagcagtgccatggaagtgaacaggcatgtccccgcagaaacaatgcttccctctgaaaaatagagccaggctaggaacctgtaccctcttggtagaagcactttggtcttcactctcttgggtgggtgcagttggaggcaccgattggaggagagcaaggttgagtcaggtgtcagggtctggcaaatcttttgccaatgccctagcaatggagtttctctccgggcattgtcttaccttgggggaaggaaacaaaaccaatgggaaaacagtttctgtaaataataaaccttgaaagacaaatgctca

SEQ ID NO: 1231 - DNA, 10575 bp, Homo sapiens
gctcttatagcgtggggcgaagggccaccgaaactcgtgggggcgttggacgaagcgagtccaaagggacggcatctgccttcggtacctagcacccccagcatgccacgcggcgcctacagctcccaacatggagcgcggccgccacgcccgggactcaacctttgccagcgaactgcaagtcccatggtgcaccgctgccggaagtggcctgcgccgcgggcctacccggaacggcgcgtgggcccgggcagaagctgctggcggtaggctcgccttgactccttggtggttccctggccgcggcgaccggtggtcccacgtccagccgggctcagtgaggtgagccagccgcctcggacttagcgactgcggccctatctgggaggccgcccccgcactgcggtgtcagggcatcctgtcagaggacgagcgcgggccttggagggcaggacaatgacgtgaggcagcgtcgcccgctcacccctgcgaggagtgaggtctgagtggtcagcccctgcgctggccgctttggcccggaactgacctcggtgtccatgtggacatcagcacctcagggaccccgctacattctcgggtcctgggagggaacagggttggccctgcctcctaaggacttgagttcttgtgcgaggacgcaggaggtgaatagggaggcgatccgaaggacagggacagagggagacttggtcctctgggcagcctgagaaagcttgagctgagagatgagaaggagccatccctgccaatatcccgggcgagcaccaggaacagggtcagatgcaggtatctaccgtgttagcaggcagcgccagctcccgttgggctctaacagcagtgcaaaccctggggtgtgtatacgtcaagcactggaactcgacttcacagtcgccttctgtggcctcgttatcattacccccattttatagatgaggcagttgggtacagaaaggtttttttgctcagggtcacacatctggggtaaaggcgggaaaccatcttgggaacaatgggacttttcttattttgtaatttttgagactgggccccattctgtcgcccagcctggagtgcagtggctcgatcacagctcgctgcagcctcaacttcctgggctcaggtgatcctcccacctcagcctcctagcggagaccacaggcgtgtgccaccacacccggctaaaattttttggtagagacagcgttgtccaacatgggctcaagcgatcctcccacctgggcctcccaaagtgctgggattacaggcgtgagctaccgcgcccggccccaacttttttttttctttttttctgaggagtcccactgttccccaggttggagtgcactggtgagatcttggctcactgcaacctctgcctcctgggttcaagcgattctcctgcctcagtctcctgagtagctgggattacaggcacccactaccatgcccggctaatttttgtatttttagtacagacggggtttcaccatgttggccaggctggtctcaaactcctgacttcaagtgatcttcccacttccgcctcccaaagtgctgggattacaggcacgagccactgtgcccagccccatctcactttttttttattatcccaaacaaactctgtacctattaaagtccctattccctgctcccccacccttgataaacacattctactttctcttcctatgattttgacaactgtagcaccccgtaagactgaaataatacagtattttgccttttgtgtctggcttttttcattcagtgtattttcagatttcaagtacctacctaaaaggtagatgctaagacaaatttaatataaatacagagtagtttatgtgggccaggcttgaggattgcgtcctgggaacatagattcaagttgccctgaatttacactttgaggagcagcagttataagtggattctatttatttatttatttttgagactgagtcttgctctgccgcccaggctggagtgcagtcgcgtgatcttggctcactgcaacctctgcctcccaggttcatgccactctcctgcttcagcctcccaagtagctgggactacaggcgcctgctaccgcgcccggctaagtttttgtgtttttagtggagacggggtttcaccgtgttagccaagatggtctcgatctcctgacctcgtgatctaccctcctcggcctcccaaagtgctgggattagaggcgtgagccaccacgcccggcctatttttttatttttttgagacggagtattgctctgtagcccaggctggagtgcagtggcgcaatctcagctcactgcaagctccgcctcccgggttcacaccattctcctgcctcagcctcccgagtagctgggactacaggcgcccgccaccacgcccagctaattttttagtagagacagggtttcaccttgttagccaggatggtctcgatctcctgacctgatccacccgcctcggcctcccaaagtgctggaattacagatgcgagccacagcgcccagcctgtttttttttttttttttgagagggagtctcactctcacccaagctggagtgcagtgccgagatctcagctcaccgcaacctccgcctcccgcgttcaagccattctcgtgcctcagcctccccagtagctgggattacaggcgcctgccaccacacctgggtaatttttgtatttttaatagacacacggtttcaccatattggccagactgggcttgaactcctgacctcaagtgatgcgcccacctcagcctcacaaaatgttgggattactggcgtaagccacagcatcaggcctgtggttggtttttaaaaagatctcttggccgggtgcggtggctcaaacctgtaatcccagcactttgggaggccgaggcgggtggatcacgaggtcaggagttcgagaacatcctaggtaacacggtgaaaccccgtctctactaaaaatacaaaaaaattagccgggcgtggtggtgggcgcctgtagtcccagctactcaggaggctgaggcaggagaacggtgtgaaccctggaggtggagcttgcagtgagccgagatcacgccactgcactccagcctctgggacacagccagactccatctcaaagaaaaaaaaaaaaaagatccctccaggccctacatggaaggggctggggtgaatggaagcagggaggcctggaagagacctgcctgtcccagagggagggatggtggtagctgggaaatggaaggaagaaggagccgccgatatgacctcaggaaagaagcaggcatagctggtggtgtctgttccctccctaaacacctgctctcctgggcgaggaagctggtgaataaagcacaggcccgctcgggggtatcatgttggtggggaaggaggagccgctgatatgacctcaggaaagaagcaggcatagctggtggtgtctgttccctccctaagtacctgttctcctgggcgaggaagctggtgaataaagcacaggcccgctcgggggtatcatgttggtggggaaggcggacagggcagatttcaggttcttggctttgaccctcaccagctacagggcctcgggcaatatctgattttttttttttttttttttcagacggagtcttgctctgtctcccaggctggagtgcagtggcaccatctcggctcactacaacctccgcctcccgggttcacgccattcttctgcctcagcctcctgagtagctgggactacaggcgcgcatcaccacgcccggctaatttttgtatttttagtagagacggggtttcaccatgttggccaggctggtctcaaactcctgacctcgtgatccacccgcctcggcctcccaaagtgctgggattacaggcgtcagccaccgcgcccgctcaatattttatctcttaacgcctccttctcccctgcgcgattgaaggagacagtgccaggaggctcactgcttctggcccagagtgatggctcgaaaggaagggtctttgcaggcccagagaggaggtcctggcaggcttcccggaggaggccgtttgggctggtttggaaaggacactgcaattgttccggcttgtagcaggggtgggtgcggggcagcggcaagagtacccccgtcaccccggcctgggaacgcacctggggccgggtctgcctcggagcggcccggggccccgagaacctcggaaagggcgggtttcgtggccttccgggcgggggaggctgtacggctccgaccccgcggactaacaggaagccgagcgctgctgcgcgggcggctcggcagatggacgggtcgcgtccgcgtctccggggctgcgacaggcggagggaaggcgggtcggggaggagccgggagacctcccccgtggaccccagcccggcggagggggcgcgtcccgagggggcggggcccaaggggcggggtctgcagtccccgcccacccagaaacgcgccggcgggatcccaggcgccgagcgcccgctgagcagccaccctttgcgcgccgcctgcagcgcaggtacgcgccggcctgggcgggcggagggggcggcggggacacgtttgcttttgggaggctgggggccgttcccatccccgacgcccgggggatcccgagcctgcctcggggctggggcccgccccccacgccgtctgagcggtgcgcggtgcaccaccctccccagtggaccgaactggaaaggccgggagaggtttcctccggggctcacgaattggggtcccggccccaggaccccgaagctgcccaatggctcacgccccaggccctcacccttacacggccttccctgactttcggggcgcagtcacccccgcggtaggggagggtcacggccttcctggtaaaacggatgtaaatagaagggggactcatctccaggactggggaacagcccctatgacctcgcagctccacggctccattggccagatttccaggaccaggactgaagcctcactaccccggctttgctgctcatagcgaggtctccctgcccggtgctcctgcgagccatggcggtcccattccccaaccctctttccagtggtgacccaggcctccggggttcagggtgaccacaaggtctcccccactctgcagcccaggcccagatggcctggctctagagctccccactccatccagagtccctgtttccccaaagagaagggcccaccccggctcccgctcactcctcctcctgcctctgcagcttccccgggcgctgcctggacaggcctgcctgcgtgctgggacatgtctggcctccaaggaccgtcggtgggcgatggctgcaacggtggaggggccagagctggaggcagctgctgccgcaggagatgcttcagaggattcggacgcagggtccagggcgctgcctttcctgggcggcaaccggctgagcttggacctgtaccccgggggctgccagcagctgctgcacctgtgtgtccagcagcctctgcagctgctgcaggtggaattcttgcgtctgagcactcacgaggaccctcagctgctggaggccaccctggcccagctgcctcagagcctgtcctgcctccgctccctggtcctcaaaggtgagttccacctgttctgggccctgtctccatctctcgctctgccctgcctctgctgcatgttctcaaaggcaaaccccagtcccagccccagctccaggccgcccctcccggctccccaggtgtgaactgttctgctcttggtcctgtccagccccatcgccatcctcggtgatcaccacccccagtgtggggctggctgggccctggctcctggaccctgacgctgcccagtgggggtctctccagaccacagtgcagatgttgttcctggggaaggttgtgggtgatggttgtcagctgagatgagccggtggtctccacccctgcctccttccatttgcgggcacctctccagtgtttctgtctgtctgtccctgtctggctggggtgggggtggggtgggaggtctgtgcctctcgagcagctgtttctctggctggcagggtcgatctgggacctcggaccctggctctgagggccacatccgcctccccccttcccaggagggcaacgccgggacacactgggtgcctgtctccggggtgccctgaccaacctgcccgctggtctgagtggcctggcccatctggcccacctggacctgagcttcaacagcctggagacactgccggcctgtgtcctgcagatgcgaggtctgggtgcgctcttgctgtctcacaactgcctctctgagctgcctgaggctctgggggccctccccgccctcaccttcctcacagtgacacacaaccgcctgcagacgctgcccccagcactgggggccctatccaccctgcagcgcctcgatctctctcagaatctgctggacacgctacctcctgagattggaggcctgggcagcctcctggagctcaacctggcctccaaccggctgcagagcctcccagcctctctgggtgagtagcccctgcgccccgacacactggccccacgggagggtccctgaagcctgcctgtcttctgcaggggcctctgcacccacaggcttggtccacagctgcctcttggttgtccctccacctccctggcctttgagactccctcagtggctttgtcagagttctctgagcccagctgtggaggagagtctgaaacagctgctctgggaggcggcagcaggagtgtcccagcgccgtgggctgggctggtgccaagcctaagccagcaactgcccgcagcgggacttcggtccttgcggctccttgtcctgcacagcaacctcctggcctctgtgccagctgacttggcccgccttccactcctcacccggctcgacctgagggacaaccagctccgggacctgccccctgagctgctagacgccccctttgtgcgcctgcaggggaaccccctgggtgaggcctcgccagacgccccgagttcaccaggtaggcttggtgctagaaggggcagacctgggataggacatgagtctcctcactgtcctgagcacatgtctgtcccctgcacagtggcagccctcattccagaaatgcccagactgttcctgacctcagatttggacaggtatggggtgggttgagggggctggaggggagtctgtctgcctgtcactctggcccctccgacaccttctccagagttcctgggtccaggctccaacacgtaggcccttctgggtctaacctgttgctcgctccttcctcactcagctttcctgtgacccctcaaggctgctcagtgaccctggcctgtggcgtccgcctgcagttcccagcgggagccaccgccacccccatcaccatccgctatcggctgctgctgccggagccaggcctcgtccccctgggtcctcatgacgccctgctcagccatgtgctggagctgcagccccatggggtggccttccagcaggcatggacagggcgtggcgggggcagtgtgtgggccagggcatggcaggggcagtgtgcgggcccgggcatggctccagtgctcacaccatccttgtctggcaggatgtggggctgtggctgctcttcaccccaccgcaggcccggcgctgccgtgaagtggtggtcaggacccggaatgacaacagctggggtgacctggagacctacctggaggaagaggcaccccaggtgagggccacccaggcctgccggtggcgagtggagagctgctgccctgagccgtgcacctctgcccagagcctcaccctggcaccttccaccctgccccgtccctcctggatcctgcttccctatgtccctggcaccttccaccccaccccgtccctcctggatcctgcttccctgtgtccctggcaacttccaccccaccccgtccctcctggatcctgctccctgtgtccctggcaccttccaccccgccccgtctctcctggatcctgctccctgtgtccctgactggctgtgccctgacccaggctcctgtgacctcctctctcccccatcccagcggctctgggctcactgccaggtgccccacttctcctggttccttgtggtttcccgccctgtgtccaatgcctgcctggtgccaccggaggggacactgctgtgctcctcgggtcatcctggggtcaaagtcatcttcccccctggggccactgaggagcctcgtcgagtctccatgcaggtatggccaggacagcactgagggtggcaggccgcgcctcagcccacaggcaggtgctcagggggcctgtctgccccaggtggtgcgcatggctggccgagagctgcaggccctcctgggagaaccagaggctgcagtgagccccctgctgtgcctgtcacagagcggtccccccagcttcctccaaccggtcaccgtgcagctgcctctgccctctggcatcacaggtgagaggcagccatggggcatacctggacctgtggccatagggtggagggggtctccggccaggaggcctcagctcgctgcccctcccatccccaggcctcagtctggaccgctcccgcctgcacctgttgtactgggcccctcctgcagccacctgggatgacatcacagctcaggtggtcctggagctcacccacctgtacgcacgcttccaggtcacacacttctcctggtcagtgccccccagctttctcagcccccctcccccagtctgtacagccctcctcacccccagctctcccaggtactggctctggtacaccaccaagaactgtgtgggaggcctggctcggaaggcctgggagcggctgcggctgcaccgtgtgaacctcatcgctctgcagcggcgccgggaccctgagcaggtcctgctgcagtgcctgccccgaaacaaggtgggggcacgggccggagggcagcagggtggtgaccagagggctggggtggggtgcagagctttgggtcctgagctgcacgggcttccccgcaggtggacgccacccttcggcggctgctggagcggtaccggggccccgagccctctgacacggtggagatgttcgagggcgaagagttctttgcggccttcgagcgcggcatcgacgtggatgctggtagggatgctggtggatgctccctgccctggagggggagccttaccgtcctccccgagccctccttgctcagcccacccctgtcccctagaccgccctgactgtgtggagggcagaatctgctttgtcttctactcgcacctgaagaatgtgaaggaggtatacgtgaccaccactctggaccgggaggctcaggctgtgcggggccaggtgggcgaggggagtgggtgaggggagaggccccccaggccgcttgggcagaggaccgaactccgaaccccattcgatgccccttcaggtgtccttctaccgtggcgcggtgcctgtgcgggtgcccgaggaggctgaggctgcccggcagaggaagggcgcagacgccctgtggatggccactctgcccatcaagctgccggtgggactgagggacagcagaggggcggggcaggaccgaggcccaggggtgaccagggtgacatggtggagttgggggtggagcccagggcttaatgcactttttccttccaacagagacttcgagggtccgaggggccacggcggggggctggcctctccttggcacccttgaatctgggagatgccgagaccggctttctgacgcagagcaacctgctgagtgtggctgggcgtctgggtctggactggccagccgtggccctgcacctgggggtgtcctaccgggaggtgcagcgcatccggcacgagttccggtgaggctcccactgcccgctggctgccagccccagggctgagccctggctgcctggagggcccacctgattctgacagaagtttcttccaggggaggtgggggaagggcaaacaccaggctggaaaggaaaggtctggccgcacctggccccaggagccgggaactcccccacactccgaggcagagtgtggtggggggtcctgggcaggtggacaggacccctctgtcgcccatcctctgcctgcagggatgatctggatgagcagatccgtcacatgctcttctcctgggctgagcgccaggctgggcagccaggggctgtggggctcctggtgcaggccctggagcagagtgaccggcaggacgtggctgaagaggtgcgcgcagtcttggagctcggccgccgcaagtaccaggacagcatccgacgcatgggcttggcccccaaggaccccgctctgcctggctcctcggctccacagcccccagagcctgcccaggcctaggccccacagacttttaggctggcccagatattccccagtggatgggcagagcccccaccttcaagtctctccagtgtgtggggacgggtccctgtgagcaacaaaactgcactgtttctttcacctca

SEQ ID NO: 1232 - DNA, 47191 bp, Homo sapiens
gcactgcagcgccagcgtccgagcgggcggccgagctcccggagcggcctggccccgagccccgagcgggcgtcgctcagcagcaggtcgcggccgcagccccatccagccccgcgcccgccatgccgtccgcgggccccgcctgagctgcggcctccgcgcgcgggcgggcctggggacggcggggccatgcgcgcgctgccctaacgatgccgcccgccgcgcccgcccgcctggcgctggccctgggcctgggcctgtggctcggggcgctggcggggggccccgggcgcggctgcgggccctgcgagcccccctgcctctgcggcccagcgcccggcgccgcctgccgcgtcaactgctcgggccgcgggctgcggacgctcggtcccgcgctgcgcatccccgcggacgccacagcgctgtgagtagcgggcccagcggcacccgggagaggccgcgggacgggcgggcgtgggcgcgttccctggcccgggacgggaagcaggacgcgggccaggacgctcccagggcgaggctccggcgcggcacggcggccctgctaaataaggaacgcctggagccgcggttggcacggccccggggagccgaaaaaccccgggtctggagacagacgtcccacccgggggctctgcagacgccagcgggggcggggcgcggaggccgcgctcagctgggaggacaaacagtcgctaattggagaggaattgggatgcggcctggggctgcggggtacccggagaggtggggatggctgtagggggcggcagggaagagttccaggaggtgtctggaaaaggatttgatggatgtgcaagaattgggctgatgcttaggaaggggcgatgaggtgggtccagaagaaggggggtgaacggtgtgagcaaagaccgtgaggctggaggctggccacgggaggtgtgaggggtaggggcagggtgggaggtgggctcgcgggtgggctggggtcatgaagggcctcaggcgctctgctattgggttccaaggctatcctgagaacaggggtgaggggggattgccgtggggggttaaagccttgtcatgttcgctttcgggagataaaaacaacaggtggcctttatggagacgctgcccagagccaggtctgtgccaggctcctgttgggggtcgtcatgcggaatcctgactctgaccatccgaggcatagggaccgtggagatttgcatttcacagatgaggaaacaggtttggagaggtgacacgacctgtcccaggcatcacagccgggatgtgcatagcaggggtttggaactatgaggtgcccaggacccagggttggattgaaaagggcggaggggactaagataagcagacagttgtccccagcgctggggagagtcttgggaccagtctgatgccttgtatttcccaggctccaggctcctcgccgggacagtgtctccttgggtgcgtgctggatccctgggggacgtggcacatccccaggcttgctaaacattgggtgggttctggcatttggttttgtaacgtttctgggtcactcccgcctgtggccacccttccttaggggagccgtgtgtccttggggctttgctgggtggtctcgagggtgggagaagaatgggttctcctggaccaatggagcccgtgcccctcggggccacattgctcctgcgctccctgactgcggacgcgtgtgtctcgcggctgtctctgtggagatggcctcctcctgcctggcaacagcacccacagaattgcatcagacctaccccacccgttgtttgtgatgctgtagctgagggctcctctgtctgccaggccggtcactggggactctgtccagggcctggtggttcctgcttcccagcacctgatggtgtccatgagagcagcccctcaggagctgtccgggagagaagggcgctggtggctgctgagcggagagcaaggcccgtgttctccaggcccttggcacagcagtggagcccccgcccctgccttgtgttgtcctcttaggctctggtcctggggtttggaggagggggaccctgggagttggtggcctgtcccagcctgagctggcaagattccgaatgccaggccccccaagtgtgcaacagggcacagggtgacctcatgtgggcaggtgggtgctgttctgtacacacctggggccgccgctgggagagttctggaaggtggggtgaggggacccatggcaaactagggccttaggaaggatgtgaaggccctggctggccccccaggccaccctctgtgctgtggggcagcccagccattttgctgtctaccctgcaaactcctcctcggggagacggctgggttttccccagggaagaggggtcaagctgggagaggtgaaggacacagatcacagctgctggcaggtgttcaagggtccaagagcgttgctgtctgggtgtcaccagtagccttcctggggggctcacgcaggtgcctctccacttgtggctccctggctgctgaagctcagcagggacagctgtgtccagttccaggtggaggacagccggggcttctgaggccacagcctgccttgggttaatgatgctgccgagaggtggtggcttttggaaaagatggcgtactgcaaaacgtgctgctctgcgtggctcgaagcttcgtggggagacgtgggcagagccgtggctgactcacagaccccccaccccagagcctgccctgccctccctgccccgacccttctccctcctgacccatgtgttttttttttttttttttttttttgagacagagttcactcttgttgccaaggctggagtgcaatggcacgatctcggctcatggcaacctccgcctcctgggttcaagcgctttttcctgcctcagcctcccgagtagctgggattacaggcgtgcaccaccatgcctggctaattttgtatttttagtagagacagggtttctccatattggtcaggctggtcttgaactcctgacctcagatgatccgcccgcctcggcctcccaaagtgctgggattacaggcatgagccaccacgcccagccctgacccatgttttgaaccaaattccagccacccttttatctgcaagcattttggagggcatcgcaatactgcagacccacctaacacaacagacagttccttcatgccaccgaaggcctggtgtgttcacatttttggtttaatagtttgaattaagagccaaataaggtccacacactgcaattagttgatgtctttttttttttctttttttttttttttttgagacggagtcttgctcttgtctccaggccgcagtgcagtggcatgatctcagctcaccgcaacctccgactccctggttcaagcgattctcctgcctcagcctcccgagtacctggtagctgggtttacaggcatgcaccaccgtgcccagctaatttttgtatttttagtagagacggggttttactgtgttggccaggatggtctcgatctcctgacctcgtgatctgcccacctcggcctcccaaagtgctgggattacaggcgtgagccaccgcacccggccaatgtcttttaaaaatatatactttttttttttttttgagacggagtttcgctcttgttgcccaggctggagtgcagtggcgcgatctcacctcacggcaacctccgcctcccgggttcaagtgattctcctgcctcagcctctccagtagctgggattacaggcatgtgccaccatgcctggctaattttgtatttttaggagagacggggtttctccacgttggtcaggctggtctcaaactcctgacctcaggtgatccgcctgccttggcctcccaaagtgttgggattacaggtgtgagccaacgcgcccagacaaaaatatatgtgtgtctttaaggctggtcaagcaaagcagtaggactggagaaagaatgaagaattctacctggctgtgatcaattcgttgtgaacaccactgtgcttggaccagctagctgatgtcttttgttttgttttgtttgagacggagtctggctctgtcacccaggctggaggacaatggtgtgatctcggctcactgcagcctccatctcccgggttcaagcgattctcctgcctcagcctcctgagtagctgggattagaggcgcgcgccaccacgcccggctaatttttaaaaatatttttagtagagatggggtttcaccatgttggtcaggctggtcttgaactcttggccttaggtgatctgcttgcctcggcctcccaaagtgctgggattacaggtgtgagtgatgtattttatttatttatttatttatttatttttattatttgagatggagtctcactctgttgcccaggctggagtgcagcagtgccatctcagctcactgcaagctccgcctcctgggttcacgccattctcctgcctcagcctcctgagtagcctggactggtgcccgccaccatgcccagctaattttttgtatttttagtagagacggggtttcaccgtgttagccaggatggtctggatctcctgacctcgtgatcctcccgcctcagcctcccaaagtgctgggattacaggcttgagccaccgcctgtcttttaaatgtccgatgatgtctaggagcttcccttcctctctttttccttgtgcaatttgttgaagaaactggctcctgcagcctggatttctcgctgtgtcttgggggtgccacctccatggtgtcacctccgtggtgctgtgagtgtgtgctttgtgtttcttgtaaattggtcgttggagccgacatcccattgtcccagaggttgtcctggctggcactggcctaggtgtagatgtcatcagctcagggccccctgctctaaaggccacttctggtgctggttgccactcaccctggctgggggtcacctgggtctgctgctgtctcgcaaatgctggggtccaggactgggcacatcgagggacttggtaggtgcttggttcactgatgtaaaatataggagcacccggggccttgccctttcccacctgcatccctgaatgacaggagagtgtgggagagtgtagggacagcaggcgcagaccccggggcccctgcctgggattggcgtcggggaagacaggcattctggagcgacccctaggcctgatgccttagagcgcaactgccagagacacagcttccttggggggctggccaggccacggaggggcccctggctcccatttctggtccctggatcctgagagcgaggactagggattgtcaccaaggcctccatgagccctcagcagaaggagggccaccctcgagggctccgttatcactggagcccgcgttcaaccaacacgcagatgattctccaaggacagagatggatgatggggagggggctggcctggaaggacccccagtgcaggtgacattgaagccaggtttcaaagctcccacagggagctgcccagagagagtccccaaggggcaaggtgactcgggggcaggggtagggcctctgtcaggagagcctaggagaggcctgtgtcttctaggaagagccctggcagccgagcggaggcagtggtgaggacctgcatcctgcatgtccagctggcctcacccggggtccctgagccgggtcttacgtggctcccgcactcgggcgttcagaacgtgcctgcgtgagaaacggtagtttctttattagacgcggatgcaaactcgccaaacttgtggacaaaaatgtggacaagaagtcacacgctcactcctgtacgcgattgccggcaggggtgggggaagggatggggaggctttggttgtgtctgcagcagttgggaatgtggggcacccgagctcccactgcagaggcgactgtggagacagagagcacctgcaggtcatccatgcagtatcggcttgcatccagatcatacagggaacactatgattcaacaacagacagggaccccgtttaaacatggacaaggggtcactcacgcctggaatcccagcagtttgggaggccagggtgggtggatcgcttgagcccaggagtttgacaccagcctgggcaacagggtgagaccccggtctctaaaaaataaaagaacattggccgggcgtggtggtatgcatctgtggtcccagctattcaggagactgaggtgggacatcacttgagccgaggaggtcaaggctgcagtgagctgtgatcacaccactgcactccaggctgggtcacagagcaagaccctgtctcaaaaaaaaaaaaaaaaaaaaaaaaaaatcacaggatctgaacagagatttctccaaagaagacgcacagatggccaacagcgtgtgagaagatggtcggcctcattagtcatgagggaaacgtaaatcaaaaccactgtccagccgggcgcggtgcctcacgcctgtaatcccagcactttaggagagcagatggcttgaggccaggagtttgaggccagcctgggcaacatagcgagaccaataaatagatattagtggtggcgcctgtagtcccagctagttgggaggctgaggggggaggattccctgagtctatgaggttgagactgcagttagctgtgatggtgccactgcactccagcctgggcgactaggaaacggtctttaaaaaaaaaaaaaaaaaacagggtgggcgcggtggttcacgcctgtaatctcagcactttgggaggccaaggtggggggatcacaaggtcaggagtttgtgaccagcctgaccaacatggtgaaaccccgttctactaaaaatacaaaaattagcgaggtgtggtcgtgggcgcctgtaatcccagctaattaggaggctgaggcaggagaatcacttgaacccgggaggcggaggttgcagtgagccaatatcacaccactgcactctagcctggtcaacagagcgagactctgtctcaaaaaaaaaaaatgctgagcgtggtggcgcatgcctgtagtctcagctactttgggggctgaggcaggagaatcgcttgaacctgggaggcagaggtcgcagtgaggcaagattgcaccattgcactccagcctgggagacagagtgaaactctgtctcaaaaagaaaaggtctaggaagagtccgcaccctctccccgcggtggccacgccgggctccgcgctgagccctctgtgttcttgtctctccatacctcatcacggcaccgcagggttgcagccactcctggtctcattttacacaccaggaaattgaggctctttgagaagccgtggtgatgatttcatcagcatgctctggggcagacccctgcagccgcacagggtgcctggggcccacactagtgccctggtttatagacagacagaggtggcagtggcgcttccgagtcgggctgcgatgtgcttgcactccccgaggggctgaggggccctgcgcccaggtgcagctgcttgggtgctgccagcccctcccacctctccctccctgccagcccctcccacctctccctccctgccagcccctcccacctctccctccctgccagcccctcccacctctccctccctgccagcccctcccacctctccctccctgccagcccctcccacctctccctccctgccagcccctcccacctctccctccctgccagcccctcccacctctccctccctgccagcccctcccacctctccctccctgccagcccctcccacctctccctccctccagcccctcccacctctccctccctgccagcccctcccacctctccctccctgccagcccctcccacctctccctccctgccagcccctcccacctctccctccctgccagcccctcccacctctccctccctgccagcccctcccacctctccctccctgccagcccctcccacctctccctccctggctcatccctgctgtgtcccttctctctagtttcctgttcagtttcaggaaggaggctgggaacccagatgtagggaatttgcgccctggagtcagacctgggttcacgtcccagcgcctccacctctggtgtgaccttggtccagtctctcagcctcagtttcctcacctgtaaagtgggctccatgattagatgcaccctgcagggcagtgtagcagtgacctggctcagccactggcagccccaacaatcataccttgttaaagtagctctgtcggttccctcaggggttccgggggcccattcccctgtcctccatgcactgtgagacctgccctgccacagagcagagtgtaacagcctgagggtgagagccagacactgtgcctgtgcttagaccagacactggacgacgggagccagtgcagcctgggcgggtggactcctatggacccctcagcacccagcctcggtgccttcagcgcagggccgcgtggctgtgggggctcacaagacccggcccactcctgcttgtgcctacatctgggtgtttgcccattggtgccttttgacgcgttctggtgtgtgtgagacgtgcggggctgggaagtgttggcagagccgcgagtaccgtcctcactccttttgttcttttgacgtaagctggcgagtggcactgcctgagttccgctcagtgcccgccctgatgtgcggaccccgctgcattcttgctgttaggtggtggcggtgtgcgctgtcgctggtgggcaccgagagtctttgggagctttggggaggttgtgccaagcctgagcctcgacgtcccccttcccggctttctgttggctcttctgaggccagggcatctctatgagggcctcctgctggagccgtctctgtggatctcctctgccatcctggcccatgagtgggtgatgcgctggccaccatctggtgacagtggccgggcaccgctgccaaatgtgggtcccgcatctgcaagcccctccctgggtcccctagggtatggggtggttctgccactgccctcgctcccccaccttggggtgcctctccccctgctcgtgggggagaccctgcctgggatctgctttccagcaaggaatatactttggagggagacacacatgttcttttctggagctctgcagtggccacggcagcccagcccgccaagcaccctggaatgaaaacatcccgctgctgtctgggcctggcctgcactctgctgcctgcgctccagctggctgaggccgggcacgtctgcgggcacagcagcgggggcgccacagtctccctgcagagtgagcgcagctggaaaatgcagctcacgccctttcccagaacacctcgctcttcatggcttggcagctgtccttgcctaggggccagggtgcccaggcactggtggcaggagaagggctacatctggggctgaggcgggctgggtccttttctccctgcagctcccgaggcccagccctggcccagcctggcattcctgaccttagcagcgccatgatctgaagacaggctggcttctgtgaggccacctcagaaagggctttgtgcccaggcagaggcggaagccagctcttccttctggttgaggcaggaatgaggccagcgctggggcaagcccatgcccagggaacgtcacagctgtgggagtacaggggctccgggttctgagcccgtccactgtgcatcgtggccctggcctcaggatggctcgtaccatcattggctgtgcccacagccgagtgggtgatgggattccggctgccccgctggatctgtgctgctgccctctccagggcactgctgtgcccgcacagccgggcgcagatggccagtttgcttgcccccccccccaccatcctcttcctaccttggcttcctccattgacacactggaccctgctggctgcccggggaggtgtttgggggatggtgttgggggaggaggagggccccttgagcctcagtgtgcccatcaggagcgtaaggtcagtgcagcacctgcccacacaggctgtgaagggtgggagtggagagggatgcaagggggtcacaacgcctggctccatgtcagctgcgtgcaggggcaccaggagccggccctcattctccccttgaactggaagggtggccccgaccccagcggcaggtagcatacgtatgaagcgctctccttcctacaccccacaggtgggctcgtctccagacggccctttttgagctggctgtgtttttccatctgtgtaggcaaggacatcgcagactcccctttctcatctccctcgttcagcctccgaggccggagtctccatccctgtgcctgcctgtgggtcccgggaggacctgaggctgcccatgtcacccccggcatctcatcctggggacagttcagccgtgggagggatctgtaaggacagaatgccgctgagcctggggctccccagctagtctcacaccccgtgtctgggacccagagaccctcgtgcagggctctgttgcttggggcctggcagcctcgtcctgtatcagaggctgccacccccacccctcgtggggccagggttgtggccggcctccctggccctccccatggaagtggtaggcggagccagcagccatctgcccagcccggggctgcactgttttttttcaaatgagcaccgtcccaaactgcagcccgttaatttaaacaggatcatttccggccctggaagccgcctcactctccttaaatagaaaggagcacagcgcagagggaaacagatgaggtcatggctcggctggcccagcgaggaaggggccgcagtgggggtggcactgccgcctgtcccctgtcctctccagcgcccacactgcagcccatttcctcaccctgggcctgctctcgggagggacgggcctgggggtcctcttgctgggcggaggggaaccagctcctccaggagaggacggggcctggcagggggcatggggcctccctgggtctggcgtcctgtcctgcccctgccgagggaggagcggttacataagctccgcaggcggcccctccgagccggtccccccagcccagtttccagtgaggcggccagcgcgggcgggggtgccgggcctggcgcacacccgctgctgaccacacgtgtctggaatgtgcagatgtttctttgggggctccgtccggcccccagaccccactcagcatctggtctggggagtgggcgcctggggcactcagctctgagtgtgagactctgaggcaggtctggtttgtctggggccattccctctgctgtggattgggagggccccgggagctgccccacacccagggaagttctcctcagtcccactgttgcattccccgaccccggctcccccggcccaggagcgcctgtggggcagaaggcccagccccaagacttcccggccctgccagcctcaggcttcacccaccctcgcgccaactgtgggcagagcccagggggagggcaggagagccagcgcctggctgggaacacccctgaggggccgaggctccagggcgagggggcccgacctggggttcacacgcccgggtggcgggcagacccgctgcagcatgagacacgtgtcagctacctcgggccggcaggctggccctgctgcccacagccctgggacgtggccccacctgtgacgggtgtggaggggcagcctccaggcctggccacaccctctgctgttgctgctcctgctccaggattggcaagggtgctgggaaggggtgaagacccgtactgtggccacacacctgggacttccttctccacccagtggtgccccagcagccgctaaggagcccgctgggtcccacgctaggatggtcctaactcctcccgccttccagatcggacgctcggcgctggggaccccttgtgtcccggggctggggcaccgtcctgccccccatgggggtgtactcctcccgacaagcttggcttcagcttccctgggagcacatcctggccctcgggcacccatcaggctgtccctgtgcacctggctcccacccttccagctcatagcaggaactggggtgaggagtgcgtggggcagcaagggcctgggaccccagaggaccctgcactctgctctgtgctcttgcctgggcttagggccgctcggtggtcctgctgccagatgcctgggccctgctgtgtcccccatccttgcagggaaccagaacgtgggggcagggcatcagacagcggcgatgatgtcacctggcgggtgcagaggaagcccgaggggcggggtgggggggctggcgcgaggctgcctggctaggccttggcgttcccccagaacggcgatggcaaaagcagatggagacgtgaaaaagtacgggagcaagcgaggtgaggactccacggggacccctgtgctgttccctgtccctgaagcccacacctgagtcctgcccagggcagatgcttccacacccagggggcacctgagtcctacccagggcagacgcttccacaccctgggggctgggggactgcacctggctcctgtctgggccccagcttcattccactgccctgggccctgggagctcggccgagcggggtccccaagaccttgctgcatttctgggccttgggctggggtgagggccgggagaaggagccagcctggagcctggcacgcagggagtgcatggccagaaccggtgacaggcagggctgcctgctggcgtggaagaagtgtccatggcacccccaggcctggttcacagtgggatgggcggggagccggggggctctggggtcctcggctgacctgcccccacccctgccctggcttgtcagctcccagcagcagccactcttgatggattttccagaaaatgaggtgtggccaaacatcttcaggcttttccttctttcctttctcccgtggcctgggtgggagctgctccccatgcctgggggcaggtgcgagagcctgtgcccctccctggggcagtttcacagctgtgtcccttccagggggcctgcctgtgttcaccgtggcctctgcagcacctctcgccccttagggctcctgcgcctcgggtcccggtgcctcatttctccctaaagcattggttctgctgccgccgcagccgctggaaagtccctcctcaggtctaactgcagttcctcacggcacagtgttccccctcgggcatggtgcttgggcagtgggtgtgagtccagctgcctcaccctgtctcgagaatggcctcttgctggtctcccagccaccaccctgtcccaccccacggcggggatggtgtggatgcctagcagcgcggctgtgggcccacccatccttatgggcagtggggagcacctcagcccgtgtccctaccttggtgtagaggaggggacggcagagaagcagggttcagttaggggggaagtggtggccctgccggaggggccgttccctgtgtgcctggcccccagatcctctcccctcccggagcccagggcacaggcataggctctctgagtgtcccacagcccctgggggaagggaactgcacccccaaccgtgccctccatccgcagatggaacgagaagctccgggagccagtgcccagcgtctcatctgtctgggcacccagcccaggtgagggcctggctccaccgtccgtggctggtgctgcttcctggcacggagaaggcctcggctgctctgtcccctcagctggggtggcctctggtccccttctttgttggttcccttctcaagctcttgccctggccccgggccccaccgggcagcctgtgtgtgcgtctctcctgcgccgggtaggctcctgtgggagcggagctccggtgggaggagcagggctggaggctggcaggggctgggcgggtgttcagggatggaggccgccccggcttggggctggctgccgggtggtcattgctgggaagagcaagtctaggcggaggcacctgctgggtcactcgtggggagggtgacacctggggaagtagaggcccgtggcaggaggtgaggcctcggggtcctggggagcaggggggtggtgtgcagacctgcggagccatagtcctgtgccaggagcactactgggagtgcgtgggaccaggaggggtgcccagggtgggcggcagagtgacccccgaggtgcttgaggccgaggggaggtggagttctcggtttgccccagctctctgtctactcacctccgcatcaccagctccaggacctggtttgtaactcgggcagctctgaaaagagagacatgctgccgccctgtggtttctgttgctttttcttcactgactactgacatgggatgtttttcctacggctgtgaccaattgtgcttcttctaattgcctggtttttctttttttgtttttggagttttctctttctttcctccctccctctcaccctccatcctttttttttttatttttattttttgagatggagcttcactcttgcaggatggggtgctggagtgcaggggtgcgatctcagctcactgcaacctctgcctcgcgggttcaagtgattctcctgcctaagcctcctgagtagctggaattacaggtgcttgccaccacgcccgactaattctgtagttttggtagagacagggtgtctccgtgttggtcggtctggtcttgaactcctgacctcaggtgatgcgcccgcctcagcctcccaaagtgctgggattacaggcaggagccattgcacccggctctttccccttctccttttcttctctctctcctccctttctttcttttcttttcttttttttttcttttgagatggagtctcgctctgtcaccaggctggattgcagtggcgtgatcttggctcactgcaaccttcgcctcccgggttcacgtgattctcctgcctcagcctcctgagtggctggcactacaggctcccgccgccatgcccggctaatttttgcatttttagtagagacagggtttcaccctgttggccaggatggtctcgatctcttgatctcatgatccacccaccttggcctcccaaagttctggcattacaggagtgagccaccgtgcccggccatctttctttccttgctttctctttgttttctttcgagaccgggtcttgctctgtcgcccaggctggactgcagtggcacaatcatagctcactgcagcctcgacttccctggctcaagcgatccttcctcctcagccccccgagtagctggaactacagttacacactaccatgcctggctgattctttttttccttgtagagatggggtcttgctatgctgtccatcctggtctcaaactcctggccttcccaaagcactgggtttacaggcataagccaccacacccagtttccttttcttctttttaactggaatagttgacgttttctttattagctgtgtgtcaggagggtatttttggcctttagtatgtcgtgtaagttgctagtgcttttctgagattgtagtttgttttctaattttatttatattttgcgtagaagttgtgtattttagatggagttaggtcggctggtctttgatgttttatttattaattatgtatgtatttatttatttttgaggtagagtctcgccgtttcacccaggctggagtacagtgatgcgatctcagctccctgtagccttgacctctctgggctcaagtgatttttctctcctctacctcccgagtacttgggaccccaggcgcatgccgccatgcctggctaatgtgtattttttgtagatacggggtctcactgtgttgcccagggtggtttcaaaatcctgggcccaggcgatccttccgtctcagctcccacggtgctgtgttaccggcgtgtgccccagtgcctggccgtcttggaggtcttgtttctctgggtttatgcctcgaggtggcgcctgctcccctgtgctccctggtagcctggtagtgagcctgcttctcacacagtcatacctggttgtggtcccacagtgggaccaccctgttgggttcagaacaggagatgggggcccctcgagtctgtgtgggggctgtggacagggttgggagaccttggctctgtgggggactgtggacaggggatggggggccttggccctgcgtgggatgggttgggggtccgtgcccttcctggccctgggtggacaggtccatgtggcactcggcatagggctgagatgggtgcagagggctgaggcccccaggcctctcctggcttggtttccccagatgagtgttcatttgggtcttccatcagaaagtcccctcctgacctctgggagtggggagctcaagggtgggaggccatagcttggggatgctggcaatgtgtgggatgggcccagggatggcctctggcctactaggggctctggccctgacccacggccactcactcctcagagacgtctcccacaacctgctccgggcgctggacgttgggctcctggcgaacctctcggcgctggcagagctgtgagtgtcccccagtcgtgccagcatgcggggctcactccgggtgggctggcggcaccgcctcttgctgctcagctgtgggggcttccatcagctttgccgaatcccccgtctcttccagggatataagcaacaacaagatttctacgttagaagaaggaatatttgctaatttatttaatttaagtgaaatgtaagttgtggttctttgggtggggtcctggctggaccccaggcccccaatatcccttctgccctcccagttggtccgtgtccccttccaggcttgagaccagatcctgggggcagttcactgcctgcttggagccccccagtgccggcttggttggggcaggggaggcggtgctgtcagggtggctccagggcctggttgccagtggggggctggcatagacccttcccaccagacctggtccccaacacctgcccctgccctgcagaaacctgagtgggaacccgtttgagtgtgactgtggcctggcgtggctgccgcgatgggcggaggagcagcaggtgcgggtggtgcagcccgaggcagccacgtgtgctgggcctggctccctggctggccagcctctgcttggcatccccttgctggacagtggctgtggtgagtgccggtgggtggggccagctctgtccttcccagccaggtgggacctgggccctgcagacactgggcagggctcaggaaggcctctctggggggggcctccgggccaagggaacagcatgggagcctgtgagtgcggcgggcggatgtgggggcgtggggtggagccaggaggagcagaacccggggtccagtggctgcctcttctaggtgaggagtatgtcgcctgcctccctgacaacagctcaggcaccgtggcagcagtgtccttttcagctgcccacgaaggcctgcttcagccagaggcctgcagcgccttctgcttctccaccggccagggcctcgcagccctctcggagcagggctggtgcctgtgtggggcggcccagccctccagtgcctcctttgcctgcctgtccctctgctccggccccccgccacctcctgcccccacctgtaggggccccaccctcctccagcacgtcttccctgcctccccaggggccaccctggtggggccccacggacctctggcctctggccagctagcagccttccacatcgctgccccgctccctgtcactgccacacgctgggacttcggagacggctccgccgaggtggatgccgctgggccggctgcctcgcatcgctatgtgctgcctgggcgctatcacgtgacggccgtgctggccctgggggccggctcagccctgctggggacagacgtgcaggtggaagcggcacctgccgccctggagctcgtgtgcccgtcctcggtgcagagtgacgagagcctcgacctcagcatccagaaccgcggtggttcaggcctggaggccgcctacagcatcgtggccctgggcgaggagccggcccgaggtgagtgtctgctgcccactccccttcctccccagggccatccagatggggcagagcctggtacccccgtcttgggcccacactgaccgttgacaccctcgttcccaccggtctccagcggtgcacccgctctgcccctcggacacggagatcttccctggcaacgggcactgctaccgcctggtggtggagaaggcggcctggctgcaggcgcaggagcagtgtcaggcctgggccggggccgccctggcaatggtggacagtcccgccgtgcagcgcttcctggtctcccgggtcaccaggtgcctgcccccaccccccgaggggccataggttgggagatctctgaagcactggggcagagcctgcggctggggagtctcaggaggaaggaggtgggagctgggccggccctggtgagcaggtggcgccggccggtggggccgttcctgtcagctctgcagatgcagaggtggacatgagctgggggcagcctccggacactcctgggcacgccatacgggaggtggcctgcacggggatccctgccggtacccacaggccccgtgggtgggtgctgctgtgagcctgggctggtgggccctggtctccgggctctgagcctcagtttccccatctggaaagggggacagtgatggggctcccagcgggctgctgtgagggtgggaggatggaggagtgccctgagccccctgccatcccacacccgcccccaggagcctagacgtgtggatcggcttctcgactgtgcagggggtggaggtgggcccagcgccgcagggcgaggccttcagcctggagagctgccagaactggctgcccggggagccacacccagccacagccgagcactgcgtccggctcgggcccaccgggtggtgtaacaccgacctgtgctcagcgccgcacagctacgtctgcgagctgcagcccggaggtgtgcggggggccaggcaggggcctgagacgctggctgtggttaggggcctgccgagcgcccgcggtggagcctgggctgaggaggaggggctggtgggggggttttcgggcggctcggtccccagtctgttcgtcctggtgtcctgggccctggcccggcgcctcactgtgcactcgccaccccaggcccagtgcaggatgccgagaacctcctcgtgggagcgcccagtggggacctgcagggacccctgacgcctctggcacagcaggacggcctctcagccccgcacgagcccgtggaggtagtcggccccccacgttctacaacctgccctcctgcctgcccctggaggccttgcctgccctgcccactgtgggtctcgccaaaaaacttgggggccttaatgttgcttgtgcccagtgaagatggttgggaaaatccagagtgcagagaggaaagcgtttactcacattacctccaggccttttctctgagcgtgtgtgagttattcctgaaaggcaggtcaggggtcctgccccccatggacagtttccaccggagtcttcctctcgagcgacaggagccaggcctgtgggggtctgatggctcgctctccttccctcccctcttcctgggaagttcgggtagggggagtctgggcttcaggctgggatggggtctgtggagctgaggcggccccctgcccaccaggtcatggtattcccgggcctgcgtctgagccgtgaagccttcctcaccacggccgaatttgggacccaggagctccggcggcccgcccagctgcggctgcaggtgtaccggctcctcagcacagcaggtgggactctgggtggtgggtggtgggtggtgggcgccgcaggactcggggtggcctctctgagctttcacgtctgctggtcctgtggccaccagagtggttcccagtcttaggtggacagagcaggggttccagagacaccagctcattccaggtgtcctgggggtggattgggtggggcctgcctgggggccggcctgggtcagtcggctggccggagacggacgcagcactgggctgggagtgctgcccaggtggggagacctgtcctcacagcaaggccaggattgctggtgcaggcagttgggcatctctgacggtggcctgtgggcaaatcagggccccaacaccctcccctcctcacagggaccccggagaacggcagcgagcctgagagcaggtccccggacaacaggacccagctggcccccgcgtgcatgccagggggacgctggtgccctggagccaacatctgcttgccgctggacgcctcctgccacccccaggcctgcgccaatggctgcacgtcagggccagggctacccggggccccctatgcgctatggagagagttcctcttctccgttcccgcggggccccccgcgcagtactcggtgtgtggccctgacctgggtctgttccctgcatctcctcaggccaccttcctgtctgctgcccagggtctgggtctgtgcaccagacacacccagcctgcaggcccctcccacgtccttgccacctctgacctccgacctctgcagtgccctcggccctctcccagtgggagaagctctcgcctgggcccttggcacgagctgtgcctcctcttcctctctcccagcacagctgctccttcctgtctgccaggtcttggcctgtgtcctctccccgtgtgtcccccggtctgcaactgtcctgcctgtccttgtcacgagcactgtggggaggctccttgaggtgtggctgacgaagcggggagccctgcgtgtccaccctcatccgtcgtgcgggggtccacgggccatgaccgtgaggacgtgatgcagccctgcctccctctccacaggtcaccctccacggccaggatgtcctcatgctccctggtgacctcgttggcttgcagcacgacgctggccctggcgccctcctgcactgctcgccggctcccggccaccctggtccccgggccccgtacctctccgccaacgcctcgtcatggctgccccacttgccagcccagctggagggcacttgggcctgccctgcctgtgccctgcggctgcttgcagccacggaacagctcaccgtgctgctgggcttgaggcccaaccctggactgcggctgcctgggcgctatgaggtccgggcagaggtgggcaatggcgtgtccaggcacaacctctcctgcagctttgacgtggtctccccagtggctgggctgcgggtcatctaccctgccccccgcgacggccgcctctacgtgcccaccaacggctcagccttggtgctccaggtggactctggtgccaacgccacggccacggctcgctggcctgggggcagtgtcagcgcccgctttgagaatgtctgccctgccctggtggccaccttcgtgcccggctgcccctgggagaccaacgataccctgttctcagtggtagcactgccgtggctcagtgagggggagcacgtggtggacgtggtggtggaaaacagcgccagccgggccaacctcagcctgcgggtgacggcggaggagcccatctgtggcctccgcgccacgcccagccccgaggcccgtgtactgcagggagtcctagtggtgagtatggccgaggctccaccaccagcccccaggcaggtgcctgcagacagggtgctcacacagggcgtgaggcctggcttcccagtgagggcagcagcccagttactggggacgtcggccccgggcaggtcctgctggctggctcctcgggctacctggtgggctttaaattcctggaaagtcacggctctgacagtggctccgctaactcattccactgtctcatttcacaaaatgaatttaaaactctgctccctgacctcacacgagcccccgtgagtctctcacgccctctgctgtgttctcgcctggctaaagcgagtggcttttgaggtggagtctgaacccctgatgggaaactgcgggctgcccgcggtgccaccatgctgggtacatgggggacagggctgtctccatcttgcgggtacctgcctcttcaccaggggccttgggaggggccatcagaaatggcgtgacctgtgcagcctgtcctgggttctgtaagccagtgtaggtgcctcccctcactgctccgagctctctgggtgaggagctggggcaagagcgccgggagggtctgagaagactcagagagaggtggactctttgtagctggtactaggtttgctttacagatggggaaactgaggcacagagaggttgaggcattagtagtactacatggctggctggagagccggacagtgagtgtcccagcccgggcttggctcccatggcatgcagagccccgggcacctcctctcctctgtgccccgcgtgggactctccagcccgacgggaggtgtgtccaggaggcgacaggctaagggcagagtcctccacagagcccaggctgacaccattccccccgcagaggtacagccccgtggtggaggccggctcggacatggtcttccggtggaccatcaacgacaagcagtccctgaccttccagaacgtggtcttcaatgtcatttatcagagcgcggcggtcttcaagctctcagtaggtgggcgggggtggggaggggaggggatggggcggggcagggcgggggcgggctccaccttcacctctgccttctgctctgcttcatgctgcccgaggacgctgccatggctgtgggtgagtggagggagggacgccaatcagggccaggcctctcacctgccacctgggctcactgacgcctgtccctgcagctgacggcctccaaccacgtgagcaacgtcaccgtgaactacaacgtaaccgtggagcggatgaacaggatgcagggtctgcaggtctccacagtgccggccgtgctgtcccccaatgccacgctagcactgacggcgggcgtgctggtggactcggccgtggaggtggccttcctgtgagtgactcgggggccggtttggggtgggcaccaggctcttgtcccagccccagcctcagccgagggacccccacatcacggggttgcttttctgagcctcggtttccctgtctgttgggaggtaactgggtgcacaggagccctgaggctgcacgggagccgggagaggcctcagcacagccgggtgggccctgaatggaggcccggggcgtgactgcagagtggagcctcggctgggtcccaagcaccccctgccccgccaccgcccacccctgtcccggttcactcactgcgtcccaccgccccggcaggtggacctttggggatggggagcaggccctccaccagttccagcctccgtacaacgagtccttcccggttccagacccctcggtggcccaggtgctggtggagcacaatgtcatgcacacctacgctgccccaggtgagggatgagggggtgagggggccactgcctttcaggctctgagcacggggtccccccagctccccagtcaagctgccccccttcctccccaacagccctcactgtgacctcacctgggctgatggcttaggcccctactggggtgagggaggggccaggcgtggggggagtggacagggaagctgggcccctgaactgcgccccccgccctccccgggcctggctcttgctgctctgctgccccgagtgcagctgcacttggaggcggtgccgtcctcgccaggcagccctcagtgctgctacacctgtgctccgtcccgcacgtggcttgggagcctgggacccttaaggctgggccgcaggtgcagccgttcaccccgggctcctcaggcggggggcttctgccgagcgggtggggagcaggtgggggtgccgcggctgccccactcgggcctgtccccacaggtgagtacctcctgaccgtgctggcatctaatgccttcgagaacctgacgcagcaggtgcctgtgagcgtgcgcgcctccctgccctccgtggctgtgggtgtgagtgacggcgtcctggtggccggccggcccgtcaccttctacccgcacccgctgccctcgcctgggggtgttctttacacgtgggacttcggggacggctcccctgtcctgacccagagccagccggctgccaaccacacctatgcctcgaggggcacctaccacgtgcgcctggaggtcaacaacacggtgagcggtgcggcggcccaggcggatgtgcgcgtctttgaggagctccgcggactcagcgtggacatgagcctggccgtggagcagggcgcccccgtggtggtcagcgccgcggtgcagacgggcgacaacatcacgtggaccttcgacatgggggacggcaccgtgctgtcgggcccggaggcaacagtggagcatgtgtacctgcgggcacagaactgcacagtgaccgtgggtgcggccagccccgccggccacctggcccggagcctgcacgtgctggtcttcgtcctggaggtgctgcgcgttgaacccgccgcctgcatccccacgcagcctgacgcgcggctcacggcctacgtcaccgggaacccggcccactacctcttcgactggaccttcggggatggctcctccaacacgaccgtgcgggggtgcccgacggtgacacacaacttcacgcggagcggcacgttccccctggcgctggtgctgtccagccgcgtgaacagggcgcattacttcaccagcatctgcgtggagccagaggtgggcaacgtcaccctgcagccagagaggcagtttgtgcagctcggggacgaggcctggctggtggcatgtgcctggcccccgttcccctaccgctacacctgggactttggcaccgaggaagccgcccccacccgtgccaggggccctgaggtgacgttcatctaccgagacccaggctcctatcttgtgacagtcaccgcgtccaacaacatctctgctgccaatgactcagccctggtggaggtgcaggagcccgtgctggtcaccagcatcaaggtcaatggctcccttgggctggagctgcagcagccgtacctgttctctgctgtgggccgtgggcgccccgccagctacctgtgggatctgggggacggtgggtggctcgagggtccggaggtcacccacgcttacaacagcacaggtgacttcaccgttagggtggccggctggaatgaggtgagccgcagcgaggcctggctcaatgtgacggtgaagcggcgcgtgcgggggctcgtcgtcaatgcaagccgcacggtggtgcccctgaatgggagcgtgagcttcagcacgtcgctggaggccggcagtgatgtgcgctattcctgggtgctctgtgaccgctgcacgcccatccctgggggtcctaccatctcttacaccttccgctccgtgggcaccttcaatatcatcgtcacggctgagaacgaggtgggctccgcccaggacagcatcttcgtctatgtcctgcagctcatagaggggctgcaggtggtgggcggtggccgctacttccccaccaaccacacggtacagctgcaggccgtggttagggatggcaccaacgtctcctacagctggactgcctggagggacaggggcccggccctggccggcagcggcaaaggcttctcgctcaccgtgctcgaggccggcacctaccatgtgcagctgcgggccaccaacatgctgggcagcgcctgggccgactgcaccatggacttcgtggagcctgtggggtggctgatggtggccgcctccccgaacccagctgccgtcaacacaagcgtcaccctcagtgccgagctggctggtggcagtggtgtcgtatacacttggtccttggaggaggggctgagctgggagacctccgagccatttaccacccatagcttccccacacccggcctgcacttggtcaccatgacggcagggaacccgctgggctcagccaacgccaccgtggaagtggatgtgcaggtgcctgtgagtggcctcagcatcagggccagcgagcccggaggcagcttcgtggcggccgggtcctctgtgcccttttgggggcagctggccacgggcaccaatgtgagctggtgctgggctgtgcccggcggcagcagcaagcgtggccctcatgtcaccatggtcttcccggatgctggcaccttctccatccggctcaatgcctccaacgcagtcagctgggtctcagccacgtacaacctcacggcggaggagcccatcgtgggcctggtgctgtgggccagcagcaaggtggtggcgcccgggcagctggtccattttcagatcctgctggctgccggctcagctgtcaccttccgcctgcaggtcggcggggccaaccccgaggtgctccccgggccccgtttctcccacagcttcccccgcgtcggagaccacgtggtgagcgtgcggggcaaaaaccacgtgagctgggcccaggcgcaggtgcgcatcgtggtgctggaggccgtgagtgggctgcaggtgcccaactgctgcgagcctggcatcgccacgggcactgagaggaacttcacagcccgcgtgcagcgcggctctcgggtcgcctacgcctggtacttctcgctgcagaaggtccagggcgactcgctggtcatcctgtcgggccgcgacgtcacctacacgcccgtggccgcggggctgttggagatccaggtgcgcgccttcaacgccctgggcagtgagaaccgcacgctggtgctggaggttcaggacgccgtccagtatgtggccctgcagagcggcccctgcttcaccaaccgctcggcgcagtttgaggccgccaccagccccagcccccggcgtgtggcctaccactgggactttggggatgggtcgccagggcaggacacagatgagcccagggccgagcactcctacctgaggcctggggactaccgcgtgcaggtgaacgcctccaacctggtgagcttcttcgtggcgcaggccacggtgaccgtccaggtgctggcctgccgggagccggaggtggacgtggtcctgcccctgcaggtgctgatgcggcgatcacagcgcaactacttggaggcccacgttgacctgcgcgactgcgtcacctaccagactgagtaccgctgggaggtgtatcgcaccgccagctgccagcggccggggcgcccagcgcgtgtggccctgcccggcgtggacgtgagccggcctcggctggtgctgccgcggctggcgctgcctgtggggcactactgctttgtgtttgtcgtgtcatttggggacacgccactgacacagagcatccaggccaatgtgacggtggcccccgagcgcctggtgcccatcattgagggtggctcataccgcgtgtggtcagacacacgggacctggtgctggatgggagcgagtcctacgaccccaacctggaggacggcgaccagacgccgctcagtttccactgggcctgtgtggcttcgacacaggtcagtgcgtggcagggccgtcctccatgcccctcacccgtccacacccatgagcccagagaacacccagcttgccaccagggctggcccgtcctcagtgcctggtgggccccgtcccagcatggggagggggtctcccgcgctgtctcctgggccgggctctgctttaaaactggatggggctctcaggccacgtcgccccttgttctcggcctgcagagggaggctggcgggtgtgcgctgaactttgggccccgcgggagcagcacggtcaccattccacgggagcggctggcggctggcgtggagtacaccttcagcctgaccgtgtggaaggccggccgcaaggaggaggccaccaaccagacggtgggtgccgcccgcccctcggccacttgccttggacagcccagcctccctggtcatctactgttttccgtgttttagtgctggtggaggccgcacgctctcccctctctgtttctgatgcaaattctatgtaacacgacagcctgcttcagctttgcttccttccaaacctgccacagttccacgtacagtcttcaagccacatatgctctagtggcaaaagctacacagtcccctagcaataccaacagtgaggaagagccccttcccaccccagaggtagccactgtccccagcccatgtccctgttgctggatgtggtgggccggttctcaccctcacgctcccctctctggaccggccaggaggcttggtgaccctgagcccgtggtggctgctcctgctgctgtcaggcggggcctgctggtgccccagagtgggcgtctgttccccagtccctgctttcctcagctggcctgattgggggtcttcccagaggggtcgtctgaggggagggtgtgggagcaggttccatcccagctcagcctcctgacccaggccctggctaagggctgcaggagtctgtgagtcaggcctacgtggcagctgcggtcctcacacccacacatacgtctcttctcacacgcatccccccaggggccctcagtgagcattgcctgcctcctgctagggtccagctgggtccagtacaccagaacgcacactccagtgtcctctgccctgtgtatgcccttccgccgtccaagttggaaggtggcaaaccggatgagtatcctgggagggagtgagctcaccggcagtggccaggcccctgggaaacctggagtttgggagcagcatcctccatgggtcccccagtccttccagcaggccaaatagacctgtgttggaggtaaccccactcccacgccaggtgctgatccggagtggccgggtgcccattgtgtccttggagtgtgtgtcctgcaaggcacaggccgtgtacgaagtgagccgcagctcctacgtgtacttggagggccgctgcctcaattgcagcagcggctccaagcgaggggtgagtgttgagcggggtgtgggcgggctggggatgggtcccatggccgaggggacggggcctgcaggcagaagtggggctgacagggcagagggttgcgccccctcaccaccccttctgcctgcagcggtgggctgcacgtacgttcagcaacaagacgctggtgctggatgagaccaccacatccacgggcagtgcaggcatgcgactggtgctgcggcggggcgtgctgcgggacggcgagggatacaccttcacgctcacggtgctgggccgctctggcgaggaggagggctgcgcctccatccgcctgtcccccaaccgcccgccgctggggggctcttgccgcctcttcccactgggcgctgtgcacgccctcaccaccaaggtgcacttcgaatgcacgggtgagtgcaggcctgcgtggggggagcagcgggatcccccgactctgtgacgtcacggagccctcccgtgatgccgtggggaccgtccctcaggctggcatgacgcggaggatgctggcgccccgctggtgtacgccctgctgctgcggcgctgtcgccagggccactgcgaggagttctgtgtctacaagggcagcctctccagctacggagccgtgctgcccccgggtttcaggccacacttcgaggtgggcctggccgtggtggtgcaggaccagctgggagccgctgtggtcgccctcaacaggtgagccaggccgtgggagggcgcccccgagactgccacctgctcaccacccccctctgctcgtaggtctttggccatcaccctcccagagcccaacggcagcgcaacggggctcacagtctggctgcacgggctcaccgctagtgtgctcccagggctgctgcggcaggccgatccccagcacgtcatcgagtactcgttggccctggtcaccgtgctgaacgaggtgagtgcagcctgggaggggacgtcacatctgctgcatgcgtgcttgggaccaagacctgtacccctgcctggagctttgcagagggctcatcccgggccccagagataaatcccagtgaccctgaagcagcaccccgaccttccgctcccagcagccacacccaccgggccctctccggcgtctgctttccacaatgcagcccccgcccaggagggcccatgtgcttaccctgttttgcccatgaagaaacagctcagtgttgtgggtcagtgcccgcatcacacagcgtctagcacgtaactgcaccccgggagtcgtgggcatctgctggcctcctgccggcctcctgcgctgctgacagcttgctgtgccccctgcctgccccagtacgagcgggccctggacgtggcggcagagcccaagcacgagcggcagcaccgagcccagatacgcaagaacatcacggagactctggtgtccctgagggtccacactgtggatgacatccagcagatcgctgctgcgctggcccagtgcatggtaggatggccccacctgctcaccctgccccgcatgcctgccagggcactgggttcagccccccagggcagacgggcagcttggccgaggagctgagcctccagcctgggctccttcctgccatggcgttcctcggtctctgacctgcttcagtagcctcagccgttctgtcctgtgtgaacgcagggtgcctctcgggggacccagggtgtaaagaggggcccagatgtggggagggactaagaagatgctgctctgtgccctccactctcccctcccctcccctcccccttccctcccctagcccctcccctcctcccctcccctagcccttcccctcctcccctcccctagccctttcccttcttcccccccagcccttcccctcctcccctcccctttttctccactcccctctcctctctcccctcctcctccgctctcatgtgaagaggtgccttgtgtggtcggtgggctgcatcacgtggtccccaggtggaggccctgggtcatgcagagccacagaaaatgcttagtgaggaggctgtgggggtccagtcaagtgggctctccagctgcagggctgggggtgggagccaggtgaggacccgtgtagagaggagggcgtgtgcaaggagtggggccaggagcggggctggacactgctggctccacacaggggcccagcagggagctcgtatgccgctcgtgcctgaagcagacgctgcacaagctggaggccatgatgctcatcctgcaggcagagaccaccgcgggcaccgtgacgcccaccgccatcggagacagcatcctcaacatcacaggtgccgcggcccgtgccccatgccacccgcccgccccgtgcggccctttcctctgcctccctcctccccccaaccgcgtcgcctttgccccatcccatcttcgtccccctcccctccccccaattcccatcctcatccccctcccccaattcccattctcctccccctcccccttccctattaccatcccttttctccatctctctccccttttctccatttccccccccgtcctccccgtccttttgtccattcccctcatcttcctcatccccctcatcccccttcccctcccttatcccccttcccctccctttccccctgctcctcttcttctcccttctcttttctctacccttttccttcctttttcctccctctccccatcatccccctcatcttcgtcctcatccccatcaccttccccctcccccctccaccactctctctccagcttcccccttccttctgcctgcacctcgctctctgccccctcaggttccccctttctcccagcccccaccctccggctccccctttttgcctgcccccaccctccctctacctccctgtctctgcactgacctcacgcatgtctgcaggagacctcatccacctggccagctcggacgtgcgggcaccacagccctcagagctgggagccgagtcaccatctcggatggtggcgtcccaggcctacaacctgacctctgccctcatgcgcatcctcatgcgctcccgcgtgctcaacgaggagcccctgacgctggcgggcgaggagatcgtggcccagggcaagcgctcggacccgcggagcctgctgtgctatggcggcgccccagggcctggctgccacttctccatccccgaggctttcagcggggccctggccaacctcagtgacgtggtgcagctcatctttctggtggactccaatccctttccctttggctatatcagcaactacaccgtctccaccaaggtggcctcgatggcattccagacacaggccggcgcccagatccccatcgagcggctggcctcagagcgcgccatcaccgtgaaggtgcccaacaactcggactgggctgcccggggccaccgcagctccgccaactccgccaactccgttgtggtccagccccaggcctccgtcggtgctgtggtcaccctggacagcagcaaccctgcggccgggctgcatctgcagctcaactatacgctgctggacggtgcgtgcagcgggtggggcacacgcggccccctggccttgttcttggggggaaggcgtttctcgtagggcttccatgggtgtctctggtgaaatttgctttctgtttcatgggctgctgggggcctggccagagaggagctgggggccacggagaagcaggtgccagctctggtgcagaggctcctatggcctttcaggcccgtggcagagggtgggctcaggagggccatcgtgggtgtcccccgggtggttgagcttcccggcaggcgtgtgacctgcgcgttctgccccaggccactacctgtctgaggaacctgagccctacctggcagtctacctacactcggagccccggcccaatgagcacaactgctcggctagcaggaggatccgcccagagtcactccagggtgctgaccaccggccctacaccttcttcatttccccggggtgagctctgcgggccagcctggcagggcagggcagggcatcatgggtcagcattgcctgggttactggccccatggggacggcaggcagcgaggggactggaccgggtatgggctctgagactgcgacatccaacctggcggagcctgggctcacgtccgctaccccttccctgcccaggagcagagacccagcggggagttaccatctgaacctctccagccacttccgctggtcggcgctgcaggtgtccgtgggcctgtacacgtccctgtgccagtacttcagcgaggaggacatggtgtggcggacagaggggctgctgcccctggaggagacctcgccccgccaggccgtctgcctcacccgccacctcaccgccttcggcgccagcctcttcgtgcccccaagccatgtccgctttgtgtttcctgtgagtgaccctgtgctcctgggagcctctgcagagtcgaggagggcctgggtgggctcggctctatcctgagaaggcacagcttgcacgtgacctcctgggcccggcggctgtgtcctcacaggagccgacagcggatgtaaactacatcgtcatgctgacatgtgctgtgtgcctggtgacctacatggtcatggccgccatcctgcacaagctggaccagttggatgccagccggggccgcgccatccctttctgtgggcagcggggccgcttcaagtacgagatcctcgtcaagacaggctggggccggggctcaggtgaggggcgcagcggggtggcagggcctcccctgctctcactggctgtgctggttgcaccctctgggagtgagtctcgtcgcaggcgtcagaacaaggcagtttttgcagtgctgtgtgaagggctcgtgtgttcatcctgggaatgacctcgtgagcactcactgtccctgaggactaggacagctcctagctggaagtaggtgccagtcagtcagggtgggcagcccacgttctgcacagtagcgtggccccacaagtgacgtgagcatcgctaccactgtgggagactgtgcatccacccgcgatcctgactgcatagctcgtctctcagacggaggcgccagcaccctccccgtggctgtttcttcagtacctccattttcctttcattggaattgcccttctggcattccctttttgttttcgtttttctttttttagagacggagtctcactctgttgcccaggctggagtgcaatggcatgatcttggctcacagcaacttccagctcccgggtttaagccattccccttaagcgattctcctgagtagctgggagtacaggtgcacaccaccacacccagttaatttttcaccatgtcagccaggcgaactcctgacctcaggtgatccgcctgcctcggcctgccagagtgctgggatgacaggtgtgagccaccacacctggctgtgttcccattttttatctctgtgctgctttcctcttcattgcccagttctttcttttgattacctacttttaaaaactgtcggccgggcgcggtggctcacacctgtaatccgagcactttgggaggccaggcaggcaaatcacggggtcaggagatcgagaccatcctggctaacggtgaaaccctgtctctaataaaaagtacaaaaaaattagcccggcgtagtggcaggcgcctgtagtcccagctccttgggagactgaggcaggagaatggcgtgaacccgggaggcggagcttgcagtgagctgagattgcgccactgcactccagcctgggtgacacagcaagactccatctcaaaaaaaaaagaaaaaaaatactgtcacctgggtctgtcactgggagaggaggtgacacagcttcacgctttgcagtctgtgcatgaactgagggacgggtgtgtggtgcgggtcaccggttgtggcatgactgaggcgtggacaggtgtgcagtgcgggtcactggttgtggtgtggactgaggcgtgtgcagccatgtttgcatgtcacaagttacagttctttccatgtaacttaatcatgtccttgaggtcctgctgttaattggacaaattgcagtaaccgcagctccttgtgtatggcagagccgtgcaaagccgggactgcctgtgtggctccttgagtgcgcacaggccaaagctgagatgacttgcctgggatgccacacgtgttgggcagcagaccgagcctcccacccctccctcttgcctcccaggtaccacggcccacgtgggcatcatgctgtatggggtggacagccggagcggccaccggcacctggacggcgacagagccttccaccgcaacagcctggacatcttccggatcgccaccccgcacagcctgggtagcgtgtggaagatccgagtgtggcacgacaacaaaggtttgtgcggaccctgccaagctctgcccctctgcccccgcattggggcgccctgcgagcctgacctccctcctgcgcctctgcagggctcagccctgcctggttcctgcagcacgtcatcgtcagggacctgcagacggcacgcagcgccttcttcctggtcaatgactggctttcggtggagacggaggccaacgggggcctggtggagaaggaggtgctggccgcgagtaaggcctcgttccatgttcccactccgtgggaggttgggcagggtggtcctgccccgtggcctcctgcagtgcggccctccctgccttctaggcgacgcagcccttttgcgcttccggcgcctgctggtggctgagctgcagcgtggcttctttgacaagcacatctggctctccatatgggaccggccgcctcgtagccgtttcactcgcatccagagggccacctgctgcgttctcctcatctgcctcttcctgggcgccaacgccgtgtggtacggggctgttggcgactctgcctacaggtgggtgccgtaggggtcggggcagcctcttcctgcccagcccttcctgcccctcagcctcacctgtgtggcctcctctcctccacacagcacggggcatgtgtccaggctgagcccgctgagcgtcgacacagtcgctgttggcctggtgtccagcgtggttgtctatcccgtctacctggccatcctttttctcttccggatgtcccggagcaaggtgggctggggctggggacccgggagtactgggaatggagcctgggcctcggcaccatgcctagggccgccactttccagtgctgcagccagagggaaaggcgtccaccaaaggctgctcgggaagggtcaacacacttgagcagccttagctagactgaccagggagaaagagagaagactcagaagccagaatggtgaaagaacgagggcactttgctaagcagacgccacggacgactgcacagcagcacgccagataactcagaagaagcaagcacgcggctgtgcacgcttccgaaatgcactccagaagaaaatctcagtacatctataggaagtgaagaggctgagttagtcccttagaaacgtcccagtggccgggccgggtgtggtggctcacgcctgtaatcccaacacttcaggtggccgaggtgggcggatctgagtccaggagtttgagaccagcctgggcaacatagcaagaccccatctatataaaacattaaaaagggccaggcgcggtggctcacgcctgtaatcccagcactttgggaggccgaggcgggcagatcacttgaggtcaggagttcgagaccagcctggccaacacaatgaaaccccgactctactacaaatacaaaaacttagctgggcatggtggcgggcgcctgtagtcccagctactcgagaggctgaggcaggagaatggcatgaacccaggaggcggagcttgcagtgagccgagattgcgccactgcactccatcctgggcaacggagcaagactccatctccaaaaaaaaaaaaaaaaaatcccacaaagaaaagctcaggctcagagccttcacgatagaatttttctaagcagttaaggaagaattaacaccaatccttcacagactctttccaagaatacagcaggtgggaacgcttcccattcatacggaaacgggaggccgcaccccttaggaatgcacacgtggggtcctcaagaggttacatgcaaactaaccccagcagcacacagagaaggcgcataagccgcgaccaggaggggttgctcccgagtccgtggcaggaaccagaggccacatgtggctgctcgtatttaagttaattaaaatggaacgatggccgggtgtggtggctcacacctgtaatcccagcactttgggaggcggaggcgggcagatcacttgaggtcaggagttccaagaccagcctggccaacacagtgaaaccccgtctctactaaaaatacaaaaaattagctgggcatggtggcaggcacctgtaatcccagctactcaggaggctgagccaggacaatcgcctgaacgcgggaggtggaggttgcagtgagctgagattgcgccattgcactccagcctgggtgacagcgagactccatctaaaaaagaaaatatgaaatttaaaactctgttccttagctgcaccagtctgctgtcaagtgttcagtggcacacgtcgcgaggggctgccatcacggacggtgcagatgtcccatatatccagcattctaggacattctgtcagatggcaccgggctctgtcctgtctgctgaggaggtggcttctcatccctgtcctgagcaggtctgagctgccgcccgctgaccactgccctcgtcctgcaggtggctgggagcccgagccccacacctgccgggcagcaggtgctggacatcgacagctgcctggactcgtccgtgctggacagctccttcctcacgttctcaggcctccacgctgaggtgaggactctactgggggtcctgggctgggctgggggtcctgccgccttggcgcagcttggactcaagacactgtgcacctctcagcaggcctttgttggacagatgaagagtgacttgtttctggatgattctaagaggtgggttccctagagaaacctcgagccctggtgcaggtcactgtgtctggggtgccgggggtgtgcgggctgcgtgtccttgctgggtgtctgtggctccatgtggtcacaccacccgggagcaggtttgctcggaagcccagggtgtccgtgcgtgactggacgggggtgggctgtgtgtgtgacacatcccctggtaccttgctgacccgcgccacctgcagtctggtgtgctggccctccggcgagggaacgctcagttggccggacctgctcagtgacccgtccattgtgggtagcaatctgcggcagctggcacggggccaggcgggccatgggctgggcccagaggaggacggcttctccctggccagcccctactcgcctgccaaatccttctcagcatcaggtgagctggggtgagaggagggggctctgaagctcacccttgcagctgggcccaccctatgcctcctgtacctctagatgaagacctgatccagcaggtccttgccgagggggtcagcagcccagcccctacccaagacacccacatggaaacggacctgctcagcagcctgtgagtgtccggctctcgggggaggggggattgccagaggaggggccgggactcaggccaggcagccgtggttcccgcctggggtagggtggggtggggtgccagggcagggctgtggctgcaccacttcacttctctgaacctctgttgtctgtggaaagagcctcatgggatccccagggccccagaaccttccctctagggagggagcaggctcatggggctttgtaggagcagaaaggctcctgtgtgaggctggccggggccacgtttttatcttggtctcagagcagtgagaaattatgggcgggtttttaaataccccatttttggccgggcgcggtggctcacacgtgtaatcccagcactttgggaggccgaggtgggcagatgacctgaggtcagcagttcgagaccagcctggccaacatggcgaaaccccgtctctactaaaaatacaaaaaattagccgggcatgctggcaggcgcctgtagtcccagttactcgggagactgaggtaggagaatcgattgaacctggtaggtgaaggttgtagtgagccgagatcgcgccactgcactccagcctgggcaacaagagcgaaactccgtctcaaaaacaaaaaaattcctcaatttcttggttgttttgtaacttatcaacaaatggtcatatagaggttaccttgtatgtagtcacgcacatagtcacgcacatggcagccggcggcggagcgcacccacggcgtgttcccacgcgtgtgaccccgggctctgccatgccctcctatgctcaggtgtgctgaggtccacacggccctgccgttgcactgcagctgcctgcaggattcagtgcagtggcatgcagtgcaggtgcggtgccccggagccacaggccacaccacagggcctgcatgcacaggggctgcggtgtctgggtttgggtaactacgccctgtgacatttgcacagcaacagaattacctaatgacgcatttctcagaacacatccctggcactaagtggtgcgtgactgctgcttttgcatccacatctagtttgatttgtgtgttattcctttgagtgcttctcattgttaagcaaccaagaactaaagaggtatgaactgcccctggactcaaacaaaaaggaaaacttcctgatttacaaaaggcagataaccatcacatgagggcatctttatgaataaattgctggttggttttaaaaatacagagtatggggaaatccaggggtagtcactacatgctgaccagccccaggtatctccggcccaaagctctgtgaaatccagattcagtgcttccgcggggatttctgacggcagctcagactccgcatccacacagagcgcgtggccctcaccctcccggcttcctcaacccttggccgtcccttgctcggacagtgcttcgggctgaccaggtcggaggcttgggtttgtcctggacccctctgcgtccttcctcactgcagcctccagcgcgtcccgtggctcctttcccaacgcagagcacggccttccctgcgcctgagcctgcaccctccgtcctggcggcgcctctgccctggcattccctgccactccatgcctccctattggccattctccgtctctgccagcgagagcctgctccctgagtcagaccctgagtcatttgtgttgctataaaggaatagttgaggctgggttattttttatttttatttatttttttgagatggagtctctgttgcccagactggagtgcagtcgcatgatctcggctcactgcaaagtctgcctcccacgttcaagcagttatctgcctcagcctcccaagtagctaagattacaggcgcccgccgccacagccggctaattttttgtgtgtgtgttttagtagagaggaggtttcaccatcttagccaggctggtcttgaactcctgacctcgtgatccacccatctcagcctcccaaaatgctgagattacaggcgtgagccaccacgcctgaccaagttgaggctaggtcattttttaattttttgtaaagacagggtctcactgtctccaactcctgagctcaagtgatcctcctgcctcagcctcctgaagtgctgggattacaggcttgagacactgcgcccagccaagagtgtcttttatcctccgagagacagcaaaacaggaagcattcagtgcagtgtgaccctgggtcaggccgttctttcggtgatgggctgacgagggcgcaggtacgggagagcgtcctgagagcccgggactcggcgtctcgcagttggtctcgtcctccccctcaacgtgtcttcgctgcctctgtacctcttctctagcagctctgggaccgggcatatcagcatggtggcccgatgcagtggcacagcctcggtggtcactggctcctggagacacaagcagatctctggcctcagggagccctacacactgttgggatttgaaaggcattcatatgtttccttgtccagaagttaattttaggccataaacctgcatgggacagacacactggcgtctctagattgtagagatgcttgttggatggttgagacccaatcatagtttgcagggttgaaggggggctcattgcaccctgagagactgtgcactgctgtaagggcagctggtcaggctgtgggcgatgggtttatcagcagcaagcgggcgggagagggacgcaggcggacgcctgacttcggtgcctggagtggctcttggttccctggctcccagcaccactcccactctcgtttggggtagggtcttccggctttttgtcggggggaccctgtgacccaagaggctcaagaaactgcccgcccaggttaacatgggcttggctgcaactgcctcctggaggccgggatgaattcacagcctaccatgtccctcaggtccagcactcctggggagaagacagagacgctggcgctgcagaggctgggggagctggggccacccagcccaggcctgaactgggaacagccccaggcagcgaggctgtccaggacaggtgtgcttgcgtagccccgggatgcccctagcccctccctgtgagctgcctctcacaggtctgtctctgcttccccaggactggtggagggtctgcggaagcgcctgctgccggcctggtgtgcctccctggcccacgggctcagcctgctcctggtggctgtggctgtggctgtctcagggtgggtgggtgcgagcttccccccgggcgtgagtgttgcgtggctcctgtccagcagcgccagcttcctggcctcattcctcggctgggagccactgaaggtgagggggctgccaggggtaggctacaggcctccatcacgggggacccctctgaagccaccccctccccaggtcttgctggaagccctgtacttctcactggtggccaagcggctgcacccggatgaagatgacaccctggtagagagcccggctgtgacgcctgtgagcgcacgtgtgccccgcgtacggccaccccacggctttgcactcttcctggccaaggaagaagcccgcaaggtcaagaggctacatggcatgctgcgggtgagcctgggtgcggcctgtgcccctgccacctccgtctcttgtctcccacctcccacccatgcacgcaggacactcctgtccccctttcctcacctcagaaggcccttaggggttcaatgctctgcagcctttgcccggtctccctcctaccccacgccccccacttgctgccccagtccctgccagggcccagctccaatgcccactcctgcctggccctgaaggcccctaagcaccactgcagtggcctgtgtgtctgcccccaggtggggttccgggcagggtgtgtgctgccattaccctggccaggtagagtcttggggcgccccctgccagctcaccttcctgcagccacacctgccgcagccatggctccagccgttgccaaagccctgctgtcactgtgggctggggccaggctgaccacagggcccccccgtccaccagagcctcctggtgtacatgctttttctgctggtgaccctgctggccagctatggggatgcctcatgccatgggcacgcctaccgtctgcaaagcgccatcaagcaggagctgcacagccgggccttcctggccatcacgcggtacgggcatccggtgcactggtctgtcttctgggctttagttttgcctttagtccagccagaccctaggggacatgtggacatgtgtagatacctttgtggctgctagaactggaggtaggtgctgctggcatcagtaggcagaggggagggacacaggtccgtgtcttgcagtgcacaggacgggcccatgacagacaactgtctgccccagaacatccccaggataaggctgagaagcccaggtctagccgtggccagcagggcagtgggagccatgttccctgggtctctggtggccgctcactcgaggcgggcatggggcagtaggggctggagcgtgtgactgatgctgtggcaggtctgaggagctctggccatggatggcccacgtgctgctgccctacgtccacgggaaccagtccagcccagagctggggcccccacggctgcggcaggtgcggctgcaggaaggtgagctggcagggcgtgccccaagacttaaatcgttcctcttgttgagagagcagcctttagcggagctctggcatcagccctgctccctagctgtgtgacctttgccctcttaacaccgccgtttccttctctgtatatgagagatggtaacgttgtctaattgatggctgctgggagggttccctggggtggcgccgaaccagagctcaggcgagctggccagcaggaaacactcctgttgggttttgatgaggccctggccccggcctggggctctgtgtgtttcagcactctacccagaccctcccggccccagggtccacacgtgctcggccgcaggaggcttcagcaccagcgattacgacgttggctgggagagtcctcacaatggctcggggacgtgggcctattcagcgccggatctgctggggtgagcagagcgagggccccgggcgtctacgccaaggacaagggagtagttctccaggagtgccgcggcctcctgaccagcctggctccggggtgccggaagggctggggtgcggcacccacgccacccctctccggcagggcatggtcctggggctcctgtgccgtgtatgacagcgggggctacgtgcaggagctgggcctgagcctggaggagagccgcgaccggctgcgcttcctgcagctgcacaactggctggacaacaggtgggagctccctcccctgccctctccggggtggccgcagtcaccagccaggagcccaccctcactcctccggcccccgctggcctaggcggcttccacagcccctcagccacgcctgcactgcgcggtccccgcagctcccgccctgccacccgctcctactgacccgcaccctctgcgcaggagccgcgctgtgttcctggagctcacgcgctacagcccggccgtggggctgcacgccgccgtcacgctgcgcctcgagttcccggcggccggccgcgccctggccgccctcagcgtccgcccctttgcgctgcgccgcctcagcgcgggcctctcgctgcctctgctcacctcggtacgcccgtccccggccagaccccgcgcctcccaccggcagcgtcccgccccctcgcggggccccgccccggcagcgtctcacccctcgcagcgccccgccccctcgcagcgtcccgccccctcgcagggccccgccccggcagcgtcccgccccctcgtagggccccgccccggcagcgtcccgccccctcgcagggccccgccccggcagcgtccctcccgccctcctgaccgcgccccccacaggtgtgcctgctgctgttcgccgtgcacttcgccgtggccgaggcccgtacttggcacagggaagggcgctggcgcgtgctgcggctcggagcctgggcgcggtggctgctggtggcgctgacggcggccacggcactggtacgcctcgcccagctgggtgccgctgaccgccagtggacccgtttcgtgcgcggccgcccgcgccgcttcactagcttcgaccaggtggcgcagctgagctccgcagcccgtggcctggcggcctcgctgctcttcctgcttttggtcaaggtgagggctgggccggtgggcgcggggctgggcgcacaccccagggctgcaagcagacagatttctcgtccgcaggctgcccagcagctacgcttcgtgcgccagtggtccgtctttggcaagacattatgccgagctctgccagagctcctgggggtcaccttgggcctggtggtgctcggggtagcctacgcccagctggccatcctggtaggtgactgcgcggccggggagggcgtcttagctcagctcagctcagctgtacgccctcactggtgtcgccttccccgcagctcgtgtcttcctgtgtggactccctctggagcgtggcccaggccctgttggtgctgtgccctgggactgggctctctaccctgtgtcctgccgagtcctggcacctgtcacccctgctgtgtgtggggctctgggcactgcggctgtggggcgccctacggctgggggctgttattctccgctggcgctaccacgccttgcgtggagagctgtaccggccggcctgggagccccaggactacgagatggtggagttgttcctgcgcaggctgcgcctctggatgggcctcagcaaggtcaaggaggtgggtacggcccagtgggggggagagggacacgccctgggctctgcccagggtgcagccggactgactgagcccctgtgccgcccccagttccgccacaaagtccgctttgaagggatggagccgctgccctctcgctcctccaggggctccaaggtatccccggatgtgcccccacccagcgctggctccgatgcctcgcacccctccacctcctccagccagctggatgggctgagcgtgagcctgggccggctggggacaaggtgtgagcctgagccctcccgcctccaagccgtgttcgaggccctgctcacccagtttgaccgactcaaccaggccacagaggacgtctaccagctggagcagcagctgcacagcctgcaaggccgcaggagcagccgggcgcccgccggatcttcccgtggcccatccccgggcctgcggccagcactgcccagccgccttgcccgggccagtcggggtgtggacctggccactggccccagcaggacaccccttcgggccaagaacaaggtccaccccagcagcacttagtcctccttcctggcgggggtgggccgtggagtcggagtggacaccgctcagtattactttctgccgctgtcaaggccgagggccaggcagaatggctgcacgtaggttccccagagagcaggcaggggcatctgtctgtctgtgggcttcagcactttaaagaggctgtgtggccaaccaggacccagggtcccctccccagctcccttgggaaggacacagcagtattggacggtttctagcctctgagatgctaatttatttccccgagtcctcaggtacagcgggctgtgcccggccccaccccctgggcagatgtcccccactgctaaggctgctggcttcagggagggttagcctgcaccgccgccaccctgcccctaagttattacctctccagttcctaccgtactccctgcaccgtctcactgtgtgtctcgtgtcagtaatttatatggtgttaaaatgtgtatatttttgtatgtcactattttcactagggctgaggggcctgcgcccagagctggcctcccccaacacctgctgcgcttggtaggtgtggtggcgttatggcagcccggctgctgcttggatgcgagcttggccttgggccggtgctgggggcacagctgtctgccaggcactctcatcaccccagaggccttgtcatcctcccttgccccaggccaggtagcaagagagcagcgcccaggcctgctggcatcaggtctgggcaagtagcaggactaggcatgtcagaggaccccagggtggttagaggaaaagactcctcctgggggctggctcccagggtggaggaaggtgactgtgtgtgtgtgtgtgtgcgcgcgcgcacgcgcgagtgtgctgtatggcccaggcagcctcaaggccctcggagctggctgtgcctgcttctgtgtaccacttctgtgggcatggccgcttctagagcctcgacacccccccaacccccgcaccaagcagacaaagtcaataaaagagctgtctgactgcaa

SEQ ID NO: 1233 - DNA, 103284 bp, Homo sapiens
gccacgagcgtggcgggcccgcgggcggcggccacggagcgcgcgaagccctgcagcgcctcgcacttgccgcgcagcgcgtcgagctccaggcgcatggcggcgttctcgcgcgccagcttgtccacctcgcgctccagctccgacttctgcttctgcagctcctccttctggcacacgcgcttcacgcggcagctggcggcgtagccacggtttttgagtgtgcggcgccgctgcttgagccgtgtcacctcctcggcggagagcccgcgcagatgccggttcagctcgcgcaccgacagccccatcagcgcctcgtccgacaggtgcggcgtgttctcgctcagctctcgcttgatctgcgggcatgaggaaactgaggtccaggggactggggacgggcccccccgctccacccgcggtgttcctctttcaccgccttagccgccgaggtggtgggtggacttgatccaaaaccccgaaggggagcaggaatccgggaaggggaaaccgggccagactaggatcgggacacaaaaggaggccaccccggggctcagcctgaattctaacctagcgccaagccctggactcagccagagaaacccaggtcggaaagcacctttgaatgccccaggggacattgacccgatggggaaggaggcctggagagggaagtgacctaccccagggacatgcagcctgtgaccagagcccaggcctcctggtcccagcccatggctgtggcccttccctttggcatcatgaaggcctggtgcctgctgagccacccaggggattccaggaaagaaggggaagttgggatgaggaggctctgcatgggcagggagggagggcttcactgggttgacagaggctgcctcctcacctttagagctttgctggataggggatccacagacatgtttgcagaaggtgccctctgggctgcagacctagggtagaaaggaggtcaaagtcactgttttgtttttggtttcccatttagaataaaatccaaactcactaccttgccattcaaggcctctgctatcttagaactgattcatacctgccaccttcctctctccacattggtccacaggcctccttgaatggctccttccagccgcgggagctgtgcacaggctgtgctctttactgttctagccccatggtgactcctcatcatttaggtctttgcccaatgtcacctcctcaggaggtcctctttgaccattctggctaaacgcctctgtgtcacatcacataaccccgcctattaacccttgtaacagtcacctcttctgcatttctcatgcttggttcctcatctatgatttgtttctccttcccactcctcctccaccaaaacggaagccaatgaaggcagaggccttccctgtctcaccacggcatcaatatgcctaaatcagtgcctggtatatagtagatggctcagtaagtgtgcaccaaatgaatagatgtgcctctcctgaccattcttccacatggggcttggacatgtgcctttgatttgatttttcagaacttttctttctctttttctttctttctttttttttttttttttttttttttgagacagagtctcactctgtcacccaggctggagtgcaggggcgcgatcttggctcactgcaacctccgcctcccgtgttcaagggattctcctgcctcagcctcccaagtagctgggattacaggtgcctgtcaccacgcccagctaattttttgtatttttagtttatttttatttttagagacagggtttcgccatgttggccaggctggttttgaactactgacctcaggtgatccacccgcctcagcctcccaaagtgctggacaggtgtgagccactgtgcccagccaatttttcagaacttttcttaaagtataacctacatacagaaaagtacacacagcatatgtgcaccagtaaatgcctttacacaaagcccatccagcaccccgtaagatacaacatcagccagtcccctctctccccaggcctccttcatctagacctctgttttgggaaagttttcccaacctcctgggggctgccccatactaactcagcatgccctaggcagatggggcagccatccctagaccaatgagggcctctcatctcctaatcctccctcccacaggcctgacagccacatgctccttcaacaactatttattgagctctttgccaaacatgtacttggtaatggggagaaaaaggtgaataaaactcgtggagggtcagtggtcattgctctgggctggagaaggggaccatctcccaaagtcccctttaaagcagcagtcctctctgtctctagctgataggatctactttgccaatcctctcaggttctccgccatgagaacctgagttttctcatctgtctccaaggggagggggcagtgataagaagccaaggaaaataaaggaagataggctgggcgcggtggctcacgcctgtaatcccagcactttaggaggctgagacgggcagatcacctcagttcaggagttcaagaccagcctggccaacatggcaaaaccctgtctctaccaaaaacacaaaaattagcccaggcgtggtggtgcatgcctgtagtcccagctatttgagaggctgaggcaggagaattgcttaaacctgggaggtggaggttacagtgagccgagattgcgccactgcactccagcctgggagcctgggtgacagagtgagactccatctcaaaaaaaataaataaataaaaagaaaacaaaggaagatgctttgtgatctgagctgtagcatcctataaacacgtaccgtatcggaaagagcatcacccagttttgtggacagcagagggcaaaagccagatccaagtcctggttccttgagctgtctacagggttgacctcacgggttggctcagcctctgacacattctggcaggaccggggtgtctcccagggacaaggtgcagaaatggaaagcacatggaccttggtgccagacacacctggggccttttgggggtggtctcgctctctagttgtgtggttctgataggtcagccactctttctgtgcctcactttccccctgggtgacacaggtagctgtgttaagtcagctcatgtcacacctctctcaggaccttcccacggctcactggagtaaagccagagttgtcaccatggcccacaaagtgctgcagaaagtgatccccagtggccgggcgcggtggctcacgcctgtaatcccagcactttgggaggccaaggcgggtggatcatgaggtcaggagatcgagaccagcctggccaacatggtgaaaccccgtctctactaaaaatacgaaaattagccgggcgtggtggcacgtgcctgtagtcccagctacttgggaggctgagacaaaagaatcgcttgaacccgggaggcggaggttgcagtgagccaagattgtgccactgcactccagcctgggcgagagtgagactccgtctgaaaaaaaaaaaaaaaagaaagtgctccccagcatcccttctccaacctcagccctacttggcttccttttgtttcccctgcctcagccacacccgcccttcctcaacacaggatgcacgctcctctccagggcctttgcactggctggtccctctgctggcgtttttgtttttgtttttgttttttatacagggtctcactcactccgttacaggctggagtgcagtgacacgatcacagctcattgcagcctcaaactcccaggctcaagtggtcctcctacctcagcctccctagtagctggaactataggtgcatgccaccacacctggccaatttttgtactttttgtacagacagagtttcatcatgttgcccaggctggtcttgaactccttggctcaagcgatccgcctgcctccgcctcccaaagtgttgggattataggcatgagccacgacgcatggcctctgttggcatccttgttccctagatatccacaaagtttgctccatcacctcctgaggtctcttcaaatctcatgttcactcagtttagaatttgcaacccctgatacacacacggacacacacacacacacacacacacacacacacacacactccctgtgtcccttccccacctcaggtttccccatgtgtaattgtcatcactcacatatatggtggttatttgttcagtgtctgtccctcccaaccccccgattagaatgccagctccatgagggcagaacttatacctgattcaccgcggcctcccccatgcctagaaccgcgcctggcacctcgcagatactcaaggaatccttgctgagttctcagtgtgactcaggccaaggtggggacagtccagggcttctcaggaaactccccagctcctcccagcccacacagtcagggggtctggcagctcacagggaaggaaggagtgggacagaaggaagttggcgcttgcagagatcccctgacaggggcagccactgtggcccttaagcaggagagtcttaggggtcacccaggtttcgctgggggtagctgggtggacccagagtgccaggtcaggacccaggcagctttagacccctgtgcggatccacggtgaagaccagtggcttcatggggtgacccctgagctgcgaccccccactgctgaacatgccggcttagcctgggctctggcctcagtttccctgcctagcactccaaatcctagggggctcaggccctggctgcccacctagctctccttgggggcctctgtgcactcccatcctacctggaaaagtcatatgagatctgctggctaccctgacctttcagatactatctggagacgtttacatgtcaacctcaccgatcctacctttcaatgcaggccttttttttttcccttttttttttttttttttttttgagatggagtctcgctctgtcgcccaggctggagtgcagtgacaggatctcagctcactgcaacctccgcctcctgggttcaagcgattagctctgcctcagcctcctgaatagctgggactacaggcgcctaccaccacgcccagctaatttttgtatttttagtagagacagagtttcaccatattggtcaggctggtctcgaactcctaacctcaggtgatccacctgcctcggcctcctgaagtgccgggattacaggtgtgagccaccacgcccaacccaatgcaggcctcttaagtggtcaccctcaccaccctacacacacctggggaggtcccagcacacctccctgctggtctcagctcattcccacacagcagctggacaatctttgcaccacgcgaatctgaccatgccaccagccagattaaagccttccatggttcggctgggcaaggtggctcatgcctataatcccagcactttaggaggctgaggcgggcggatcacaaggtaaggagattgagaccatcctggctaacatggtgaaaccccgtctctactaaaaaatacaaaaaattagccgggtgtggtggcaggcacctgtagtcccagctatcaggaggctgaggcaggagaatggcgtgaacccgggaggtgaagcatgcagtgagccgagatcgcgacactgcactccagcctgggcgacagagtgatactccatctcaaaaacaaacacaaaaacaaacaagcaaacaaaaaaaaaaccttccatggttccctactatcctaaggatggagtccagacccaccctcccagcaccccaggccctgtgtgtccagccccacgcccatttcccaccactgccacctccactctgtgctccagccacacagaatttctttcacttcctcccacccgcgctttcttgcctctgagccacctcccaccccatgatatttctctcccctcactcccctctactttgtttggcagactcctactcatccttcggccctgggtgcagacatctcctcctccaggaagccctccctgatccctaggacttgttagggacccccacccctgtgtgtaatgggttgtatttccttgctgtctctccaccagacagggagaggctgagtcagctctgggtgcttgaggccacccatctcaagacctggcagggagcaggcactggggaagggtggatggtcagagtctctgacgccatcacccagcttgtcaccaagccgggttccaagccgaaacgtagttcagtacctcctggccctgtctctaattcttcctcctctccagctgcttccttgggcctgttggcagagacagtacagatgctaggcgaatgggaagagagcagaggggatcccatccacgtgactttgggcccaaaggtggggtgtgggaaacagggaaaggagcactggattgggagtcaagcttgggtttaagtcgcatctctgttttctcaggctgtgtgacctggggtgagccactccatctctctgggtctccactttcccatctaaaggatcggaacaatacctgcctcgcagggttttggtggaatcaagtggtatacactgtagaggtcagtgagcagctgggaggttagaattgctgtctgtccaggaggggtcaggcctgtagccagcactggggtctcgctctgatttagcatctcccagctggctggggtcacacagggaactgcaggaaaggcccttagaggccatcaggtcctgcctcctccctttacccaaggggaggtagagacccagagaggggcagcacttgcctgaagtcacacaataggtgtgaatgaatagctgcaaaggcccaggactgaaacctggtcccttcacaccgtcacctccctggttcgcccaaccctgaggtaatgcccagagaggacaatagagtagtccaggctcatacagccagcatggggtagaattcaggcctgagagttcaagaccaacctgggcaagatggctagactccatctccaaaaaataaaaagattagccgggtgcagtggtgcacacctatagccccagctactcaggaggctgaggcaggaggaaccattgagcccaggaattcaaggcggcagtgagctgtgatcccgccactgcactccctgggtgacaaagcaagaccccgcctcttaaaaaaaaaattagccgggtgtggtggtgggcgcctgtagtcccagctactggggaggctgaggcaggagaatggcgtgaacccggagatggagcttgcagtgagctgagatcgcgccactgcactccagcctgggtgacagagcgagactctgtctcaaaaaaaaaaaaaaaaaaaaaaaaaaaaaaaaaaagatggccaagcaaggtggctcatgcctgtaatcccagcactttgggaggccgaggtgggcggatcatgaggtcaggagactgagaccatcatggctaacacagtgaaaccctgtctgtactaaaaatacaaaaaattagctgggcctggtggcacacacctgtagtcccaactactcaggaggctgaggcaggagaatcgcttagaacctgggaggcagaggttgcagtgagccgagattacgcgactgcactccagcctgggtgacagagcaagactccatctcaaaaataataataataataataatagaattcaggcctgaggccacatggagccacacacctcctccctgtgtggccctggcagggcgacctccctgggccctgtttccctagccctgtgaagatgaagctggacttgccagtttccaaggccaccccagctctgattctccaggatttgtgttgggcccgctagggatacgatttgcaagttacagttaagtatccaggcccccttaccagccgtttggggagctggcacgtgcagtgatgcttggccacctgagctacacagaaagacccaatgggagaagggaagcctctccccacgcaagttaatcaactgccctttgggtgttgcggctgatacagaacctcagaggcacagtctggcctcatgcacaagtcatttttcctgagtcctggattccttgctaagtgggaataatcacaataatcttggtgtgtaaaatataaaggcttaggcaaggccaggcgtggtggctcacgcctgtaatcccagcactttgggaggccaaggtgggcagatcatctgaggccaggagttcaagaacggcctggccaacatggtgaaatcctgtctctactaaagaaaaaaaaaaatgcaaaaattagccaggtgtggtggcgcacacctatagtcccagctacttgggaggctgaggcagaagaattgcatgaacccgggaggtggaggtttcagtgagctgagaacaagccactggactccagcctgggcaacagagcgagactccatcaaaaaaaaaaaaaaaaaaaaaggaggcataggcaagaaagatcacctcatctcaccatcatcccactatccacaagcaacagagacatcactaaccacacacagcaccaattcccagtgaggcaggccacagcccctgagtctttctcagcacagaactgttttctcctgagcttggacacagcctagaatcctcaacactgcctccagaccaggcctgagagatggaaccatcagccattccctatccttgataatagcggaagctggctgtgattgtaaataccctcaggtgctaggaaggttttgaacctgctcttcccccactcctccatgccctcctgtccgagcctcagccccctcaaccgcatcctggatgtcagctgaggcacccacgtttgcccaggaatgtcctagctcagcagtcaggcaatcacagggggaaagtcacaagaagggggaactttctggtaacctcaggctttccgctgccaaccccaggccaggggctgccaaggggcctgggtcctctgcctttgccaggctggctgaccctgggcctgagaaatagtagctgatccgatcccctgttcagcacctgaggcaaccaagccactgtttggtagccgtggcggactggaacccaggggtcctctgtcttctatgtcggccaccaccacctctccctggcttcttcccttggaagccagcagagctgacctccagggtctgcaggttcatgacgtcttctggaggcataaggagagaggtgactcttgagggactgacaactgccttgtccagtcagcagccacaaccctccaacgtccccctccctggccccaccagtccactccagagacatcctgtagaaggcccacccgctggcatgggctcctttctggctgctgagccattctgctcgctctgtgaggacagggaaaaaatgtgttttcctagctcttggcagtcagcactgctggagcctcctccctgctggaaggggagcaaggctggaagaaccaagcaccacagagaagcaacggcctggggttccagccccagttcaggtaccctctcacactcgctgtgtggcctcaggtacggcactccctctctctgggcctcagttttcccactatgccaaacgtcctccgagcctaaggtaccttccaacaatgactgtctctgagtttagagtttcagattctggcccagagctccaagaccaccagcagaatggaggtagggaaaggaaagcggtgaaggcttcctggaggtgggggcatgagacacaaactatcagactatcagactagccctcttctccacctgcacagccacagaccacttcctccttcatctggaccatgaccacaaccgcctgctcaccagcctcttgccttgccctccgtctccaatccccatcattgatcctcccccaagagctgtcagaggaatcactactgacacaaacccacgagcctgtccgtgcttggcccatttcaaaaccctgcaatgccagcctccccgcaagccaacacagtagggtcctcaggcctcaaccgtattcctgtccactctctcccaggatcgtatgctaacagatgaatgaacagacagcaaattctactatccctgaatgtttcccaaagggacaagcgggcagtgcatgcctgtgtgtgtgagggaggaagttgcctgagtcctgaaggatttgctcgcttttgggagactgcttcaagattcccccagcccctgccctggcttcctgtttctctggggttcccaggcctttttctccatgtgttgtggagctcttagagggcagggatccagggctcattcattcaatcagcaaacatccaagaagcacctactatgttccaggctctgtgctgggccctggagaccctgaagtgaatcacagctcctgccttcaagggcttcacagacaaccaccactctatcagactcagcacactagtcacctccccagggaagccttccttgattgccctggctaagtcagagcgctgttatgtactttcaaaccacagtgacttctccctcacatcacccatctaagctgtgttttgcatttacttctgtggatcttttttcaagtttgtgtccgctgctgagctataagctcccagagggcagtctctggatctggtctgttcatctcatccctggcatctggtccaggacaagggcccaatggcaatgcagggcccaggggtgattcaatgggaagttaaacttctcagtgctaactttccatctgggactgagtcaaccagccacttcccctcatcccctgaccccaggccctactttgtaatgtttcctgcccagctttgagggtgggcctgtctggttcctgtgctcctggccccaaccctcctgactcaaaccccacctactcttgggtacccccagctcctggcatggggctgtcagccctgctttctcttccacaattcacctggaaaatacgctgtctgcacagacttccagagcttcccccttctacccaccatcctgccatcctggctgttacctagttcccagtggtagatgggaatactgagggtccgggctgctgtagcagagctcacccagggttcaaagatccaaagtcaaaagatcattggttcctcaccctagcaagttcaattgctcccctcccacaattccatagaccgtgggtgggtgggtggagggggaaggtggattaagaccaaggaatctctagcccccagcccatcctgcaggcggctacgacaaacaggtgctttctgcagggctattgggtgagtgggtgggtggcggctaggtcaggccccacccctcactcattaaccctccgtgcagtcagagttctatccccaatgcctactgaccctgcctggcccagggtgagggcactcggggtctgtcggctggctcagagcctcagctagcttccggcgtccagctgtaggtcagtctagtctcaccagtcccacttgtgaactgaaactaccaggagagcggaaaccggctccgccccatcctccacgacctagcaggtacagcctccagaacccggactagctaaaagcctgtggtcctctccctgcgccgcacccttgcagtcaaggttttctggcccttcctgttctcatgggactgaggggatgggcaaccctggggacgaacgagagtcccttggttcttccctccccaggaagccccaaaatctggggacaagaacctgggctccaactcactttgttaccagatccaccggggtgccaagcgggggtggctcacatccctcactcctagctcagctgggtggggtctttgataccttgccccaccctgtggctgcgggcgcgggctctgggcgggagacaaacactggggtcacgtggcggaggccctgggaaactccggggagagccggggacggacagccccgggtagtaggactggggcggcccgggccagaattcccagaccccgtgcgaagacgcacgggtccgcttccttcgctcgggtccttgttccgcgtttactccggtggccggcccagggcacgccctctccgaggtacacactgctggtgtacaggccccagggagcgcgcgcgcggacacgcacacacaagcacaacacacgcacacacgcccccgaggtacacagcgcacgcacgcaccgggcaggatacccaggccgcccgccagggaacacacgcccgccctcggacgtaaacaaaccgcgcacgcaccgcccgcgggcgccgggccagggcctgttcccaccgagtcacgtaggagcacagcgcccccgcccccgccgggcggacgcggagatcgccggcctgcgctgccccttcctcccggcgccgccgcctacccgcccgcgccccgggaaggggccccgtctccacccccactcccccgagctggcctcggccccgtcctcggcgtccccgggacggccgctcccttctccccgccccgagccgtccgggcgatggagctccgggagccccgacggatcgggcccgggcgcccaccccaggcgcatcccgggacgcagaaaccctgccgccttggggtcccgcgcaccgtcctcctggtcccgcgttcctcacccgcttctgggcccgcttggtccggcgcgctcacacacgcgcgtctcgccgctgtcccggccgctgtcccgatccgcgctccggtcagtctcccctccgctctgagccgcaggtcgctctgaaccgggcgcccgggagcgctgcgctgagttttgttgtggggcgggcggcgcagggggccgaggccgcgcggagttgtaaggcgagcttcccggaattactcactcacaggattcctttcattcataaaaacccagtcatgcggtgacgtcaccgacccggccgccctccggccaggagcggccgcttggtccctcggccccgcccccgtatgaccccgccccctggaagccccgcccccggggctgccgcgattctctgcctggttccagggctcgctgggtgcgttcacgtgacacctcgcgagagccccgtgggtgtaggtgtcattggctcattttacaggtagtggtcctggccctcttctttcgacctagaccttctgccttaatgatctcatccagtcccgtggctttaaatgacatttatatggctatgagccccaggtttgtatttccggagcgaacagcttctctgagttccagactcatagccagctgcccactctgcgcatccagtgggtgtcagatgggcactgcagaggactcggcccaaaaacccgctcctgatcgtcagccctacctctgctcccttgccaccccatctcagctgctcaagccaaaaccttggagcctggctccatccctccctctcccttcctccccacctcaggactcaagctagcggtgtctccaggtctcctgcataggaccatttctcaccacctccagtcatggcacctggtctcggcaccatcagcttacccggacaatggcagcagcctccgaggctccctactttgcctccaaagtctttctttctataccagccaatgttcttctcaaaacaaagctcaggttgtttacacaccttctttggccactctctcctcatccactgctcttcggccacagtgcccttctttctgtcccccaaacataccaagctcattcctgcgacaggcccttggcactggctgtctggtcttctgttcacttgcctgactctttctcatctttcacgtcagcccggatgtcactgcctcagagagacatttcctgaccaccctggttaaagcagtcttcacctctgaatttttttttttttttcgagacagggtctcactctgtcacccaggctggagtgcagtggcacaatctcggctcactgcaacctccttctcctggactccagccattctcccaccttagcctcccaagtagctgggaccataagcacacaccaccatgctaggttcattttttgtatttttttttttttttttttttttttttttttgtagagacagggttttgccatgttgcccaaactggtctcaaactcctggactcaggcaatccacccacgctggcctcccaaagtaatgggattacaggcgcaagccaccgcacccagccttgaaatttgttcttatattatcttaatacttctgtagggtgtttcatcatttatgtatgtgagtgctggttattgtctgtcttccccaaccagaatgtatgttttatgaaggcaggccttgcttctttttctttttctttttttttttttgagacagagtctcactctgttgcccaggctggagtgcagtggcataatcttggctcactgcaacctccgcctcccaggttcaaggaattcagccccccagtagctggactacaggtgagtcaccatgcccagccaggctggttttgaacccctgacctcaggccacccacctcggcctcccaaagtgttgggattgcagacatgagccactgcgcctggccaggcttatcttgttcaccactgcctgcccagtgcctggagtagtgcttggcacatagtaggcccacagtaaatacatgttgaaggaatacatgactggaggctcagagaggtgaaggtgactttctaaattcactcagctaggaagtacaagcactggaattggtatccaggtctgaatgattcctggcccagatgtttgggggtacatcgcaaccaggggaggagggccacataaacatgaggggtgtgcgccgtggtgggaagccccacccaaaagagatggctttggaggccacgtgcggggtggatgttgctgttcatcccctgctttcctttgctcatgatgttcccactgcctgaaattccatcgctcccacagtccctcctgtgaagccgacatcatggcacttactccactgtggagggcatagggcctctccaaatgggtaggcctctatgtggcaccctgatcaccagtaaggatccccactttcctttttttttttttttttttgagccggagtctcgctgtgttgccccaggctggagtgcagtggcgcgatctcagctcactgcaagctccacctcccgggttcacgccattctccagcctcagcctcccgagtagctgggactacaggcgcccgccaccgcgccctcctaattttttttttttgtatttttagtagagacggggtttcaccgtggtgtcgatctcctgacctcgtgatccacccgcctcggcctcccaaagtgctgggattacacgcgtgagccaccgcgcccagccccccactttccttgatgtagcaaattcgatttcagcgcccttgtcttgctttcctgcctctgtgccttggtccaccagacactatggcttctttccgttccctcccacaggctgtgggtttggtatgcaaattggcccactagtttcccaagtgaccaaatgttgaggcagctttgtctagcactcaaaaggatctctaaaaaccaattgctcagtcctctccatgtgcatagcagaaagagccacctaggttaacctttggggtaggaaagttctcagttttagaaactgcacaatggtgagttgtctattttctctaccccccaccccctttaaaaccaaaaccaaaacaaaacaaaacagggtcttgccctgttgcccaggctggagtgcagtggcatgatcatagctcactgcagccttgaacttctgggctcaagcgatcctctcacctcagcctcccgagtagttgggactacaagtgtgcatcactgtgcctggataatttttctattttttgcagagatggaggtctcaccatattgcataggttgatcttgaacccttggcctcaagccttccttctgcctcagcctcccaatctactcccttttttatgagcttctcaagagctggggccacacctggaacactgtaggtgctcagctagtgagtgaattctcagtggacctgaacaacactcctggacaccatgctgcctagatcctttactcccatccccagcctgccagaacaagggggtcagtgcctcattatccaccctgcagggactgcttcccatagacatagctccctttctggtcaagatcaagggccatggtgcaatgtcctatttaaaagtgggagctcaggctgggcatggtggctcgcacctgtattctcagcactttgggagaccgaggcaggaggatcacttgagcccggagtttgagaccagcctgggcaatatggcgaaatcttgtctctattaaaaaaagaagaggaagaaaaaaaaaaaagaaatgaccatcaggcagccaccatagtaatcatgggttgcagcaagaatcaccaatggatatgaaagcttgatgagaaagtatttacatagtttcaagttatttacccacaagatgataattaattatggaaggaaaaataataactctgcagtggagaaatttggcagacacaaccttcgctaagtgatcaaagttaatatcaccagtaaggggcaaattgccacggagtttgtagatgaggtaattactgcatggatgcccaacttcctggcttcaatgcttgtcctgtggtcatagaagagaatgtgtccttgattttaggaaatatacactggagtatttatttatttatttatttatttatttttttgagatggagtcttgctctgtcacccaggctggagtgcaatggtgcgaccttggctcactgcaacctctgcctcctgggttcaagtgattctcctgcctcagcctcctgagtagctgggattacaggcacccaccatcatgcccggctaaattttgtatttttgtagagacgggggtttcaccatgttggccaggctagtcttgaactcctgacctcaggtcatctgtctgcctcggcctcctgaagagctgggattacaggtgtgagccaccgtgcctggcccactagagtatttagaggtaaaaggcatcatgtttgcaatttactctgacatggttctgaaaataatacatatagatagatagtgttatgggtggaatttcataatgttaaaatgtgtatgttgaagtcctaatgcctaaaaatctcagaatgtgactgtatttggagataaagttttaaaaggcataagtaaattaaaatatatacggtaggccctaatccaatctgaccagtgtccttataagaaaagaaaatttggccaggcgcagtgtaatcccagcacgttgggacgccaaggcaggcagatcacttgaggtcaggagtttgagaccagcctggccaacatgcaaaaccctgtctctacttaattaaaaaaaaaaaaattagtcgggagttgtggcacatgcctataatcctagctactcaggaggctgaggcaggagaattgcttgaacctgggaggcagaggttgcagtgagccgagatcacgccattgcactccagcctgggcgacagagcgagactgtctcaaaaaaaaaattgttttttgaaagtagggactctcaagtcagcctgtcgggttcagatcctggccccacgcctcatcagctgacgtcatctccaccctctataaaccgggctaatagtgcctcctttgcaggctgtgaaacaacataatgtgtttgcacttataagcctctggcacagcgcttagtatataataaaagatcaataatatcaggttagagagaggagtcctctacagcaggggtccccaaatcgcaggctgaggaccagtactgtttgtccgtggcctgttaggaaccagcgggctgagtgagcgtcaccgcctgagctccgcctcctgtaggatcagcactggcattggagtctcattaggagcgtgaaccctattgtgaactgcgcttttgagggatccaggttgtgtgctccttgtgagaatctaactacggccagatatgcctgatgacctgaggtggaacagtttctttttttttttttttttttggagagagtctcgctctatcccccaggctggagtgcagtgtagccatcttggctcactgcaacctccgccttttgggttcaactgattctcccacctcagcctcccccaagtagctgggactacaggcacgcgccaccacgcccatctaatttttgtatttttagtagagacggggtttcaccatgttggccaggctggtctcaaactcctgacctcaggtgatctgccccgctcagcctcccaaagtgctgggattacaggcgtgagccaccgcgcctggccactggaacagtttcatcccgaaaccatcccccacccacactccccactctccacccccaccccaccctcatctgtggaaaagttgtcttctacgaaatggtccctggtgtcaaaagcagaggaaatggacagagtgatcagttcgcccagaggccaagggaccacaccctggatgccaggtgtggtgctcccgtgtatcaggtcacactcaatcctctccatgtcttagcacttagctattatcatggccatgttgcagatgaggaaatcgagaccgtggcaggtgaggaatcttgcccagtattgcacagctagtccctggcagagaaggacttaaactcaggctggtccgactcgagggctgcgctctctcctgctgcccccgccggaatgatttgctgggttttgttctggagagattcgatatttcacgtgggccacttcagagtctgacgataattagagcacacgccatttctccgcgtgggcacccccgggtgggatcctggaggaaccttgtgccctcctccccttcttcctcctcttcccttccctctactttgtcaatcctaaggcaaaccgggcagggcctggcagagggtgactcttgaccagggccactttctgcaaatacaagggtcctgagtctgggctggagatgtgattgttcagcagagagaaaaaaggtttgagcaaacccaaacaattgggccgggcgcagtggctcatgcctgtaatcccagcatgttgggaggccaaggtggatcacttgaggccaggagttcgagaccagcctggccaacatggtgaaactctcgtctctactaaaaaatacaacaattagcccagtgtggtggcatgcgcctgtagccccagctactccggaggttaaggcaggagaatcgcttgaacccaggaggcggaggttgcagtgagctgagatctcaccactgcactccagcctgggcgacagagcaagactgtctcaaaaaataaaaataaaaataaatccaagcaaccccagtacctactgttactgtttttgttttgagacggagtcttgctctgtcacccaggctggagggcagtggcccgatctcggctcactgcaagctccacctcccgggttcccgccattctcctgcctcagcctcccaagtagctgggactacaggcgtattattgcttatgaatcacatttatgtgcctaagagctgtcatctcacaaaattctatgaagtatctgtatcatccccactttatagatgaggaaaccgaggctaggagggctgaagccatttgctaagggcccttcccacccacatgtgaatatgaacctttcgtctccacttcaccaacactgggagttttcattgtctaagctctgctaatttcctaggcaaatgacgttattgtatttaaatttgcatttctctgaataggaatgagcttgaacacattcccatttgcttgttaaccagttgggttttttcttcttttgttcgtgtgctttgcctattttagagaatacatttttatgtttgcaaactgatattttaggaacctgaaacagtactgcacatgctccatttttccccagccctccatcattttccctctaaaacctcccccccctccccacccccagcagcttcaatatacctggagatgtgccagccctggtctgagtccttttgtgccaagcctgtaaaaccatcgctggggcactgctgctccgtgcacttcactcctgcatgccagctgctctggcttctggagagaagccaccatcgcgaccacaaccaccactgcaacaacagctgcggtcacgacaaggtcatcttctccagtcacagccagatcctcagagctgccaggaatccctggagtactcgcctttctccttcatccgcaggccttcatcctcatctccatcgaacctgctctcctgccacttccagaggaagcagaggccatgtgataggcactgcctcgaccctctgcacctgcccttccctctccctcccagtcccttcagaggctgtcctttgtcttgccctaaacctacctctcctccttccagaatccccatgcccacaccccagtccccatcccctccctctgaagcaaatggcttcagccctcctagcctcggtttcctcatctataaagtgggggtgatacagatacttcatagaattttgggagatgacagctcttaggcacatcaacgagattcataaacaataataacagtaggtactggggtcgtctggattttttttttttttttttactgagacagtctcgccccgttgcccaggctggagtgcagtggcaagatctcagctcactgtaacctctgcctcctgggttcaagtgattctcctgcctcagccttctaagtagttggggctacaggcacctgccaccacactggagatgggactgaaatgtctccaagtggctgtcatctctagcagccacccctgaaccccacctttcactccaccctcaccctaacacccacccttgttttttcttccctttgtgggcaaacctcaagtcatccccactcattgcctctgggttctcactgcctctcattcccaatccctcacgggctgagggctgccctcaagaaacctctgaagggactctggccggggtcccagtggcctctttgttactaaatccaggtccaattttagccctaatctgtcttgacctttgacagcatgcaatggtgttgcaatctcccttccttttaatttttttcctctttttttttgaaatggagtcttgctttgtcatcaagggtggagtgcagtgtcaccatctcggctcactgcaatctctgcgtcctgggttcaagcgattctcctgcctcagcctcctgagtagctggaattataggtgcctgccaccacgaccagctaatttttttttttttttttgagacagagtctcgctctgtcacccaggctggagtgcagtggcgtgatctcagcaagttctgcttcctgggttcacgccattctcttgcctcagcctcccaagtagctgggactacaggcccccgccaccacgcccggctaattttttgtatttttagtagagacggggtttcaccgtgttagccaggatggtctcgatctcctgacctcacgatccacccgcctcagcctcccaaagtgttgggattacaggcgtgagccactgcacccggcatttttgtatttctagtagagacagggtttcaccatgttggccaggctggtctcgaactcctgacctcaggtgatccacccacctcggcctcccaaagtgctgggattacaggcatgagctactgtgcccggcctattcttcccctctttttggaaacactgttttctccttggtgtttttgtctttgttttgagacagggtctccctcccttgcccaggctggagtgcagtagtgccatcatagctcactgtaaccttgaactcctgggctccagccatcctcccgtctcagcctcccgaatagctggggttacaggcatgcagccacatgcctacctccccttgccttctaaagctcagatttccctcctatcttttcagctttcatccctggccctccatcttggcctcttaattcttagcgaggctcagagctttagcctttgccctcttttcttattgctggggaaccttatccctacctcaagatttcaggtgccacctgatgttgaggactcccagatctctattttgggctcccagctgtctctcatggaccagatctgcttaagcaactgcatggatgacatgtattttcccctgcccttccctggcacgtctaactccacgttgtctcagtggagcttagcgccaccctccccacctaatttctccaacaggttgatgatgccacctcctccccagtcaccctggagagaaaccaggccatcatgctcacctcaccctctccctccctcccacagcaaacaagtcaccaggcttcagtgatctcatctccttaacttctctccagcctctctcttccctcagccatggcctctgttcaagccacagcacctggctccaggacaattgcagcagccttctgcctggtccccctgcctctagcctccatgcagaggatagagagagctttctaaaacctaaacttggccaggctactgctctgctcacaacccttccatggctccccagtgctgtcaggacaaagtgtaaactctttccataagcctcctcgatctggcctctgcctgcttccaccacctcctctcagctgcagccaccgtgaactctgtcctcatacccatcattctcttctactgcctcgtgctttcaatcttcccagtccttcttcctggaactccctccccggcttgtgcttcagtccccagctcagatgccactttgttcagcaggcttcccagatcatccccaggctgactcaggttcctgtgtacaaggtaggaaacctaccagtgtatccctcatgatagcactttcctctctgactcggtgttctgtgtcttcatggctgtcttctcttaacccacatgctttttgaggaccaggattacatcctttcatttttgtgtctccagagctttgcccgggccatggcacatagcagaagcatgatcaatgtttttctttcttcttttctttttttctgagacacagtcctgcactgtcacccaggctggagtgcagtgtcgtgatctcggctcactgcaacctctgcctcctgagttcacgcgattctcacgcctcagccgcccaagtagctgggatgacaggcgtgcatcgccacgcctggttaatttttttttttgtattttttattttagtagagatggggtttcactctgttggctaggctggcctcgaactcctggcctcaatgatttgcctgcctcagcttcccaaagtactgggattacaggcgtgagccaccatgccctgcctaggccaccgtgcctacgctgggagcatgatgaatgttaatgggatgaatggaggagttgtccttgttccactgggccttgtcctaggctcaagcaagagggtcaggctgtggcgagacagggaggaaggaagagagtatcattagtttctaagaacaggggtccctaacccctggtctgggtcgatggcctgttaggaactcggctgcacggcaggaggtgagcggcgggcgggtgagcgagtgaagcttcatcgatatttacagcatatttacagccgctgcccattgctcactcacattgccacctgagctccactttctctcagatcagcggcggcattggattctcataggagctcaaaccctattgtgacttcgcatgcgaaggatctaggttttgcattccttatgagaatatgatgatctgtctgcctgatgatctgtcactgtctcccatcacccccagatgggaccatctagttgcaggaaaaccagctcagggctcccactgattctacattgtgatgagttgtataattatttcattatgtattacaatgtaataataatagaagtaaaatgcacaatcaatgtaatggacttggatcattcccaaaccatcccccggctccgtggaaaaactgtcttccacaaaaccagtccctggtgccaaaaaggttggggacctcggtcctacaatgtcctttggctccctgacagtggggactgtgtttatatcactgattgccctcatgccctgtgtaacgctatggcagggcagccaaacacggattgattctctggagatccctgcaattccgtttcattaccattgcatcctgggggcacagtgattcagcctactcatgaatgtgtgatttgcagtagaatttcaggagcccctgggacataaaagaggattatcagggctgggtgtggtggctcacacctgtaataccaggactttgggaggccaaggcaggaggattgcttgagcccaggagttcaagaccagctggggcaacatagcaagccccatctctacaaaaaaaatttttttaaattaaccaggtgtggtggtgctctcctgtggttccagctacttgggaggctgaggtgggaggattgcttgggcccaggaaatggagggtgcagtgagccacgtttgagccactgcactccagcctgggtgacaaagcaagactctgtctcaaaaaaaaaaaaaaaaaaggtaggggctgggcacagtggctcacccctgtaatcccagcactttgagaggctgaggtaagcagatagcttgaggtcaggagttcaagaccagcctggccaacatgatgaaaccccatctctactaaaaatacaaaaattagctgggcttggtggtgggcgcctgtaattccagctactcggggaggcagaggcaggagaatcgctcgaacccgggaagtggaggttgcagagagccgagatcatgccactgtactccggcctcggcgatggagcaagactctatctcaaaacaataaaaaataaataaaaagtattttggggtgatacacacattcagaccatagaacatgcgatgatatggaaaaatatatttgcctttatattccagtgctttttcacaataaactattatctgtatatctgagacaagtttgtattaaattgtgagccccaaggacaagaatagagatgtctttagtgtccccaccatactaagagtaaggccggccaggcatggtggctcatgccagtaatcccaacactttgaaggccgaggtgggcggatcatgaggtcaagagattgagaccatcctggccaacatggtgaaaccccgtctctactaaaaatacaaaaattagccgggtgtggtggcacgcgcctgtagtcccagctgctcaggaggctgaggcaggggaatctcttgaacccaggaggcagaggttgcaatgagctgagatcgcgccactgcactccagcctggcaacaaagcgagactttgagtcaaaaagaagaaaagaaaagaaaaagagtaaggtcatgcacatagcaggtatttcataattaatggctgacaaaacataaatgaggacgagaagcacaagagaagggacaaagggattaagagcttgcacactctgaccctcaagaactccacattagattcccccatcgtgagaggcttggcacacaccctgcatctttgcctgaaatacccctgctcagcctctccaaatcctcatgtccttcgccatccttcaccatccctcaccatccctaaccatcccccaccatccctctccatccctctccatcccccaccatccctcaccatccctcaccatccctcaccatccctctccatcccccaccatccctcaccatccctcaccatccctcaccatccctctccatcccccaccatcccccaccatcccccaccatccctctccatccctctccatcccccaccatcccccaccatccctctccatccctcattatccctatccattcctctccatccctctccacccttctccatccttcaccatccttcaggactcaggtttaagccagcttccttgtgaagctccctggttccctgttcctgagaaccagcttctcctcagcccgcagtctgtcctgtgaacccctgagctgggctgaggtccccccagagtagggaaatcctgcccttcctgaccaggcctggcttttgcccttgggatgggaacacacttggctgctgcctcacagctcagggtcacctcctgaggagcccacttccctcctgtggagggcacaagccctgatgtcccactcagcaagtcagaagccatgtaattagcatcatcatgcacagctgccgtgtgggctccgcaccctcccatcacctctcccaaggcagcagaaggatttttccacattgcttcctggccccaaccttccagggcacccactgcttgtgggacaaggtctgcatccttggcctggaactcaaaactctttctttttttttcttttatatatattttttgagacggagtctcgctctgttgcccaggctggagtgcagtggcatgatgtcagctcactgtaacctccgcctcccgggttcaggcgattctcgtgcctcagcgtcccaagtagagtagctgggactacaggcacccgccaccacgcccagctaattttttgtagctttagtagatacaggagtttcaccatgttgcccagctggtcacaaactactgacctcaagtgatctgcctgcctagcctcccaaagtgttgggattacaggcgtgagccaccgcaccagccctttttttcttattttgagacagggtctcactaagttgcccaggctggagtgcagtggcacaatcatagcttactacaacctcccttcccttgggaggctggggctcaagcaatcctcctgccccagccttctgaagtagctgggactacaggcatgcaccaccatgcctggctaatttttaaaatttttgtagagatgagagtctcgctatgttgcccaggctggttttgaactcctgggctcaagcgagccagccgttttgtgctcccaaagtgctgggattagggggagactctttctagatggcctctggggactgttctcctgctcacacaccaggtttcagcagtgctcaaccccttgccggtccccaaacaatccacacaatctcatggtattgacttttgctcacacagttctttccacctagaatgttctctttcctaatccagccggcaaactcctacttaacctttgacatccaatttaagatcagtggtgggtaaatttttttttctgtaaagggccagagagaaatattccaggctttgtgggccatgaggtatctgtcatgattactcaattctcccactgcagaaagcagaaacgtgtgtaaacaaatggcgtggctgtgttccaataacacttgtttacagaaacaggtggcaggcaggatagtttgcccactgctgctcaagaataatctcacaaagcttcccacaggaaggagtttgacaatgccttctagcaatggcttacgtattttatcgtaacacaaacttggactgtaacgtacctatagctgtgatgattaaatgggctggtggtcagaccatcatctctcacctggatttctttttctttctttctttctttctttctttttttttgagatggagtctcactctgtcacccaggctggagtacagtggcactacctcggctcactgcagtctctgcttcccgggttcaggcaattctctgcctcagcctcccgagtagctgggattacacgtgcccgccaccatgcctggctaatttttgtatttttagtagagacgggggtttcaccatcttggccaggctggtcttgaactcctgacctcgtgatctgcctgcttcagcctcccaaagtgttgggattataggcatgagccaccatgcccgaccatggatttctacaatagcctcctcactggtctcccagcctctgccttcccttacactctattctcactgaacagacataagctgttaaagtgtaaattcattctggtcactcctctgcttaaaaacctctcatggttccctattgccctgatattgaaagccaaagtcttaaaatggtttccagtgtcctacaagttctactcccaatatccttttaacctcaacgttattgcctactacacccccactggctctctactccaaaacaaagctataatagcctctttgcttttcctcttaaaacaagccaggcgggcttctgcctcagggcctttgttcttgctccatctggaacactcttttcctggttgtgcacatagctcactccttcgcctccatcaggtctttatttaattatctcccttctaacgcttttcctggcccatctagttaaaactgtgaccctccccggtctctccttcctgtgtttactccccagcattcctcaccctctaactcactatatattcccccaactttttgttttgttttgttttgttttgttttgaggcagagtctccttctgttgcccaagctggcgtgcagtggcaagatcttggctcattgcaacctctgccttccgggttcaagcgattctcctgcctcagcctcccgagtagctgggattacaggtgccagctgtcacgcccagctaatttttgtatttttagtagagacggggtttcaccatgttggccaggctggtcttgaactcctgacctcaagtgatctgcccgcctcggcctcccaaagtgctgggattacaggcatgagccactgtgcccagcttcctccaactttttaattataaaaatgttcaggccaagaacagtggttcatgcctataatcccagcactttgggaggctgaggcaggcagattgcttgaggccaggagttcgagaccagcctaggcaacatggcgaaaagcagactctaccgaaaaaaaaaaaaagcatagtggcctgaacctgtagtcccagctactcaggacactgagatgggaggatcgcttgagcccaggaggcagagattgcagtcagccaagatcaccccactgcactccagcctgggtgagagagccagaccctgtctccaaaaaaaaaaaaaaaagaaagaaagaaagaaaaagttcaaacacacagataattggaggactagtgcaaaggtattcaaatagacatgcccagatcccacagttaaggtgctttgaatgtaagatgctaacatgatgacaccctcactcaaagacattagcaaaacacactctctgtttccttctctatctagtttattctccgtctttccccaccaggatgtgagcagcacaaaggcagggatttttgtccattttgttcagtgcctgggattacacgtgcaccaagaacactgcctggcacataatgagtgctcctagagtttggagagagaaaagacaagacaggtgctgattctggttctgcctctcgttgacactggcaactggcactgcctctcattggcaactctggggataattttcccttgtggaacctcattctcttcatctacaaagtggggatggcagtactatatcacagggctgttgcaaggataaaaaagtaagaagtcggctgggggtggtggctcacacctgtaatcccagcactttgggagactgaggcgggtggatcccctgaggtcaggagtttgagaccagcctggccaacttggtgaaacctcgtttctattagaaatacaaaaattagccaggcgtggtagtgcacgcctgtaattccagctactcgggaggctgaggcaggagaatcagttagaacctgggaggtggaggttgccgtgagccaagatcgcgccactgcgctccagcctgggtgacagagggagactctgtctccaaaaaaaagtaaaaggtgtgatattgcactgttagcatgttagttagatttccatctagctccttgaaggaaaagattagtctagtctgaccctctgtgctctgggctcttagagggcagacgccctccctgatgtatgggaggagcctagcacaacacctcaggagaagttcttttgactttaactgctagcagctccatctgctagcactacagaacacactccctcgtgcttacttgccccatccctttacttgctcattcaatgctacctaataatcccctctattccatcttttgatttatctactcattaaatggtttccaccagaaatacctagggaagggatacttaacttcatcaggtactgagattctattttgtgaatgtcttctgtggatctttgactgtttccagcaattgatccagcctctcttggccttttctgcattttattatttatttatttattgagatggggtcttgctctgtcgcctaggctggagggcactggtgtgatctcagctcactgcaacctccacctcctgggttcaagagatttttctgcctcagcctccccagtagctgggattacagttgcctgccaccacgcctgactaatttttttgtatttttttgtagagacggggtttcaccatgttggtcagaatggtctcgaactcctgacctcaggtaatccacccgcctcagcctcctaaagtgttgggattataggcatgagccaccacacctggcccttgtctgcattttagattcacctgtgtatctgcatttccaaatgtgctttgcaaaatcctgaatgcaagggtgggtgtttgttgaagaatgggacacctcatgttgcccctgtgggttttctcaggaaggaaagattgcttggcagtgcgtggaatgcatggccttttgcaagctccttgataaccatcgctctaactttgcttgtttggggtgtggaggcaagatattttcattgagaattctgagtctttatccttttctctccacttcaagctgaaacttttttttttttttttttgagacatggtctcgctctgtcacccaggctggagtgcaggcgatcttggctcactgcatccttgaccccccggcctcccctgcacagtagctgggaccaaaggcatgcaagaccacacctggataatttttgtattttttttaaagacgaggtttctccatgttgcacaagctggtcttgaactcctgagctcaagtgatctgcccacctcggcctcccaaagtgttgggattacaggcgtgagccactgtgcgcagtcaagctgaaactcttaagcaaattttaaatcttactttaaggaacaatttcctcacctgtaaaatggggacacgaggatatgatggaagtgaagtcactttgtaactggtaaagctctgtacagatattagttaagatggttaatttcattaacctgtgaagattcttaactaaaccttgcgcaagttgcattggctgccctgtctaggcactaatatctttagacggactaaggaggaaacacactttttttttttttgagacagagtctggctctgtcacccaggctggagtacagtggcatgatcttggctcactgcaacctctgcctcctgggttcaagcaattctcctgcctcagcctcctgagcagctgggactacagactatggccagcacacccagctaattatttgtatttttagtagagatggggtttcaccatgttggtcaggctggtctcaaactcctgacctcaagtgatccacccgcctcagcctcccaaactgctgggattataggcgtgagccaccgcacccggcctacacgcttcttttcacaagaatgacacccgcaactatacttcccacgtaaatggagagcagtctggcagattcatctagacctagggttgggtgattattagggaaagaaaaggtccaaccaagccagtgggctgaagagaggacatgacctgctcagtccgaagcagatgtgtgactaaagtctagtctcctggcttctctgcaaaatacctcattatcggcattattaaccctaacaactgccatttattgaaatcccactatgtgcacgaatggggaccaatttacttctagatattacaacaatcttgtattactgtgcccacttcctggatgatgggtctgaggttcacagagatcatttgcccaagttcctactgaaagtgctaaggtatttcctgagactggctcagggtgtgttgccagacaacaatgcacacatttttaacacaatactaaacttagtatattatacttatgttaaaaatttcggagccgggcgtggtggctcacgcctgtaatcccagcacttcgggaggctgaggcgggcagatcacttgaggtcaggagttcgagaccagcctggccaacatggtgaaaccccgtctctactaaaaatacaaaaaattagctgggcgtagtggcgggcgcctgcaatctcagctacgcgggaggctgacgcaggagaatcgcttgaatccgggaggcggaggttgcagtgagcgagatcgtgccactgcactccagcatggtcgacagagcgagacttgtctcaaaaaaaaaaaaaaaaaggacatgtggtaattcccctagggaatttggccttagttgtgaaaaataaaaaagctataatcaatttctgttctatcggaaaaaaatgtattggctgtttagctgaaattcaaatgtaacttaacatcccgtattttttatatgctacatctggcaaccctggcttgaggctacctggcaaaaatcaaaacaggttcctccttgttatgccctatgcctctgttgcctttatttttatctttacgagcaatcattaacagtaacttcagactccaggctctggtcgctttaggaggcggaaggcggactagggtaggactcctggccctcatcaacaggactgccaagaagccgggcaccttctgccccgcacaaacatggccgcgcctcgccgccgaggattggctcccgccgaaagctcgtcctcctggctaagggagccccttccattgggcagttaaaaaaaatggcggaccccgcctcccgccgtcctcgggcgcgggggcggagcctagaggaggcctgggacagggccaccagtgattggcggagagcggtggtcaggccatcacgtggcccgaggcccgtttgtttgcggaagtaggaggaagtagaagtgctgagtaagccgaggtgagtgacctcgcgggtgggcggggcctgggggtccgttccccaacttcctcggcgctccggactcccaagtctccgccggaccctcctttggatattcctcgtgtctccgattctgaggcatgtcctccattaacccttatgtgactccctgagtgcccccaccttccatcttttcatccccctgcgtccccaattcccatcccgagaccgcccgtgtctcatctcgaacttgtggaccccagggaccccagcttcgaccctgagtttctcccctgaaccccagtctcctccgtgtgtctccctcagtatccctaacttcccgagtcaatccatctcttctctttccccgaccctcagtgcctctttaggccccattggccgtcctaattttccttcctgtgctcctctaagtgctcacttgattccccacttcacgtccgtctccacctttcgtggtgcctctactcatttctcactccctgcttctcctgcctttcctccctgctttttttccttgcctttcctctctcgcgtgcctccagacctgcccccgacatgctccctccttcccctcagcctggccaccccagagtctcccacccctaatcctgtgtccacctcctgctcccacagatgacttggaagctggtgacagggagcatgtgaccagggtgatcatgggactgggtcggggcaagcctgtgggtgtgggacagggagggcacagggcaaggggacctgtggccgtatttttaatgggctacccacatgaccccaacgaatacctccccctagcttctgggtctttccctcacctgcctcttacccgcccaacaggatgtcaggcaggttcggtttggcaacgttgaggctgcacccttgggctgaatgcattgtttttgaatgcattgtttttgttagagtttctgcctggagtttggaacctgttttctgtccaagtctcagtttcctcatctgtgacaggggaactgtacctcctgccctcgtaagtctgccatgaggttcaaaatttgaatgagaaaatgtagaaggtaaagctttataaccagtatggccctgtacaaatacatgattttactgttgggtcataggcagaattgaaaggagtggaaagggaaagggctagaatgagaagacaaggagagaaggatgagcaggaggtcccttgtctttcagtgtatcatttggcagtgtttgttcatcacctcttgtgagtcaggctcttctgtatatgttctcttcaccattcattcagtcatcgtttatctaacaaatatttacggactgtctgatgttctaggctacccttggtgtggccaatgatattctcacttcacatgagaaaaagagggcgcatgagttgcttgaggtcacaccgatgaggttgaagctggaatctgacaccagagcctgtgtgattgtcctgatgtgtaaggtttgctactgtttaggacacttcttgttccttccgtggattactttcttgttacatgagagactccccaaaagggagtttccctcttactcagcagaatgacatcactaagagatacagaaaggagaaatttaaatactctgtgtgtgtgtgtgtgtgtgtgtgtgtgtgtgtgtgtgtgtgtctgcagacatctattgggtgtgtgtgctgggggaagtaggtaggcaaggagtaaggggccgtagtgaagagtgtgttacaaacttcactttgtagagggtggctccctgggagaatatgttctgtgtctttcacagtggattttgatagggtcatgtcttaaatgcctcttctcgttttcggatggtgatctcatccagtcttatttctttaagtgccgtctctattctgtcagcccacaaatttatatccccagtccagtccagacctttccctggaatgacatactcaaatctagttgcttactcagcacctcaaacttaggcttttcaaacttgaagtatttatttattgatttatttattttttgagacagagtctcactctgtcacccaggctggaatgcaatggcacgatctcggctcactgcaacctccacctcctgattctcctgcctcagcctcccaagtagctgggattacaagcatgcgccatcatgcccaactaatttttgtatttttgtagaggcggggtttcaccgtgttggccaggctggtctcgaactcctgatctcaagtgatccacctgccttggcctcccaaagtggtgggattacaggtgtgagccaccgcgccaggcctcaaacttaagagtttagaattgagctcctgttagttctgccctccatccctgaccccactcttcaccaaaacatgtccctcccactctctttctcatcttaggacataggagtattgttcattcagttgctcaggtcaaagctgtgagattatctatgatgcctctctgtttcttaccccacacccagccagagtgatcttgttaaaatgttgtttctttgcagtggcctctcctctcatggcacatgcctggccccctgttgcctctctgatgtcactggcttccttgcttttcctggaactcgctaaacatgttccagccccatggcctttgcacacgctctctttgcctagctattcatatgactttcatctctctccatcaggtatttatttaagatcaatttcttggtgaagacttctctcctcacccaatctaaaatttcactctccacctcagcacttcctatccccattctctggtttttctcctcagtagttaattgtcatctaaaacctttgtaaatatttacctgtttatcttctttattattagtagctctgtctaaaatataagttccaggatgtcagggattttgtggggttttttttggttggttggttgttttggttttgagacagggtctcactctgttgcccaggctggagcgcagtggtgcgatctcagctcactgcagcctccgcctcctgggtttgagtgattctcccacctcagtctcccaggaagctggaattacaggtgcacgccaccacacccagctaatttttgtattttttggtagagatggggtttcactatgttggccaggccggtcttgaactcttgacctcaagtgatccacccgcctcggcctcccaaagttctgggattactggtgtgagccaccgcgcccggccttgttttgttttaagacagggtctcactgtcgctcaggctggattgcagtggcacaatcacagctcactgcagcctcgacctgctagacttaagcaatccccccacctcagccaccttagtagctgggacttacaggcatgagagataccatgcctgggtaattgttaagtttttgtagaggtgaggtctcactatattacccaggctggtctcaaagtcctgagcttaagtgatcctccttccttggcctcctaaagtgctgggattacaggagtgaactgccgtgcctgaccagtctgttttgtttacgattgtatcctcagcggttagaacaatgcctgccacaatccatctcagtaaatatttgtggagtgagtcataacatgggccacactgtaccgtgccaccagcccaaagatctcttaaagtcacccctgtctcatgtgcttgggagctccagtgacagtttcggggcagtttgcttccagctgtggtccagccaagcggagtgaatgaaagagatgctttttccttttgtgaaaggacgttttgctctggctcacgtgagcagcagtgcattttgagacgagggccttggcttttggaatctaagagcctgttgagcaagcctcgctcagccaccttctttcagctttctcctgaaggcagtttgaggattaagagcctgatgctctggattccacctaattgggttcagatcctggcaaactgtgtaacctgtgccccagtttcctgtgtaatgtggagagacctggaccttttcttacaggtgtttggagggttaaatgtggcaattcggccgggcgcagtggctcatgcctgtaaccccagcactttgggaggtggaggtgggcggatcaccggaggtcaggagttcaagaccagcctggttaacatggtgaaaccccgtttctactaaaaatacaaaaaattagccgagtgtggtggtgcgcgcctgtaatcccagctagtctggagactgaggcaggagaatcgcttgaacccgggaggcagaggttgcagtgagccaagatcacgccattgcactccagcttgggcaacaagagtgaaactctgtctcaaaaaaaaaaaaaaaaaaaaagtggcaatttacccgaaactgtggtgaagcgtctggcgccctgtgggtgctgggcagcagtgggtgctgatggggtgtgaggggatgggatcaagccctttcccactaacttaggaaagaggttggaatgagctggggtcagagggaacatttgcggggacattttgccgggaggctgccttggaggttcagaggctcagatgacccctgtgttcattcagtgttttctcacccacagattgagcacctgctgtgtggccagccctttgcctagtgctgttcaagagtcagaggacataggcaggcaatcccccaccacaacctgccaccccatttcctctcttggggccttgatttctccacatgccaaacagggagaatgattgcaccttccttgtttctttttttttttttttgagacagtctcactttgtcatccaagctttagtgcagtggcatgatctcggctcactgcagcctctgcctctcgggttcaaagattctcctgcttcagcctcccaagtagctgtgattataggcacccaccatcacgccaggctaattttttttgtagttttagtagagatggggtttttttctcacacgttggccaggctggtcttgaacttctgacctcaggtgatctgcccatctcaccctcccaaagtgctgggattacaggtgtgagccaccgcgcccggctgcgccttccctgtttctttgtgagcttggaggtggatcacaagtgtgaaaccctttgccaaccgtgaggcatggtggccttgtgagaggacggaggccggtgtgtggtggcatgctcccgtgctgtgtggcacagacggagctacaggaaggaagttggggcagcttggcactctgagtggaccctgagtttccagcctgctctgtcttgactgggtgggaggagggtgctcaggagggtgtcactgctgccaggttctgctgccaggaccatccaacagttgttccaatcatgggacatcctgtcgtcagcagctggggctcgtgaggcctgatttccacctcgggcagttctgtgtgtgctcctggaatcccccacgtggccaagcctgtgaggtctgcttcctggcctgctgcctgtgggttcctgtcacgcacctctcgggcagctgtccggctcctctgctctcggcttagtcaagaaggaagcagaaggcttggagtctttcctgcttggactaggagtgagctcagcctaagtgccctgactatatataaagctgaactttccagaccgaagcctggggatggatcagtccgatcacttagggccgctcctgaaggagtgcaggtgctagatacaggttctcccggtggaggagcgaaccccttgtgggccgttagctactggtgggatttgagcatggtatttccctatccgttgtggagaggagcatggcagctcagagtgggtgggaacagtgtgtggtccctgttatcaccttcaagggaataaagtgtgtctgggggcttcagaggtgctggccccatgggcttataggtggttcattcattcattctcattcattcattcaccaaacttattaaacacccactgtgagtcaggaacatcatgccaggtgcttagggaaacaaatcaaagcgggttgggtgagcagcccaagccaacagatgcacccccattctcacatggtgtgtgttcctgtgggctgggccctgggtggtgtggggtgctggggagaagaggaaggcacaccaggctgcagggcggaggtgcgggtatgaattttcagaggagatggcacctgagctgtatcttcatggataagaagagatttgttcatttgtcctttgtggagcacacattcaggttaagaaagtggggaggatgggctacgctgatggagcgtatgtgtggtatccccaagtgcactgagacacgagtttgacgtgttctgggaagatcgatggtgcggcgtggctggagtagaggtgagggatgagttggaggggtgagttgggccagctctcatggatgctggagtctgggctttccctgggaggtcatggggcgccactggccagggtcagcagggagacctgcagctggatttgcatcgtacagtgggcatggaggggtgtcaggctgggttgggaaccgtgcaggctggaagggcactctggtgctctgagcattcagagggggcagctgggccttgaaggatgagcaggggctccagcaggaactggagagcgcattccagggaggacgcaagtgcaggcccctttcactacagaaaagcagttttcacacagaccttccaaaggggaggagaggggactgcctgggcctggcagctgcggcaggtagcagcaatcagagggcagggaccgctcctcccgtgcctgagacctgcccagggtccttcagggaattcgtagctgaggaggaaccagatttttgggactgagttctccctcaccacccgctctgagccaccctcttggtcccttgtcctctactgcacttcttccggggcttggctcctcgtcatgagaggagcttccctgggcatggcgaggggcgtgactgacatagcagccctggacaagtggctccaggtgacctgtgttcacgttgatcacagcactaaccacggcccctcctctcagcaccttcccctctcgagccgtccagtcccagtgaaaatgctcaccgttcatgggtgggctgagcaagcccctgatctctgccttcctccgtgttctgatctgcttcatctgctgtgaaggcctctcgccatttcccccgctggcaaactcctgttcttcctggaaagttcagctaaaaagtcatcccctttaggggtccttccctcaggggaccgtgcacttggcgagacagggactggtcttgggtctctctgttgactgttttatgaacccaggtagtcacttccagggaactcatcagagatgctaccattggctccaatctccctctgttcccactcgaggttttttgtttcttcgtttgtttttctttctttctttttttttgagacagagtctcgctctcgcccaggctggagtgcagtgacatgatctcggctcactgcaagctccgcctcccgggttcacgccattctcctgcctcagcctcccgaatagctgggactacaggcacccgccaccacgcccagctaattttttttgtatttttagtagagacggggtttcaccatgttagccaggatggtctcaatctcctgatttcgtgatccgcccgccttaacctcccaaagtgctgggattacaggcgtgagccactgcgcccagcccgtttgtttttgttttttggtggacatcaactttaatttgccctttgttttgttttgtttttgaggcagggtcttgctctgtctcccaggctggagtgcagtagtgcaatcttggctcactgcagtctcgacctcaagaggatcaagcaatcctcttgccttagcctcccgagtagctgggaccacaggcgcacaccaccatgcccagctaattttattttatattttgtagagacagggttttgccatgttccccaggctggtctcaaattcctgggctcaagcaatccgtctgcctcagcctcccaaaatgctggaattacaggcacgagccactgtgcccggccttaatttgccctttgaacatgtacaattcagggcctctctgggcctcagtttcttgatctctgagatgggaagatgggataataatacttgttcctcccgtccttcagctcctccaggggaccctcacaccagcacactctctgtcagtcttccctcaatgaacccagcaggcaagcttggttttgacagaggatgggtgagcagagataaggaaaacggccagaaatatctggcttccctcagcaggggcaccaaaattggtacctggaaattgcctggcttggacaggcagaattgtcactgtcaacccccaccaccaaaggtcttgggtctttgtctttctgcttgtggtgtttgagagagctgcttgacacagccgaggtgcggtctgtgtcaggtgacctgggcatcctgggggtgcagggagaagcccaggtaaggaggaggaggggccggtcatcagtggggaaaagtgattgtctaccccacgggaaggtcaagggtaggacgctgtgagaagccagggggagagatgaagtgaggcatgatgcggggggccctcatccaccatccccctcttgcagctgtgctgggaagagcctaggctccagggtccaaggtggcagggacagaaggaagcacgtgtgagcactttctccctgctggcccgccttcctggttggcaatgccgtgagtgttccaggatgtggccccgtggctgtcatttcctttcttccacctagtgataacaatggccactgtttgtgtgcccacagtcggcctgtgtcccagacaccttccctccattgcgtcatctcgtcctcctgcctaccctgaaggctggatgccagccaagcctgtcgtttctgtggccatgctgtcgtgggtgtgtggggggcatcccctagccccaggctctggtggggggtacacaggctgggccattgacgaaggggtgtgtggaatctttctttgatttcactgcacccctggtgactttctccctcaatctgaggctcatgggtgctggatgctcttgactctctgcccttcctgggcgcacccctccgcgtccctgtgggcccgtcctcggggtagcctctctgcgctcttccaggccaggcctgagtcccacaggtccccatcttcccggctgcagcccccagaggctcagcctatactgctacttcctttgaaaactataatcgctttacatagcatctggaaaatagggaaaaggaaaaaacaaaagcccataaacccagcaccctcatctactcaatggcatgttttctgtcagtctatcttggtttgttttctatcaggctttgttttttctatgcataatatttactcagttaaatttttgttttgacaaactttctgtgagccaagcttgtggacggagatgaaaagacgagcagctgcctttgagaaactcagactctgggccagcccatctgggtgccagctttcactgctccacccactagctgggtgaccctgggcccgtgactttacccctctgttctttggtgttctcatatgtaaaatgaggataataatagtaaccagttcatagagtggttgtcagacagaatgattaatgtacgtaaagctttcaggatggtgccagcaagatgcacaggagtgtttggtaggaggatgacgaagcttaccgtctggcaggaggggcagttgtaacatgctgggctgtgatagtacagatgtgtttaaagtgagggagagcccagagcaaggagagagaacctggcatctggtgatggtgtatcaagaacattttaggccagacacggtgactcacacctgtaatcccagcactttgagaggctgaggcaggcagatcgcttgaacccgggcgttcgagaccagcctgagcaacgtggtaagaccctgtctttataatttttttttttttttttctgagacggagtcttcactctgtcacctaggctggagtgcggtggtgctatcttggctcactgcaacctccacctcccgggctcaagtgattctcctgcctcagtctcccaagtagctgggattataggtgcccaccaccatgcccagctaatttttttatatttttagtagagacggagtttcaccatgttggtcaggctggtctcaaattcctgacctcaagtgatctgccctcctcagcctcccagagtgctgggattacgggcatgagccaccatgcctggcctctataaaaattgtttggaagaaattacctaggcctggtgatacacacctgtagtcctagctactcaggaggctgaggtggaaggaggtagaggctgcagtgagccatgattgagccactgtactccagcctgggcaacagagccagaccctgtttcaaaacaacaacaacaaaaacatttttaaggaggaggctgagaaccacgagaaccaagcttggatttgaagaaggatcagggctttctcagacagaaaaggagaggaagaacattccagatagacatcattgagagatggcactgagccttgtaatgggacactgcgaacttttcttcagttgttatgatctttttttttttttttttgagacggagtttcgctcttgttgcccaggctggagtgcaatggcgccatctcagctcaccgcaacctccgcctcccaggttcaagcgattcttctgcctcagcctcccaagtagctgggattacaggcatgcgccaccatgcctggctaattttttgtatttttagtagagacggggtttctccatgttggtcaggctggtctcaaactcctgacctcaggtgatccgcccgagtcggcctcccaaagtgctgggattacaggcgtgaaccaccgtgccttgttggtataattattagtattgatcttttttccttttcatgtgcctcttagtgggccccttgcttttgtcttccttctgtccccagggttgatcctgtgctcagcacataggccagggaagaatgtggctgtgacccagtgtccactcagatgtcctctctcccccagggcacccatactctgtccttagtgtcttttgtctggtgacatcttggcacagaggcagagggcggcctccgtctgattggcgcctggctttggtgacagtaccttaggaaggcagtgtattttctgggaacctaggaaataacaaggtatctaattccatcatcaacactggggacaatttccatggcagaaactatgactctgaatatgcagcgtaaagttaccacccagacactgctgctcctgagtctcgaatggcatcttctgcaggggctcccccacctgcccctgcagaaggtgcagttcgttcatttccaaggagcttgcttttgtgtgctgtctctcggagctctttgggaaacctgtggtagcaggaaacaaaggatttagaccaatgccgatgatccccttgctccgatagagtgtgacatgatgctggtcaccttttggtatctaggaggggggacattgattttgtttgcggaagtgaaatgatccatgctggcctctttttttttttttttttttgagacagagtcaccctatcgcccaggctggagtgcagtggcgcgatctcagctcactgcaacctctgcctcccgggttcaagtgattctcctgcctcagcttcccgggcagctgggactacaggcgcctgccaccacatctggctaatttttgtatttttagtagaggcagggtttcgccatgttggccaggctggtctcgaatttctgacctcaaatgatccgcccgcctcagcctctcgaagtgctgggattacatgcctgagccactgtgtctggtccatactagcctctttgagtgctgaaaggttatctctgtaacttatttagtgagaaccctccatttgcccagggcattactgcctataatgtatgttcacatgtgctatctcctttggtcaataccacacactacaggtgaggaaactgagtctctgctgggacactgggtcaggaagcaggcagttaaggtcacctgtgcacagtggcagcacagggggacagccttctaggtagccagcctggcctgagggttctgtcacttttacctcccactcagtgttgtttctctttctttcccctccttttaagatccctccaggcccaggatctggggacaacgctggtggggagtgatctgggtgtctgtgcaggaaaccgctgcactgggtgagatgggcatgggagactgtgcctggctgaccagagacctcgttttcttccagacagagggggaagacggtggggcctccccacctgccccgcagaagatgcagttctttggccgcctggtcaataccttcagtggcgtcaccaacttgttctctaacccattccgggtgaaggaggtggctgtggccgactacacctcgagtgaccgagttcgggaggaagggcagctgattctgttccagaacactcccaaccgcacctgggactgcgtcctggtcaaccccaggaactcacagagtggattccggtgggtgatgctcagcgggaacatacttctctcctttcactcccccacgtctcggattggaggtcttattggccgagaagcagtttctttgagtctctgtctgaggggtctggagaggggtgggagagaggggagactgtactcttggaccagagggaagggcttccgagactccacacttctggcccatcagtgtcccagcacgaggctgaggatggaagcctgggttgtttctggcctggaggctcgacctatatggacaaagggaagaaggaaggacagggagactgagagtgtccacatcagataaggcccatggggagaacctttagccctggctctttatttttggttttggtttttgttttttgagacagtcttgctctgttgcccaggctggagtgcagtggcgcaatctcggctcactgcaacctctgcctcccaggttcaagcgattctcctgcctcagcctcctgagtagctgggattacaggcacccaccaccacgcccagctgatttttgtatttttagcagagacggggtttcatcatattggccaggctggtctcaaactcctgacctcaggtgatctgcccaccttggcctcccaaagtgctgggattgcaggcgtgagccactgcacctggcctagccctggctctttaagggcatggccgttctcataggggctgcccagggtttgcttaggaaggctggacagagctgttgcctcttggggcatgctgggactcccctgggcctgaagagaaggctcaaaagccaggacaggcctgagggaaccgggccaacggcagagctggttgggaaaaggggagaagcagccaaggttccaaatgcaggccccagcagtgcttggcagactggcatctagttgggctcagacagatatccctgtttccgctcacctatccatctggctgtcctgtcagccatccattcaacatgcaccaagcacctccagtgtctccagagtcctgggcttcgggccagtcctggctggcctgtgagatgacaaacatgtcctgtgtctttaaggaacgtacagtctggtgggggaggtccggtgcaaacaggcgtcatagcaccccttgaggagtgctgtgacagagggagagcctaggaaacagtgtggatcacaaggaggtgattgagagctactctgcgtctggaagagtgaggaggagcctgtgtggcagaacaaaatggataaggtcgttccagccgtgcagaagtgtggaggtgtgagcctgcaggcaggtggctctggttggatcccaggtgcatgcagggctttggtgagagtgaggctgaaggaagcagctggggactcattctgactaaagaggcatggcaggaggggtctctgaaagtgtcaggctgggggccaggggctgccaccaacagaagagcaaggcaggtatcagggccccatccaatcaggtgagaattcagagcctggctccacaaggaacctgaggcagaggcacccacagcaggtgcttgggctaaatgcagctcagtggccagtgcaggcaccagttttaatacagtggggccattccagattctgagtgcagatggggctgagcagaccgccttccagctggactcgatcaggactgaccctggacggggcaggcttgcacttgtagcttcagagctccactgcaggcacagctgaccagggcagcgggtccactccttggagagctggacagccccacttttgaggtacacggccctggggataccactaatctccacgtaccaataatcaccaagttctgtcagttgtaaaatcccttgacaggattccagatttgtctcagccagcttaagccccagtgtgggcagacctccatcccaggaggatttagtcctttgtcagcagcttcttagctacacgtaagctattctgtggtactttatagtttacaggattttttgttttcttttttttttttttttgagacagagtctcgctctgtcacccaggctggagtacagtgacgcgatctcggcttactgcaagctccgcctcccaggttcacgccattctcctgcctcagcctcccaagtagctgggactacaggcacccgccaccacgcctggctaatattttgtatttttagtagagatggggtttcaccatgttagccaggatggtctcaatctcctgacctcgtgatccgcctgcctcggcctcccaaagtgctgggattacaattttacaggatgtttttaagtatgttgggttagcacattctctgccaatccgtggaggtgggcaaggaaggcagtattccattttatgcatgagaaaatagccttgggatgataagtgattcatcccacttatacacaggaagcagtgaagaaacagaatcagtgtcttctggttcccaattcatttctctgtgctgctgtgttgtttccatgtatgtatgtatgtatttatttttttgagacgttaagtcttgctctgttgcccaggctggagtgcagtggcatgatcttggcttacagcaacctctgcctcctgggttcaagctattcttctgcctcagcctcccgagtagctgagactacaggtgcgtgccaccatacctggctaatttttgtgttttttagtagagacagggtttcactgtgttagccaggatggtcttgaactcctgacctcgtgatctgcctgccttggcctcccaaagtgctgggattacaggcatgagtcaccatgcccggctttgtttgtcttatttctaaattttattgatttatttattttcacagtcatagctctggagtcttttttatcttctcccctctaacctgctcccacccgaacctttccatttcagcagatagcatcattgcaacgggctgtgccagatccagccatcacatccacctttccagccaaagggagggtggaagggcaggatgcagaaggtcaatctccccctcctcagggacatttcatggaagttgcacgcattggccagaacccggtcacatggccacagctaactgcaaaggatgctgggaagtgttgcctgtgttgcagacagccacgtgccagtcgaaaatcagaggttctttctccctccgtcttgctgctggctcgcttctccagaccacagtcattgtgcacgtgtctcctgctgctccggctgtggcctgcactcctctcatcctcttccaagctgctgtcacagcgctgtttccagagggcaaatctgattggtcactcccctgctttactccccaagggcttcctgttttcttttatttttatttttattttcattttttgagatggagtctcgctctgtcgctcaggctggagtgcagtggcacaatgtcagctcactgcaagatctgcctcctgggttcatgccattctcctgcctcagcctcccaagtagctgggactacaggcgcccgccaccacgcccagttaattttttttgtatttttagtagagacggggtttcaccatctactcttagccaggatggtctcgatctcctgaccttgtgatctgcccgcctcagcctcccaaagtgctgggattacaggagtgagccaccgcgcccggccagcttcctgttttcttaacacatcaggtgcttaatgacttaaaagggcccagtgtgatcaagtttctgcctctgtgttctcagctcatgccgccttgtgctcctggcctttgcccaggctcttgctgtggcctggaatactcccctttctttgcctgccttccttcctcttgccctcccctgacctgcaggctggattaggagtttctgctgggcatcccatggcacccgtccctgcactggggatcctgctttcctggtaggccacagaccttgtgaggggagggactgtgtctgttgggttcatgacagtgtgcccagcccccagcaggtgcctggcgtagatcaggtttgtggaacaaatgaatgtgatatattaatttagctttagagtattcattgagggctgctgtgtgccaggccctctgtgccacctgggtggagggtggaggactgttgcattgagggcagttgaaggagtgagctgggaagtgggaggtggaggatggggactgggatgcagggtttgaggttatcaggggtcccagaagcagtaatgccaaggcctaggctgtgacctggagtgagggctgcgatggggtggggtggggtcgaggctgtggaggagggtcatcagggcactgctggagccctggggttctccagggccgggggtggtcattgcagtgttctcccagctcctctcaacaccctgcggtctgtggagagcaggcctggtgcactggacttgcctctggccagggctgagtttctgccttctaaacgatcttcctcctgtgttgccctagaggcctctggactgtcctgagtacttgacgcgtgttagagtgagcatgggctgctagccttccgctccaggtggaggagtttctgttgttcttttgctgctgttgctgcagtgagctgccaggctgagcttctggatggacctgggggatggaattaggagcttctgaattcttgggttgtataacctaaggccggagagtcccacagcactgctgctgggcggagagactggaccctgctgatacagacagcgacagcagcaggagcatctgcagtttcccagcaggtcctgcatgcctgggcttggcactagtctaagtagtaactcatgttatcctcacgacagtcccacgaggtggggtcattactgacctcctattacagatgaggaaacagaggcttgcagaatttgagatcacacagctggtcagcgtagcgattattcagaccctgtcacctggctccagaacccactcgtttacctttcttacatcagggctgctttgtagtgtggcgagctgagtggagctccacccgcctgggctgatcctggcccttcctgcctgacctatggtgcgggggccctggctctccccgtgtgagcccccaggggtcacttgtaatatgcctgtgtacactatgatagcatagatacttctgttcctggtacagattaatcatttacggctggcattgacttgtaacagatgacatttgatgaaatcaaccagcctctcactggtatctcagcagaaacagggctgtacctcccaggcatcctgggaaggatgatagaagtgtgtgatctgtgcttccctaccgggagctgacttttgaggctctctggactgggactttgccataaaactgcttatcagaaacctcagataagtggagtgccctgtgtcctggccacgtactctggggccagctcctccatccattcagtcctcccacatcccatcttcaccaagcagagtggaaagcggcaggtctctgcgagaaaaggaggctctgtacccagccttcagtgagataactttagagtggggccttgtattccctacacaggccttgtccccgacacggcctctttgcccttgcttctccttctgctaagaatgctccttcccaactccttggctggacacacggctcctgctctgtgggcctgtcctgttcccactcagagcctcagcaccccccatgtggccaagacacagcccctcttgccttaggttgccgtgggtctgtttccacatctgtttcccctccagactgcagggctcctgagggacagggcctggggccaagtctcctctgcgttcctgatgcctggtggtgtgccacgctctccgtgggtgcacggtaaatatctgccgagtggctagatgtatccatggttgctgaaggccaagtgtgttgaccagagggcgtgggaaaggctccactggggtggctggggtagagatagaccttaaggggtccagaagactccaccagctggagggaaaggccctacagagacaaggtactaggaaaggcccagaggacagaggaggggccctgtggggagcctgtgggcaggaagggcctgtgctgggctttgaaactggggactcaggtactgctctagcgtgagggtccttggcattttttttggtccaggaccccctgaggtccctggggaatgagaacaggctcacacagccactttcaagaggtttgcaggtcccctgaggcttagccacagacccctcccaccccagcagagacacagcagaggcttctgagtggaggccaggtggcttcagcctggggttctagaagggagggaagagacacacccccgtgtgtcctccagagcctcagccttctccctgaatctcccctttgcctcctcactgtaacccacacctggctctccttgaaggacccgcttgccccgcagcctcctgagagttttctctcccagtccctctcccactgggcctggaggtggggtagggtcctccttgcccccagccttgaatcttctgtcaccctacaataccacttgctgtcaccccggtgataggtatctacgagcctggggtgctcccccacatcctcaaagatgtgagcccctgactcagcgttgcctctggttcctgaccctccacattcacatgaccacgcgctggcctttatcatcgccagtgacagcagctctcccgtaaatacaagtttcaagcaccccactttccagtctctgccttctgtctttccagttcattccctctagtcctccacccacacagtgcttttccccattgacagggaattgctcctggccgcttttcccagccccatcccgttcatgtgccttgctttgtacccagcatggactccatggcctgtcattgtcactccttcacctatacttcctgcctccttgcttctctctctcttcgtcatcctggcatcaccaccccagaactgcttggtttcagttctccaccatggctaggggaacatacctttttgctgactgctctcactttctttttttttttttttcttttttttttttttgacacagagtctcgctctgttgcccaggctggagtgcagtggcacactctcagctcactgcaacctccacctccggggttcaagcagttctctctgcctcagcctcctgagtagctggtattataggcacccgccaccacacccggctaatttttgtattttttttagtacagacagggttttgccatggtggccaggctggtcttgaactcctgacctcaggtgatatgcctgccttggcctcccaaagtgctgggattacaggcatgaaccaccctgcccggccctattgctctcactttgaaatcacgacatgagccacagtgagcctatgatgtggtttgacgtctttctgcatttctctgttcacccctctcccagaaggcatgcctccttccctcccctcagcctgcagccccttcccctccacgcttactctcagctgatagccctgctgctgtctcgctgagaaaatagaaatagccagaggagaattccctctaccccatgcacacacctctgtccccgcctactccacattccctgttgtcagcaccgatgtgtttagctgagggtggtccccccattcaaggccatcatctcctgtcatctacttcttgacaccatttgaacaattatctcccctctttcctacataacactttccccttttctactatatattttttgctatggattgaaagtatccccccgaaatcatatgttgaagccccaatccctcgtgtgatggtattaggaggtagagcactatgggggtgattaggtcatgaggatggagccctcatgaatgggattagtgcccttagacgaagaggcaagaaagagatgatctgtctctgccatgtgagggcacaacgagaagatagccatctgcaaaccaggaagtgaaccctcatcaggaactctatcagccagcaccttgatcatagacttcctagcctctagaactgtgagaaataaaggttgtttaagcctcccagtctgtagttttctgttataatgtcctgacctaagttattttccatcgctatacaatgggttatttttttctttaaaaaaaaattatttcttgactctactttttcctccagagactgcttatattccactgtcttcattcttctcctcctgttttctctctttaaacttttcaaaaatagcaaaatataacacatatagagaaaatgatatacagctcagtgatttatcacaaacacctgtgtaaccaccactcgaatctagagataggacattacagcaccccagaagccctccttttgtcccctcttcccaaagaagggtaaccaataacttgccttttatgataaaggctttttttttttgagatggagtctcactgtgttgcccaggttggagtgcggtggcgcaatctctgcttactgcaagctctgcctcctgggttcacgccattctcctgcctcagcctcctgagtagctgggactacaggtgcccgccaccacgcccggctaattttttgtattttagtagagacgaggtttcaccgtgttagccaggatggtcttgatctcctgacctcgtgatccacctgcctcagcctcccaaagtgctgggattacaggcgtgagccaccgcccccggccaagataaaggcttttctatctggcttctttgttagcattttgttggcgagattgatacgttttgtgtgcagctgtctgtcattttcattgcaatagaattccattgtctactatatcacagttactcattctactactgatgaaaatttgggttatttctagtttttttggtgcatacatgcatacatttctggtagacatacctagaagtgaactggctgcattatgggccataacttgtcttcaacgttagtaaataataccgcccgtctgttttccaagcagcagtaaatggcactttctgttacttcatatcttctgttacttggtactgtcaggttttaaaattttagtcattctgtcgggtgtctagtagtatgttattgtggttttattttgcatttgcctgattgcaaatgaagttgagcactttttgatacagtgattaaccatttggatatcctcttcagtgaagtatcagctcaattctcttgactatttaaaaaataaagttgtttatctttttcttacagagttttaggaggagttttttggtacatgtgcagtccaaatacacaccttttgtcagtgatacgtgttcagctgcacacacggtgttttgcctttttattcttttaatggtatctattgataaacatgagttcttagttttaatgaagtcaaatttgttcatcttctttacggtgtactttttgtgtcttgtttaaggaagtccttctctatcttaaagctttgagaagcattccttctttctcctattttctaaaaattgttgaagatctccttccttccttccttccttccttccttccttcctttcatctatctctctctcacccaggccaaacttcagtggcatgatcatggctcactgcagcctcaacttcccaggctcaagtgatcctcctgcctcagcctcctgagtagccaggactacaggcacgcaccaccatacctggctaattttaaaaattttttgtagagacacggtctcatcaagttacccaggctggtcttgaactcctgggctcaaacaatcctcccacctcagcctcccaaagtgctgggattacaggcatgagtcacatgtctagcctgtattctttctttcttaaatgtttggaagaattcatgggtaaaaccatgtgaccctggagtttatttgtgggaagcttttaaaacatggattcgatttctttaacaaatataggactatgagattttcatctcatgtcggtttgggtatgttgtgttttcaaggaatttttctattttatcgaagttgtcaaatttgtctgcaggtccccttatttcctttttaatgtatggaggatctgaagggatggtactttgtgttgtctctatttcttgtttggttttgctagtgatttgccaatttaaaaaatctttccaaagaaccaacttttggctttgtttattttttgaaaacctgagtagctgggattacaggcgcccaccaccacacccggctaatttttttatttttagtagaggtggggtttcaccatattggccaggctggtctcgaactcctgacctcagatgatccacccgcctcggcctcccaaagtgctgggattacaagtgtgagccagtgtgcctggcaagccgctttttaaatggcaccaatcccattcatgagggcagagccctgatgatcgaattacctcctaatggccccatttcttaatactatcacactgagaattaagttttaacataagaattttaggaagacacaaacattcagaccatggaacatatataaaacagttgtcctaccaactaacagaatacacattcttttcaagaacacctatataaaaattatagacactgacctatgctggccataaagcaaatatgaacaaatttcagatacctgaagagatttagactatgttctccaactacagtgcaattaagctagaaatcaatagcaaaaatgtaactataaatgagcccgtatgtttgaattttaagcaagatatatgtaaattatctatggttcaaaaaagaagtcacagtgaaatttagaaaatatcttgacgtggcgggttgcagtggctcacgcctgtaatcccagcactgtgggaggccaaggcgggtggatcacctgaggtaaggagtttgagaccagcctggccaacatggtgaaaccctgtctctactaaaaatacaaaacattagccaggcgtggtggtgggcacctgtggtcacagctacttgggaggctgaagcgggagaatcacttgaacccgggaggcagaggttgcagtgagccgagattgcaccactgcactccagcctgggcaacatgagtgaaacttcatctcaaaaaaaaaaaaaaaagaaaagaaaaagaaaatatcttgacccaatgatgatgcaaatactacgtatcaaacttgtaggatgaacttccacttctggccatgacagaggagcctgtatcagactagccttcctatttatatatttatttttgagatggggtgtcgctctgttgcccaggctggagtgcggtggtgcaatctcagctcactgcaacctccacctcctgagttcaagtaattctcctgtcccagccttccaagtagctggaattacaggcgcccaccaccacacccagctagttttttatatttttagtagagacggggtttcaccatgttggccaggctggtctcgacacctgacctcaggtgatccacctgcccctgcctcccaaagtgccgggattacaggtgtgagccactgcgcctggccgtgagtgacctttttaatgtgttgttgaatttgatttgctggtattttgttgagaagttttgcatcaatatccatcagggatactggcctgtagttttctttttttatatgtctttgtctggttttggtgtcagggcaatactggcctcatagaatgagtttggaagttttctctcctctgtttttcataatagtttgagtagggttggtattagtttttgtttaaatgtttggtaaaattaagcagtgaagccactgggtcccaggcttttctttgctgggagacttttcattacagctttgatctcattacttgttattggtctatttaggttttggatttcttcacggttccatcttggtaggttgtgtatgcctaggaatttatccatttcttctagggttttcaatttattggcatataattgttcacagtaacctctaataatcctttgagtttctgtgatattggttgtaatatctcttttgtcatttctgatttttttgtttgggttttctctctttttttgttagtctagttaaagatttattgattttgtttatcttttcaaaaaactttattttgttgatcttttgtattgttttgtttcaatttcatttatttctgctatgatctttattatttcttttcttctactaattttgggtttggtttgctcttttctagttctttaagagacatcattagattattttgaagtttttctacttacttgatgtaggtgcttataggtacaactttcctcttagtacttctttccctgtatctcacaggttttgatatgttgtgtttccattatcatttgtttcaggatgtttttaaatttccttcttaatttcttcattgaccattcaagagcatattatttcatttccatgtgttcgtatggtgtgcaaaataccttgtttttgatttgtagttttatttcattgtgatcacagaagatacttgatatgatttcaaatttaaaaagtaatttggctgggagaagtggctcatgcttgtaatcccagcgctttgggaggccgaggcaggcagatcacgaggtcaggagatcgagaccatcctggctaacacagtgaaaccccgtctctactaaaaatacaaaaaattagccaggcatggtggcaggtgcctgtagtcccagctactcaggaggctgaggcaggagaatggtgtgaacccgggaggcagagctggtagtgagccgagatcgcgccgctgcactccagcctgggtgacagagcaagactctgtctcaaaaaaaaaataataacaataataataatttaagacttgttttgtggcctaccatatggtctatccttgagaatgatccatatgctgaggagaagaatgtgtattctgcagccgttggatgaaatgttctgtaaatatctaataggttcatctgatctatactgcagactaaggctggtgtttctttgttgattttctgtctggatgaactgtctaatgctgaaagtggagtattgaagtctccagctattattgtattgaggtctatctctctctttagctctaagaatacttcctttatatatctgggtgttccagtgttgagtgcatatgtatttaaaattgttacattatcttgctgaattgacccttttatataatgaccttctttgtctctttttatagtttttgtcttgaagtctgttttgcctcatagaatagcatagctattcctgctcttatttggtttccatttgcatggaatatctttctccatccctttagtttcagtctatgtgtgtctttacaggtaaagtgtgtttcatgtaggcaacagatcactgggtcttgtttttctatccgttctgccactctgtgtcttttgattggagagtttagtccatttatgttcaatgttattactgacaagtaaggacttactcctgccactttattaattattttcttgttgctttgtgatcttctttctttccttcctgttctccttttagtgaaggtgattttctctggtggtatgttttaatttcttgctttttatttttttgtgtgtatctgctgtatgttttttgatttgaggttaacatgaggcttgcaaataatatcttataacctaatattttaaactgatgacaccttaacactgattgcataaacagacaaacaagcaaagagaaaactaataaaaactctacattttaactttgtccccccactttttaacttattgtactgtttatgtctgaaaagttgtagttattatttttgattggttcctcttttagtctttctactcaagatatgagtggtctacatatgacagtgttataatattctatatgtttctgtgtacttgctattaccattaagttctgtactttcaagtgatttcttattgctcattaatgtccttttctttcagattgaaaaactccctttagcatttagcagtatgtgaactgcatttttcaagtccagaatttctgcttgattcttttttttttttttgagatggagtcttgctctgtcgcccaggctggagtgcagtggcgcgatttccgctcactgcaagctctgcctcccgggttcacaccattcttctgcctcagcctcccgagtagctgggattacaggcgcccgccaccacgcctggctaattttttgtatttttagtagagatgggatttcaccatgttagccaggatagtctcgatctcctgaccttgtgatccgcctgccttggccttccgaagtgctgggattacaggcgtgagccactgtgcccagcctgcttgattcttttaaattatttcaatctctttgctaagtttatctgttaggattctgaattccttctctgtgttagcttgaatttcactgagttccctcaaaacagctattttgaattctctgtctgaaaggtcacatatctctgtctctccagaattggccactggtaccttaattagttcatttggtgaggtcatgttttcctgtatggtcttgatgcttgtgatgttcgtcagtgtctgggcattgaagttaggtatttattgtagtctttgcagtctgggcttgtttgtatctgttcttcttaggaagactttccaggtaataaaagggacttgggtattgtgatctaagtttttggtcactgcagccatatctgcattagggggcaccccaagcctactaatactatggctcttgcagactcgtaaaggtaccacttgggtggtcttggataagatctggaagaattctctggattaccaggcagaggctcttgttctcttcccttactttctcccctaaaagtggagtctctctctctgtgctgggccgcctggagctaggagaggggtgacacaggcacctctgtggccactatcactaggactatgctggctcagacctgaagccagcacagcactgggtctcacccaaggcctacagtctccactgcctggctactgcctacgtttgcttaaggcactagggctctacagtcagcaggtggtgaagccagtgagattatgtccttcccttcaaggcagcaagttccccctacccccatcctgggaaggtccttagatgccatctgggaggcagggcctgcagtcagaaaccttagtaatctccccagtgctctattctattacagcctggctgatacccaagccataaggcaaagtccttcctgctcttccctcccctttccacaagcagagaagtctctctccatggccaccactgccccagccctgtggcagtgctgccaggccactgccaacgttcattcagggcctaagggctcttgaagcaactgaacactgccaggcctgggactctccctttagggtagtgggctcccctctgacccagggcaggtccagaactgccaccccacagccaacacttagaatctgggaccccaagagccctcttggtgctctgccacactgtagctgagctggtacctaggctgatttttgctttttatgaaggtacttttttgtgtgtatagttcaatttggttttcctccagggaggacaattggtggaggtttctatttgggcatcttttttttttttttttgagacggagttttgctctttcacccaggctggagtgcagtggcgcgatctcggctcactgcaacctctgcctcctgggttcaagcgattctccagcctcagcctccccagtagctgggattacaggtgcctgccaccatgcttggctactttttttttcaattaaaaagtaaactttaatgtcgaaaatgcaaacttggggaaggcagaaagatcacacacaaggctgtcgcttcacacttggaaggttgcacggcggccaggagaggcactcctcacttcccagacagggcgggggccgggcagaggcgctcctcacttgccagacggggcggcggccacatgcctggctaatttttgtatttttagtagggacggggattctccgtgttggccaggctggtctcaaactcctgacttcaggtgatccacgcacctcggcctcccaaagtgctgggattacaggcatgagccaccgcgcccagccctatttggccatcttgctttgcctccaccttcatttgataacagaacacccccatgtaaccaccaccacaatcaagatataagacatttctgttattctccaaatttccttcaccctcctttatagtccatggcacccaccccatccctgggcaacacctatgtgcttcctttttttttttccccgcaggaggacgtcttcctatacctatgtgcattccatcactgctgcttttaatcatatagcgtgtagtcttatgagtctgactttttcacttagcataatgcttttgcaatttgtgattgagcgttttcatatgattctgttttttctgtctcttagcttggaagttatacactttttagtagtaactgttgggagatcgttctccaagagtctctctcatatttccatacatcctgctagcagagacattgactacctgtttttgtctgtttagtgttgctataaaggaatacctaagtctgagtattatacatagaaaagaggttttatttgtctcatggctcctcaggccatacaagaaacatggtgccagcatcttaccagtgtcacatggcaagaaaggaagtgaggaagagaaaataagttgttaactggttgttaaaaagtgccaggcacgggccaggcacagtggctcgtgcctgtaatcccagcactttgggtggccaaggcgagtggatcacctgaggtcgggagttttgagaccagcctgaccaacatggagaaaccctgtctctactaaaaaaaatacaaaaaaattagctgggcatggtggtgcatgcctgtaatcctagctactcgggaggctgaggcaggagaatttcttgaatccaggaggtggaggttgcagtgagccaagatcacctgggcgacaagagcgaaactctgtctcaaagaaaaaaaaagtgccaggctctttttaacaaccagttcttacaggaactaatagagtgaaaactcactcacccccaccccacagggagggcattcattcatgagggatccacccctatgacccaaacacctcccattagccccccacctccaacattggaatcaaaatttaacatgaggtttggggggcagaaatccaaattatagcactacctttgttccaggctaccttcaaaggatgtttatacagcaaacagccttggaaaatagagttagggtctccttgtagagcacagggtaagtttgcttacttttcagcataatcaagattgtgtcttcttctggagcaaaactttgacaacaacaagcggggcaaagtctgaaaccttttgcacatcttgacagaaccttagagattacgagatttatctctgccttactcaaggtccattagtatcttccagaacaataagttggtcttagaatcctttagctatgtattcccttccaggcttcgatgctgtgtgctgttgttttatttagtttttattttaaacccaacaagacgctataccatcaatacttatttagatccccccacatatttaacttgccatggtgcttcattctttcatgcctctttaagcatccatctaggatcgtgttcattccacatgaagagaaagcttttggcccagcacgatggctcacacctgtaatcccagcactttgggaagcctaggcgggaggatcgcttgagcccaggatttccagaccagcctgggctacgtggcaaaaccctgtctctactgaaaatacaaaaaattagccaggtgtggtggttcacgtccctgctactcgggaggctgaggtgggaggattacttaaacctgggaggttgaggctgcagtgagcgttgattgcaccactgcactccagcgtgggtgacaggagtgagaccatgtctccaaaaaaaaaaaagaaggaaagaaaaagcttttgtatttcctttcgtgtaggtctgctaatgacaaagtctctgggttttttgtttgactagagaaatgttttaattttaaccttattcttgaaggttttgtttttgttttcattttgttttgtgtgctaagtacagaattctcattggcatttatttatttagagacagagtcttgctctgtggcccaggctagagtacagtggcacgatctccgcctcccaggttcaagcgattctcctccctcaacctcctgagtagctggggctacaggcatgcaccactacacctgactaatttttgtatttttagtagagacggggtttcaccgtgttgcccaggctgatctcaaactcctgagctcaagtgatttgcctgccttggcctcccaaagtgctgggattataggcatgagccgccgtgcctggccagcatttattttcttttcagctctttaaggaagtcattccattatctctgggttccattgttgagaagccagctgtcattctaatggttgccctttgaagataacttttttccctctgctattttaaatatttcctccttgtattttattttcaacaggtgtaatgtggcacatatatcagcaattgttatgttacatacaatacatattgtgcaacatatgtatcattatcagttattgctgtgtaacaaactactccagaacacagtggcttataaaaggaatcatttatttagtccttaaatctgcaatttgagcagagctcagtgggaaagcctcagctttactttatatggcaccatataaggtaactcgcaactggcaagttggtgctggctgttggctggtagttcattcagggctcagggcccaggaccaagagtcgtcaccatggcttgcttcagcctccttgaggcatgatggctgggtcccaagagaagagaaatagaaacttccagtctcttaaggcattggtctggaagctgggacggcatcacttttgccatattctgttggtaacgcagttacatcgccagattaaagggtaaagagatacaaattcccactgctcagtgcaaggaatatcagtgattttagggggccctgttttaaaacccctacaaggtgctaagcgtggatttctggggctttcttgttttttgtttttttctatgtgtttttttttttttttttggtggtggggtcagggagggcttatagggtatgttaaatcagcagaataattttatttatttatttggagatggagtttcactcttttgcctaagctggagtgaagtagcgtgatcagagatggagtttcactcttttgcctaagctggagtgaagtagcgtgatctcggctcactgcaacctccgccccgctggttcaagcaattcccctgccttagcctcccaagtagctgggattataggcacccaccgccacgcccggctaatttttatatttttagtagacatggggtttcgccatggctagtctggaattcctgacctcaggtgatccacccaccttggcctcccaaagtggtgggattacaggtatgagccactgtgcctgacctataatgttttttaaaaatcagttttggaaagtttgcagacattaacttttcaaatgtagcttccatttgattctttttctactctgcctctgatcctccacttatgtatgtatgctagatcttttattagatagtctgtgtctcttatgtactctactatattttgtattcttctgtctctccatgctttattctgtttactctttcctgattatattttttaattttgtaatttccatttgatgcttttttgatcattcaaaactcttcaccaaaattctaaatttccttttttaacctctcgaatgttatcacagttactttaaagtctattttggataacttaaatatttacagtcccctcacagatatgtttcttttgtatattgtttctgttggttttctttcatgtcttatctccacatatgcctggtgagttttgattatgtgttggtcattgtatttgcaagtatgctcgtagaaataatctggaatggccgggcgcagtggctcatgcctgtaatcccagcactttgggaggctgaggcaggtggatcacgagatcaggagatcaagaccatcctggctaacatggtgaaaccccatctctactaaaaatacaaaaaattagctgagcatggtggcacgttcctgtaatccctgctactcgggaggctgaggcaggagaatcacttgaaccaggaggcagaggttgcagtgagccgagatcacgccactgcactccagcctgggtgacagagcgagactccgtctcaaaaaaaaaaaaaaaaaaaaaaaaagaaataatctagagcctagtttgatgtttccttacaaagaatgaatttatttttgcttctcccattgcaactaggataacctcagtctagtttctggaactgaaatcacttgaggctgaactgtggtctctgtgagagcgtgtctgtgtatggctcacccttattcctaggctacgtagttctttaggaccctaacccaaagtaagagatgttcatcagggctctcctcttggcagacgcctgggctccagtccctgtgtcctgagccccatgaggctgttactggtgctgctcgtctgcccatcctctccagtaacagccacctgaacactgcaattcctgggtttccatcattccttccagcctggtgagtcatcagtgtcttttgaggtatccagtgcctgccagcagatgttttttaataatttgtccagcatttctggctgtcctcagtaggtggtctgtttcacattccctagtctgctgttaatggaaagtggaagttctgagagagaatcatcgttcccgtcagcattcaaatgcctgattacactttccccattcgctatcctttcctttatttgctcctcaccacagcaaaactcctcaaaaatatctatctttgcaatcttcagattctcacattgtgtccttaaacccactttaatcaggccttggttccctccattccactaaaagtaatgttgtcaaggtcgtgcatgcctccgtgatgctaattccagtgatgagttttcagttgtcattctctgacatatcggcaacacttgatgtggagtaccctgatgttgagaggctggtgagatgaaggaaaaacccagccaagggcaatgaggaatggcttccttccgcctcctccttccctatctttgttgtggtttttgttgtttctgtaacactgattacgttatagtttatttaatgtacttccttattctatgtttttactttagtcattttgttgatctcctccataataacataggctcgggccaagcacagtggctcacgcctgtaatcccagcactttgggagaccaagatgggtggatcacttgaggtgaggagttcgagaccagcctggccaacatggcgaaaccctgtgcctactaaaaatacaaaaattagctgggcgtggtagcaagcgcctgtaatcccagctactagggaggctgaagcaggagaattgcaggagaatcacttgaacccagggggcagaggttgcagtgagctgagatcgcgccactgcactccagcctgggtaacagagtgagactctgtctcaaaaaaaaaaaaaaaaaaaaggcttcaggagggcagagcattttatgcaattgttcattaattgacccctccatttggcacagatcacatgcccagtagttaactgttaatcaacgcactctctgtggaacaacaggctggtcccgttgagccaacactctctgggcactgccttcactagactctggctggctgctgcgcttgtagaggtatgcaagacaaaaccttttggtatgttaaaagccctggtcagaactttaagtaaccatcactgacatataatggttatggttttgaaagtgcttttatagtggtttttcatctgtcctcacagcacctctgggaggtaggtaggacaggtacagttagtctcatgtttcaaatggggctcagagagggaaaaggatttcccaagatcacacagcaccttagtagcaaaacttggactcaacctcaacacttaaaaatgaacaaagctggccgggcgcagtggctcatgcctgtaatcctagcactttgggaggcccaggcaggcaggtcacctgaggccaggagtttaagatcagcctggccaacatgacaaaactctgtctcttctaaaaatacaaaaaattagccgggcatggtggcgggtgcctgtaatcccagctactcaggaggctgaggcaggagaatcacttgaacctgggagatggaggctgcagtgagccgagatcgtgccattgtactccagcctgggcaacaagaatgaaactccatctcaaaaaaaaaaaaaagaaaagaaaagaaaaagaaaagtttccctttttttaaatatctcattttaatgactgcataatagtttattacatagttataccataatttatataatattttgttgctgtacatttaggttaaacaatacttacttagttcctactatgaagaggggccaagtactcgaggctggagctctcacatgtggcaatgaaattagaaagtggatatggcagggctgtggtaaaataaaatataaaaataataaatgatattaccaaagaaaaggaaagtttttcaaaataaaggaaaatctagacaagcatagtggctcacacctgtaatcccagtacttttggaggctgaggcaggaggaacacttgaggccaggagttcaagaccagcctgggcaacatagcaagaccccctgtcaacaaaaataaaaaaaaattaggccaggcacagtggctcacggtggctagtgcctgaaatcctagcactttgagaggctgaggggggtggattgcctgagctcaggagttcgagaccagcctgggcaacatggccaaaccccatctctactaaaaacacaaaaaattagccaggtgtggcagcacacgcctttaatcccagctactctggagactgaggtaggagaattgcttgaacccgggaggtgaaggtcgcagtgaggtgagattacaacactgcactccagcctgggtgacaaaatgagactctatctcaaaaaaaaaaaaaattagctgggcatggtggtgcatgcctgtaatcccagctactcaggaactaaggtaggaggatcccttcagcccaggaattcgaagatgcagtgagtcatgatcacaccaccgcaccccagcctgggttacagagcaagaccttgtctctaaaaaacaaagaaagtctaacctaaacgccattatgtcatttacatgtgtataggggtgtgtgtgtgtgtgtgtgtgtgtgtgtgtgtgtgtgtgtgtgtgtgtgtttgcttgggaggggagtcgggctggagctggccaggccgcagcctggggaccttctgattccagcagggatgtgggccgagggtcccgccttactcatttcgggtcttgctcctctgtcctggctctacagactcttccagctggagttggaggctgacgccctagtgaatttccatcagtattcttcccagctgctacccttctatgagagctcccctcaggtcctgcacactgaggtcctgcagcacctgaccgacctcatccgtaaccaccccagctggtcagtggcccacctggctgtggagctagggatccgcgagtgcttccatcacagccgtatcatcaggtgagcaagggaacaagaccatttggacaacgtgtgtgtacctgcttgtgtgggcagtgggggccgcaggcctcggttcccctccatagtttgacttaaaaaggagcagggcctggcatggtcgctcactaacgcagtcccagcactttgggaggctgaggagggaggatcacttgagactaggagttcaagaccagcctggcaaaatagcaagaccttgtctctacgaaaaaattaaaaaattagcatgtgtctatactcctagctacttgggatgctgaggcaggaggattgcttgagcccaggagttagagtttacagtgagctatgattgcaccactgcacttcagcctgggtgacagaatgagaccttgtctctaggaaaaaaaaaaaaaaaaaaaaaaaggtgctgcgttgctaccagattaaaatgtaagaaggacaatgtaatgtttccagagtccggagtgctcaccaggtgccaggtctgtgggagctgatttctacccaccatgaaattgaattttcccaacccccacaaggtatcgtcattttattttactttattttattttattttattttattttattttattttattttatgttacgttatgttattttattttgagacggagtcttattctgtcacccaggctggagtgcagtggcgcgatcttggctcactgcaccctctgcctcctgggttcaggtgattctcctgcctcagcctccggaatagctgggattacagtaatgtgccatcatgcccgggtaattttttttttttttttttttttttttgagacggagtctcgctctgtcgcccaggctggagtgcagtggcgcgatctcggctcactgcaagctccgcctcccgggttcacgccattctcctgcctcagcctcccgcgtagctgggactacaggcgcccgccaccacgcccggctaatttttttgtgttttttagtagagacggggtttcaccatgttggccaggttggtctcgaactcctaacctcaggtgatctgccctccttggcctcccaaagtgccgggattacaggcgtgagccaccatgcccggcccaggtatcatcattctagagagagctaacaggacttgtgcaggtcactcagccagagagggtgaaagaggggcttggatccttggtgtctgcccaggctgctcttctggaagctgaaggcctccttttgtgaatccattcagccagcagatggagcagctgttgcccctggtgagggcactgtccccacccttgcacagggcaccagttggccatcttgtgcagaggtagccacacctcctctgagtctctatcctagatagctcagttaagctcccaggcccagaactcaaaacctcactgctggccgggcgtggtggctcacacctgtaatcccagcactttgtgaggccgaggcgggtgtatcacttgaggtcaggagtttgagaccagcctggccaacgtggtgaaaccccgtctctactaaaaatacaaaaaattagcaaggcgtggtggcgcacgcctgtaatcccagctactcgggaggctgaggcaggagaattgcttgaacccagaggcggaggttgcagtgagccgagattgtgtcactgcattacagcctgggcaacaagagtgaaactccacctcaaaaaaacaaaacaaaacaaaaaccctcactgcactttagtttccaggcgtgcttttggacagcactgtctcatctcaccatcactctgtccatttcctggggcaggcacagcagcttgtgtcgataaggatattgacgcccagaaaggttaagtgaattgcctgaggctagtgagatatccgtgttctgtgaccctttcctgtgccaccaccctgcccacttcctgctggtgtggccctggggcccatctcttgtacgagtgagcaaactgaacagaaacctgatacaggtcacatcagatataattacattcaaatcagcccaactagctgagtggcgggaatgctcttgagctcaaataaaccagaaagtccgagtttccgagtgcacttccctgcatgtgcacttaggtccccctgccaccttgtaccacacctgctcacctctgctcaccctggccctctcctgcagctgtgccaattgcgcggagaacgaggagggctgcacacccctgcacctggcctgccgcaagggtgatggggagatcctggtggagctggtgcagtactgccacactcagatggatgtcaccgactacaagggagagaccgtcttccattatgctgtccagggtgacaattctcaggtgctgcaggtgagcagggggaggggcagggtgactggtactgatacctcccggtgtccacggttccctttgggcccctaggctcaggtgtcactctcaggcctctcactgtcccccattggtccttgaggcctgagctccttcatggagggtgcagacccctccctggctcttccctcccagcccttttccaggagccacgtcctcagtctctttgcttgataaacctggggacggcctccaacccagcaaaataaaccccaaaaaaggcccagctccagtcagttagttcagttccacttttcctgagcacaaactgtgagccagatgcctgcctggaggggctcgtgggccagcgggacctgggcttaaccttttgcaagcttgtccaatctgtggccctgcaggctgcatgcagcccaggacggctttgaatgtggcccaacacaaattcacaaactttcttaaaacattatgagatccatgcatggaccttttttttagatcagctgttgttagcgttcatgtattttatgtgtgacccaagacaattcttctgatgtggcccagggaggccaaaatattggacaaccctattttacaggaattcaaaccaagcaaaccaaactgtctccagttcctgtaggcatttgtgccagaggccctcctgttaacgtttttgattacctgggcaaaagatgtgattttttaattgtgggcaagcagatggggtgatactattaaatagctatttcatatattagattgaacagaaaaggcaggatgttggattatgttttattgtctagaattagaaaattcttctaaagatcatgttctctctgccttggcatcagaatgcaactacgttataccagaaaatgtggattcctttttttttttttttttttttttttttgagacagagtttccctatgtctcccaggctagagtgcagtggtgcgatctcggctcactgcaacctccacctcctgggttgaagtgatgctcgtgcctcagcttcctgagtagctgggattacaggcatgtgccaccatgcctgggtagtttccgtatttttagtagggatggggttttgccatgttgcccaggctggtctccaactcctggccttaagtgatccacctgcctcagcctcccaaaatgccgggattacaggtgtgagccactgtgcccggcccagaaaatgtggattcatatcttatgcttcttgctctcagggaagggaattctccacccactgttgaactccactttcaccgagaatcctctgcgcacccagcatggtgccgcgcagaccctgcctccatgcgggggtgtgcacacccgcttctcgatagtcatgcacgactgcagctgtcctttatccggtgctgattggtgcctgaccttgaactgagtgttgtatgtgttccagttaattcttagaatacactcatggggtggaggtcattattcccctttcctctccgaagaaactgaggttcagtgttgttaattaagaagcgtgcccagggagggccacaaagctgagagagtggggcttgaccttacattggcctcgatgccagccctttgctcttcctgctgtgtctctggcctgccttcaggtccagtgggactgctgtgaggtgaccctggtgtcacatgggtacactgtggttgtaatgaacctcatggggacagcactgagccaaaagtgagacagtaaaaccctcctagcactttcttttttttgagacagcatctagctctgtcgcccaggctggagtgcagtggtgtgattgtggctcactgcagcctcaacctcctggactcaggtgatcctcccacctcagcctcctgagcagctgggactacaggctcgtgccaccacatgggctaattttttttttttttgagacggagtcttgctctgtcgcccaggctggagtgcagtggcgcgatcttggctcactgcaagctctgcctcccgggttcatgccatcctcctgcctcagcctccagagtagctgggactacaggcgcccgccaccacacccggctaattttttttgtatttttagtagagacagggtttcaccgtgttcgccaggatggtcttggtctcctgaccttgtgatccgcctgcctcggcctcccaaagtgctgggattacaggcgtgagccaccacacccaggccacgccagctaatttttaaaatttttttggtaaagatggggtctccctatgttgccgaggctggtatcacactcttggtctcaagtgatcctctcacctcccagtgtgttggaattacaagcatgagccactgcgcctggcccctggctctctttttaatactgctgttctttcattgaaaacatagtacctgcatgtagaaaaaaatcagtcaggacagaatgaaaagcaagaatcattcccacctggacccccagtgcccatcctgagatacagctaccttttaagttccttgactcagaaatgtttcatgtgagccacagtcatgccaggtcgaccccttccctcccatccacactggcacttggctttcctggtgcttctctttacgttctttttttttagacagagtttttgctctattgcccaggctagagtgcaatgatgcaatctcagctcactgcaacctctgcctcctgggttcaagcgattctctttcctcaggttcctgagtagctgggattacaggtgcctgccaccatgcccggctaatttttgtatcgttagaagagacgacatttcaccatgttggccaggctggtctcaaactcttgacctcaggtgatccacccaccttggcctcccaaagtgctaggattacaggcatgagccactgcgcccggcctctttacgttcttatcagcatcctatggagtcaaacttcccttcctctttcatcagctccttggaaggaacgcagtggctggcctgaaccaggtgaataaccaagggctgaccccgctgcacctggcctgccagctggggaagcaggagatggtccgcgtgctgctgctgtgcaatgctcggtgcaacatcatgggccccaacggctaccccatccactcggccatgaagttctctcagaaggggtaagacctcctcccctccccatctgctggcctgctgggctccagctctcctgtcacctgtcccgtgcctgaggcaagcagtatccaccatagatcttagcatctccagcctcagagcagaggccccgggttcacaagcctcattaggccccgcctggcccaaagaaggtgctccatcattgtatcatgggtaggaatctcggttcacaagttcagctgtgcaaggaggagactttaaaatttttctggctgggcgcggtgtctcacgcctgtaatcccaacactttgggaggctgaggtgggcagatcacctgaggtcgggagttcgagaccagcctgaccaacatgaagaaaccccatctctactaaaaaatacaaaattagctgggcgtggtgacacatgcctgtaatcccagctacttggaaggctgaggcaggagaatcggttgaacccgggaggcggaggttgcagtgagccgagatcgcaccgttgcactccagcctgggcaataagagcgaaactgtctcaaaaaataaataaataaataaataaataaataaataaaaataaatttatttaatgtaccttaattcctaggagtgaatctccctctataaaactggagacaaccaatcttagccctctttggggtctcctctttccagctcccctccaggtggtgctccagttctggagtctgatgcaaccccaaggcccacctggcccctcctctaacccagcccagcctgatctgaacagccccccgatggcttcagtgctccttggtttcttgtgtgcccagctcaaagcctgggaaatgcttggtaaggtggccgagtgcccgtccacctagatgcctctttcctttctggctggtggcacgttgggaggcaggtacaggctcatgttttgggagcctgggaacccctggtgtcaggaaaattgtcttcaaaggggtaggggatgagataaaaagataaatgaatatctcaaatctcaaaatactatctaggccaggcgcggtggctcacacctgtaatcccagcagtttgggaggccaaggtgggtggatcacctgaagtcaggagttcgagaccagcctgaccaatatggtgaaaccctgtctctactaaaaatacaaaaattagccaggtgtggtggtgtgtgcctgtagtcccagctactcaggaggctgagacaggagaattgtttgaaactgggaggcagaggttgcagtgatttgagattgtgccacagcactccagccagggcgacagaacaagactccatctcaagaaaaaaaatactatctaacaggaacaacatctagaatgaatgaatgagccaatgagtccttcgatcctggcactgtgctaaagcaccagcctcaccgaaatgaataagccactccaggacaggagacaccccagccacccagaatctcatagcgcagtgccagacaagcagtgagaaggcatggacgggcagcactcaggcagggaggctggcacttgtgcctgtcctcaggttgttccttcctctgggagctgcatccaccttgctagccccatggggcattgctagcccttctaagggctggaccaagcctggacaaaccctcctttccttgaatctcccaagcacagccagaatgagctagagctttcagaaatacttgaccaaacagagaagataccaacacccccagccccgcagtcaggttccccatttgcaggttgtgacctgagtggacaccaggtgatgctcttctctacccagagggctggcacatggccccactcttgcttgtctccagccaccctgagctgtactgggcaggagctgtaattgaccagttttctctctcttcaaacaacctcagccctcaccggtccctctgtccccacacaggccatcctgggtgggtccagcgtcccatcacataagaggatctttgcacagaagacaaaggaagaggctcctaccttgagtggagcagggagatcccttatcgacttggcagccagcacagccctactccaagaatcccacggcctcagtgttactgacaagtggttccctcacagctcagactaggagctccctcgctgtttttctttttcttttcttttctttgttttgtttttgagacagagtttcactctgtcacccaggctggagtgcaatggcatgatcttggctcactgcaacctctgcctcccaggttcaactgattctcctgcctcagcctcccaaggagctgggattacaggtgtgcgccactatgcccagctaatttttgtatttttagtagagatggggtttcatcatgttgaccaggctagtcttgaactcctgacctcaggtgatctacttgcctcgccctcccaacatgctgggattacaggcgtgagccaccgcgcctggccacctctgctgtttttcaatgcagctgacctttcccacaaagctcggtttgtgcctgcggttctcagatggttaagcccctgctgaggaagggaaacagataatcccagacagtgagatggaggctgagactgaggatgcctgggggctgcactaggagctcagagacggcatcaggcagctggagttcagggaaggtttgggggcagcagagcccgagccaagccatggacactagccggagctggccactcgggtgaagacttggggggctccagagggcccagggaaagaagctgggcctgactccatgtgcctagtgctgagcaccaagcgctggcataagggctgtagggagctgggcagcataaatcctgggcctgtgctgggcacccctaataatagagaacagcagctgaacactaacgctgtcccagccaccggcttagccttcatgtgggctatttcactatagcccagagagctgatgtattttattccccctctaaagctgagggccaagtgtggtggctcatgcctctaatcccagcactttgggaggctgaggcaggaggatcgcttgagcctaggagtttgaggctacagtgagctatgatcatgccattgccctccagcctgggtgacaaagggaaatcctgtctcaaacaaacaaacaaaaaacagatgaggaaaccagggcttagagagattaagtaatttgctcaaagtcaggcagtcagtaagtgccagacctgggaattaaacccatgtgggctgtcctagtaattgcactaaaaaaaaaaaaaaaaaaaagctttattgagatatagttcctattccatacaatccacctattgaaagtatacaatgattctgatatattatgtttattttttccaactgtgatagattatatataacataaaatttgccattttaaccacttttgttttttgtttttgagacagagtttcgctctcgttgctcaggctggagtgcaatggtgtgatctcggcttaccgttacctccacctcccgggttcaagtgattctcctgcctcagcctcccgagtagtagctgggattacaggcatgcaccaccatgcccagttaattttgtattttttagtagagacagggtttctccatgttggtcaggctggtctcgaactcccgacctcaggtgatccacccaccttggcctcccaaagtgctgggattacaggcgtgagccaccacacccggcccattttaaccacttttaagtgtacaattcggtggttttaatcacatttacaatgttgtccaaccattacccctttctaaaacttttcttatcacctcaaacagaaactgtaaccattaataactcccgattctcccctccccacagcccccgataagtcccatatcctctctgtctctcagaacttgcctgttctagaacctcgtatcagtgaaatcatacagcgtttgtccttttgtgcctggcttatttcacttagcatgatgtcttcaaggctcatccatgttgcagcacgtatcagaatttcctttctttttaaggcagaatactattttgtttatccattcagtccttcactgatagacgcctgggttgtttccaccttttgtctgttgtgaagaatgctgctgtgtacatgggtctgcaaatgtccattcaagtccctgcattccgtcctttgatacttccgacctcaggtgatccgcctgcctcagcctcccaaagtgttgggattacaggcgtgagacaccgcgcccagccagaaaaattttaaagtcttctccttgcacagctgaacttgtgaaccgagattcctacccatgatacaatgatggagcactttctttgggccaggcggggcctaatgaggcttgtgaacccggggcctctgctctgaggctggagatgctaagatctctggtggacactgcttgcctcaggcaccgagtagaaagcaattgtgctctttcccactctgtcatactgcttcctatagcatgcaggtcactgtgtgactcactgacagtgtggtaaggaggtggagggtggctgtgtgccaggcacagaactgggctctgaaatgcctggtcttccttacaccccagccactcctctcagcactctctccatgttgctcagcttctggaggccaccagtgaggaagctggggcttgacttcaagcccatctgactctaaagccagtaccagggagggtgatcattgctggtggcagcatcaggaaggcttcctggaggagggggttagttgtgccttgaggggctcagtacagccttaaccatggtgagtgtgctggttgggtttgctgaactttgtttgcagtgatgctctctgtaagcagtagatgaagctccaagtcctggcttcatcccacgccacgcagaccctagcttctgctcaccaaccggggcccctctctcaccaggtgtgcggagatgatcatcagcatggacagcagccagatccacagcaaagacccccgttacggagccagccccctccactgggccaagaacgcagaggtgagtggatcctgaggtgggtgggtggggcagggggccgggccccgcaggtcctcagggccctcaggaagcaggttcccgagaggaccctgaggctagcacttgggggctgaccttgcagtgggtgtgcaggcagagaagtccatgaagagctgggatcctggcagggctctgctgctctctggctgggcggggggatccgccctgtgcctcagtttcctcatccatgaattctgctttggcgatgtgatgaagtcagcaaggcagtgtgtgacaaaactcggcacaaattgtaaagtgcttcccaaatagaaggtggcgtgatgatgattgtattattagtcaggattctctagagggccagaactaacaggagatatatatatagagagagaggggggtttatttttttattttattttttttgagacggagtctcgctctgtcgcccaggctggagtgcagtggcacaatcttggctcactgcaagctctgcctcccaggttcatgccattctcctgcctcagcctcctgagtagctgggactacaggcgcccgccaccacacccggctaatttttttgtatttttagtagagacgaggtttcaccgtgttagccaggatggtctcgatctcctgacctcgtgatctgcctgccttggcctcccaaagtgctgggattataggcgtgagccaccgtgcctggcctaaagggggatttattaaggagcattaactcacacgatcacaaggtcccacaataggccatcgcaagctgaggagcaaggaagccagtccaagtcccagagctgaaggacttggagtctgatgtttgagggcaggaagcatccagcacgggagaaagatgtaggctgggaggctaagccagtctagccttttcacatttttttctgcctgctttatattctggccgtgctggcagctgattagatggtgcccacccagattaagggtaggtctgccttcccctactgactcaaatgttaatctccgttagcagcaccctctcagacacacccagggtcaatactttacatccttcaatccaatcaagttgacactcattattaaccatcaagatgatgatgatgatgatggatgatgatggtggtggtggtggtgctgggcctagctgcacacacagggagcctggctgggcatctcctctgagttcttcccctaagctaagctctgtcctcctgggaggatggaggcctctggtctcatcaccaggaagcacagcttgacagagaatgggatgccccagagttcatggcctacttctcaatgtgatgggccaggagggagggcactgccagcctcagggtacctctgcattccaggagccggacaccgagtcaggcccttccgtgtaggtttggtcactcattgtcatcacatgctgtgaggtggggacttgcattcccatcttcacagaagccctgaagtgcacatggctacagtgacccatccaagcgcaggcagctgggatgagtgaagctgggctttgggctcaggtctgtgactccaaagccaggctcccctccctgttcccaaggctctgccagggatgtgcattgccaaggcccagtgagaggtgatacctttgcagggttccagggagggatgcagggagcggggtgcttcaggacaggccccagaggagcctttgcaaggagagtgggttctgttggcactaggaaaggaccagaagcctcttaaaacagtcagcacatctttggctttttgtccctagtcttgggatgctgatgggatgggaggcagtctaggcccccctagaactggggcctgcccctggaatcctcttgctagcgctttccaacatcccagtacctgtaggcctctcagagcagaagtggcagtgcccacgtgtcccggggtgcggcagctccccgagtgcctgtgctaactcagcctgaccgtctcccgcagatggcccgcatgctgctgaaacggggctgcaacgtgaacagcaccagctccgcggggaacacggccctgcacgtggcggtgatgcgcaaccgcttcgactgtgccatagtgctgctgacccacggggccaacgcggatgcccgcggagagcacggcaacaccccgctgcacctggccatgtcggtgagcccaggaccgcgtgtcctgccctgtggggccccggtgggaatgcaggagggctgtccggactggagccctcctccccactgtctccctcctatcgtcagctgctccaaatcatcttcccacccaaagctcagttcagaccctgactcctccctcaggaagccttccaagtccccctctcagcccaaaataacaccacctcctgtgtgctgtggtaccttttccacctgtgcccccatttggcacttgcatggcacgagagggaaaaatgacagctctggccatagactggccctgagcaagccatgtcacctgtcagcctcgatttcctcatctggaaaatggtggtgtcaatacttatctggaagagttgtggaaaagttatggtggacacttggtcaccctctacagaatgtctaagtgacacacgcagtacctggcccgagtgagcatcctgcttcccttcactggtccgcgtgttgctctcatcttccctgggaggctgtaagatcctggcaggcaaagcctgagtgtgcagcccagcagcctgtggcaggtgccaggcatattcgttggtttattatagaacacagttcctgccctcaaagcccttactgtctggttacacatctagagtatgaacatattaaacctagcagaggaggacgttactgtgttacagacatatgtgtgtgcatgtattcttttttttcgagatggagtctcgcactgtcgcccaggctggagtgcagtggcgcgatctcggctcaccacaacctccgcctcccaggttcaagcgattctcctgcctcagcctcccaagtagctgggactgcaggcacgtgccaccatgcccagctaatttttgtatttttagtagagacggggtttcaccacgttggccaggctggtctcgaactcctgtgttggccaggctggtctcaaactcctgacctcatgatccacccgccttggcaccccaaagtgctgggattacaggcgtgagccaccgcgccccaccgtgtgcacgttttctatagcaataccgtatgtacagaagtctgtttactgagtctcagtgacagaacatgagagacccccgggactctaaaagctgattcaggacacattcagagacatcctgttttataccaaaggtcaaaacttggaagagatgttgttgcccaaaaggctgaaactataaatagtttcatttttgaaactgtggacatttttagcactgggtgggcccttggaatgatctaactcagcagttctcaagttttttggcctatttgatccctttatactctgaaaaattattgaggatcacaaagattttttaatcatctggattttctttatctatatttaccattttagaaatttaaagtgtgaaaatttcaaaatattaattcatttaaaaataacaataataaatatatatgcctactatgtacccacaaaaattaaaattaaaaattttttaaaaaacttaaaaaataactggccagctgcagtggctcgtgtacaccagcactttgggaggccaagatggtcagatcacctgaggccaggagttcgagaccagcctggccaacatggcgaaagcccatctctactaaaaatgcaaaattagctgggtgtgagacctctgaaagggtatcacgtgttcacaggggtccccaggtcttactttaagaactgctgatagactttggtcatcttcatcccatcttcacagtttttggcatattcatcaaccacctttacaattatgtacttaatcacctcttcaaattggcttacttttatttatttattttgagacagagtttcgcttttgttgcccaggctggagtgcaatggcacgatcttggctcaccgcaacctctgcctcctgggttcaagcgattctcctgcctcagcttcccgagtagctgggattacgttcatgcgccaccacacctggctaattttgtatttttagtagagacggggtttctccatgttggtcaggctggtcttgaactcctgacctcaggtgttccacctgcctcagcctcccaaactgctgggattacaagcgtgagccaccgtgcccggcctggcttacttttaaactgacttaaatttattttgagagaaatgttgcatcactaccataaatggccatccatccatccagtgccaaccataaaaggtaaccaatgcagggcgcggtggctcacgcctgtaatcccagcattttgggaggccgaggtgggcgaatcacgaggtcaggagttcaagaccagcctggccaacatggtgaaaccctgtctctactaaaaatacaaaaaattagctgggcgtagtggtgggcacctgtaataccagctactctggaggctgaggcaggagaattgcttgaactcggtaggtagaggttgcagtgagctgagatcacgccactgcactccagcctgggtgacagagtgagactccgtctcaaaaaaaacaaaacaaaacagtaacaacaacaaaaaatcacagttaatgctgaaaacacacacatatctgtagccatagaagtcctaatagaatgtgaagaactgtttggaaaaccccattctagacccacagcttcattctctaggcagggaaatcgggtcccaagaagaggaaggtgacaaggccagagcccacagttccaggtggccagtgtgtcctctgaaaccatgccatgctctgcgcccctgcccggcctccaggtgtggaaatgtgtgacgttcttcgtggggacactcccccgaaggctgccattaggggcacgtgtgttcggttacccctcagggatgacaccctggactgggtgggcaagatggccttccctgccctcacccaccctctccttgctactcctgaaagccatcagcagctgacctactgtgtccccatggctcctgggtcggggtcacagatgcactgcatctttggaggcggagctggcagagcaggggcgagtcacttctagtttctgcctgggttcttacaccctcccctgtgggtgcttttaagcctgtttgtcaggtccccagccatcaaatggcagactttggactaccagattgacttgggtgggggtgaggagggttccagtgtctccccgtgctgaggagaggcccgctgggtgagttgacaggttggggctggcagccaggggcccctttgttcttcacttccccggcagttgcacgtcttatcctctctccatctccaacagaaagacaacgtggagatgatcaaggccctcatcgtgttcggagcagaagtggacaccccgaatgactttggggagactcctacattcctagcctccaaaatcggcagacgtatgtgctctgcactctggggctggagtggggtgagggttgggtggatacagggaccgaggaggagggaagtcccaggcatcaggtgccagcatcctgtgctgacccgccctgctcagagctgccaggagcacctcgtactcagagagggggcttccttacccaagcacaagggccctgagcagtagatgcaggcccaccacggggcttgctataccagcatcctctcccgtgcagcgccccccacctcagggagctaagattcccagcaggggtggggacaggagagccagcagcagccttctttccccaccgttggggaattcactgatggaaccactggctagaatgaccaagggtgcatgcactacactgcacgagctctgggcatgcctgtgtgggcagagtgcatggccatgtgctgcacgctcgcacagtgagccttagcttcagagctggacagagcagatcctcctcaccagaggcctggagcccgctctggagggtttcagcagctgtgggggtcactgtgggcaggtacctgatggcagcagtgtgtgtgtgccagtgcacacgtgtgtgtctgcatgcaccgcatctatgacctccttttcagcaatcccatccatcaaatggagtaggtgccccctggctggctcattagtccctttggaaccctgaactatcacttagcatttttgagaatcactgaatgtggccatgggattcctgctttcttggctggagtagaaggaaagaaggggttcccacaggcatcgggcagggtgacactgacctcctcctcccatatcctccttccctggccttaggaagctgcttgggatgtaccagcctgggggcagcactccctgtcagggtgggctgaggcctctggagcagcccacgtgcccagggcctgggagctgggacaggggacggagtgtggaaaggaggggcctctcctttgcatgttgacatcatttctgatcctgtgccatctccccttccccaaaccatgacaagttgtcaccaggaaggcgatcttgactctgctgagaaccgtgggggccgaatactgcttcccacccatccacggggtccccgcggagcagggctctgcagcgccacatcatcccttctccctggaaagagctcagcccccaccgatcagcctaaacaacctaggtaggcctcgcctcccgactccctcttctccagctggttcccaggcccctggatcacagcaggccccaccaaagcaacaggatccctaggacggaagtcactaaaggaagccggggaggatggggccggagttgtcagcctctaggcagccagcaacccacagatcccagaggcctagggtgtccctggctgatgtcccatgctccgttgcccctgagaggatgtgtcctgcacacagtctcaggcctgggcatttccagtggcacccatgaggtggctgctgttactgccctcctgtccccagggcgttcagggtgggcagtgaggagtgctgtcgggggactgggggcccgggccctctggcttcacctgtccctctggcttcacctctatcacactgtttgaatctcggttgggcctgagacctgtgtgcccccttcctggccccgtggtgactttcagacgttgaatgtggccaggcagccagcatctgccccggtgcattccttggtgcccagggagacatccccagactagacaggacccttctctggactttctgtgggctggcccactcagggacctccattgtttgggagcggggtcccctgaacagagggcagccaggagccagtccttggtgagccagacttcactgtggaggcggcagcaccttcagccagggtagcccgaccaagcctggaactctggagaggcaccgtgactgtggcttctagtcctggctccacctctctctcccctcccaggaactccccctccacctcccatctttatctctcaattttgcaggcagtcacccaagccaggccggatggtgggcctggggtgcggcgtcagatgggtaacgccctgggcctggagaggccaccgagcctagccatgcggcattagctctagctctcactccctaatccgtccttcttagctgcgcacacaccacacgccccctcccctgcaccctgtccccggcctctctcagccactcttctgcttcccttgttcactgtggagccgtgtgccctggggagggggagacaccgcttcgcagccctcggttctgctttgctgcttctagactctgcacagtggtggggggctgtcagagttggggtcacgcgggctgctgcaccaggcacctggggactgggctgcttgtcaggaggggcagctagtcagttgggtggacgtcaggcaggccttggacacaaaggaagacatggacagagtggatggtgggcctgatcccggaggccactgggatttccagacctgggatcaggacgagggatgtctcctttcatccatggacttaaaccccgaggaacgtcctgactcagccttttgactaaatgaccttgggtgaattatggaccctcttagagcctcacctgtcaatagggaataagaattcttaggccccaggtggttattgcagcatcggctccgatgcaagaagaagcactttgtctgaagaggacacgcaagggtattcatgccttggggtttcaagaggaagagattgaggggaacctgggagctggctgggcagggtggggagcccttcccagagcagtgggcccccctttccactccagcccatttctctcctgtggcctgtggctcagctttctcctgggacagagtccttcctgtggggaagggacagatgacagggggagtggggggatgagggcgtggccgtgggcgaggcacagcccaggtttgatctagggacctctggggtagcagggcttggggacccacctgaccacagcatgccctgctctgtgcctcacagaactacaggatctcatgcacatctcacgggcccggaagccagcgttcatcctgggctccatgagggacgagaagcggacgtaagtggatcgagatcgggggcagagcggggaacgtgtgcgctttcctgcccctcacccaccccctgttgtgggctcagggctttactctctgcaccctcacagccggcgaagtggctctgctcctagtcttatagttctcagcagagacagaacatggagagcctgtgtcgctcgttcattaatgctgggcggtgcaggctctggagaccagcccagggtgccaggcttcttggacttggtggggctggcgcagtgttctggcctccctccctgatctccttatggctagaagagggggagatgcctgggtcccccctggggagatctcagcagctgcttcccactgctcctactggcttccttaaccacctcccactgcagaatagtggcgtgggctgccttccccagcacctgctgtatacctagtcccattgtaagaggcgggcctgggtgacaggatgcaaagagaagacgcccaggccttgcccttcaggcataatcccgggtgcttgaactcagtgccagctggcacggcaaggtaccaggacaaatgcgtttccagccactgtgctgtcgccacctcccttgattgctgcagttgattcatttattctttattagtctctcatgttcctaatagccttcccagggaggaatttgtaaccttgttttacagatgcagaacctgagcccctgagaggtgaagtgacttgctcaaggtcacacggagtgagtgtcagggtggcaactcacagccgggtcttccgaacccacgtcctttgtgctaccgcaggctctctctgggttctctgtggactctatacctagtgccagccctctgcagggaaagctctcttctcagaatcagaggcagctccactcccagggccaggcagtgatcgtgcagctctgtgggtcctctcacttcgcactcacttccatgctaccctgttgtgtgccctggaggttcccctgccccatcagcattccctcccctgtgccccctgcatgctcttgcacgcgggcacacgcacacacacacgcacacatgcacgcacacacacccacatgcacatgcctgcgggttgcccacatgcatgtgttgcccacatgcaaacacatggacacgcacacacatgcacacatgcaaacacacgtgcatgcacacacatacacatgcgcacacatacacatgcatgcatgcacatggacacccacacacatgcacacacatgtacacacatgcatgtacatacacacacctgtgcaggggctgaggtgaggcagctgcacctgaaggggggacccacatttcccaagggaggaaaagcagattccccagattctggagcctcagaaccctgcctggagcggggctgaggcaagagtcaggagacccctcggtagctccccacttgggccttccaagctacagagccctgcgccctctgggttgatctctgtcgccagccccgcatcttcgggagtttgctttggcctccagcaacagtgtagtctctcccctgccacctctaggcttgctgtggggctgggtacctggtccaggaaaagacccctagaggtgggacccgggcctcctccatttatcagccctcttgggcacctcctgcatccccttgacacacagcgctgcccagagcagaggcggcttctgccctggtggagcttccaggtcagcgcaggagagagtaaaagaaagattgcgaatggaatggaagcagcctccaccaggaagcaggtggagcagcaggcgggctgtgagggagggtctcgatggcatcagggcaggcttctctcagcttcatcaagctgagatgggaagatgagaagatcagaggaaggttccagactgaaccaaccacaaaggcattcccccagggcatggccaatgaggacaggcaggatgtggggagacgtgtcagggcgcgctggagagcatgtgactcaggaggcggcagacctgggtccaggtccagtccgcatccatatgacttggttcccgtcacctaacctctgagctacactccctccgtcactcaaaaatatgcacagagagtaggcgcagtggctcctgcctgtagtcccagctactcgggaggatcacttgagctcagaaggttgaggctgccgtgaactgtgattgcaccaccacacaccagcctgggtgacagagtgagaccctgtctctataaataaataaataaataaataaggctgggcacggtggctcgtgcctgtaatcccagcactttgggaggccgagacaggcggatcacatgaggtcgggagttcaagaccagcctggccaacatggagaaaccccgtctctattaaaaatacaaaattagctgggtgtggtggcgggcacctgtgatcccagctactcgggaggttgaggcaggagaatcgtttgaacccgggaggcagaggttgcggtgagccgagatcgcgttattgcactccagcctgggcaacaagagtgaaactccgtctctaaataaataagcacagggatgtcagggagggtctgcctcagaggcgtttgggacaatgacatgagctaatgctggtagcacccctcccatagcccctggcatgaacctctcccttcctccctgccccctcctcccctgcttcttccaccttgtgtggaggccctgatactctgtcactgcccattcctggcctggctgtagggtccccgcccctccttccccagccttatttaattccaacagactttatcaggcacctgctttggatcaggcctgatactgaccaaaatcaggtgtcccaagttggggagactggccgagatcctgctgggatggcgcctggtcagtgatgctatcccccgaccttcctttccctttctctgttgcactctccagcccctgaaatactagacatttgttcctttactgccctcacccccaccctcgctgtcctgcataggacagaagttcctcgggtccgtctgggtctgtctgccaggacacagctgcaggggacaagggctatgagggtggatgtaaagtactgggctgtggcaggaccctcctctctcccactgctgttcccactgcagccacgaccacctgctgtgcctggatggaggaggagtgaaaggcctcatcatcatccagctcctcatcgccatcgagaaggcctcgggtgtggccaccaaggacctgtttgactgggtggcgggcaccagcactggaggcatcctggccctggccattctgcacagtgagggcggcccctggggatggggccaggcggggctgagacctgtgtcctcaaggggccgagtttgtcttcagggctttgcaaaaagagagtggaggagtagaggagggctataagcactttgaggaggcaggggcggggctgcaggtgctgaggtcccaggctggaaggagaagggctgggcccatgggcttgggtttggggatcccccgccctctggccacagagggtagagctggctgtgtgaaattttggcataggaagcgtttcctatcgactgccttaacccctcctcccctcacccctgcaaagcaggcaccaggggccacacagcctgctgcacataaggaatcccattcccagggtgcacgcagcaggcagtctcaggaatgaggagccactgagcctcaggatgccagagccctcgcctgcacacttcattttactgggaaattttactgggaaattaagttcccaggtggggagggatgacgtgaagtcacatagctcatccatggggtcgctgggctggagcacagtcccctagactcccagcctggcacctcctaggccacagggcactgtgtagtctcctttcactgccgctttgcgaaggcgcctggcttgctggacagatagccgggtggtcagtgttgtgacggctcctctgtggagctgtctgagcttctaggtgctgacaggtggggaggggcactgccagatcagggtcctcagctccccccaaccccctggacattgtcctgggactcaacatgtctgactggtgcccctgcccctgtgctggtcagattccattttctccagagcgcccccacatctggatcctggtcatgcaaagtcttggaggtgcccggggaggactccccaccctagggtgggtatcagggcctgtgggccaggcctgtgttggatgctggggatgcagagctgagccaggcataccccagcctcaggagcagggggctcagccagtccaggaggtgctggggacagagtcccatgggcggaggaggagagtcatctgtcaagttgccgggacgttagtgtccacggcggtttattgactggtatttcatttccttttgatgattctcaccatagccctgcggggtgagcagatggggaaactgagaaccagagaggatcagccagtgaattgggcagtcaggactgggtctccagcagtgtgcccagctctctaccccagcctcagggtcccagcatcccctctctggtcttccacagggtccaagggcgggcacgaggtctgagcaggcagactgggcagagtcctagcttcttctccaaaagggccacgtccttcttcagggaccatttcttccccatccggggtcttgagactcccaggggccatggaggggatttgagaggtctcctggctgatcctccggtgtgggcagatggcctcctttcagctaccctctgcttgtacatccctggccctggggaactcactgcctcacgggggaagtggggcagcttctccttcctggaggtgcagccggccccttggccctgtctgttctgaaggctcaaaggacagggctattccttgttttctgtgacaaacaacgtgggtctagcttttataagcttttactcttgaggggctcttctttaaggaaaataatacaaaatcatgaatacaagatgaagtgcagagccgtggggcttcagtggtttttgagtctctccgttgcccaggctggagtgcagtggtgcatcttggctcactgcaacctccgctcccgggttcaagcgattctcctgcctctcagcctcccgagtagctgggactacaggcgcccgccaccacacctggcgaatttttgtatttttaatagacggggtttcaccatgttgggcaggctggtctcaaactcctgacctcaagtgatccacctgcctcagcctcccaaagtgctgggattacaggcgcgagccaccatgtccagccggaaggaggtttctctctgtctgtctgggaggttgcaaaggaagggcccagaatttgggtttgcttaggcctcggtaaacccgcttcctcctgccacctcctgcgttcaggcgctctgcaggctgttctacgggagccctgcgtgtggccgctgcatctccccgcctctgacccctttgttcctaggtaagtccatggcctacatgcgcggcatgtactttcgcatgaaggatgaggtgttccggggctccaggccctacgagtcggggcccctggaggagttcctgaagcgggagtttggggagcacaccaagatgacggacgtcaggaaacccaagtaagccctggcgcactggggccgtggccgcagctgtgcccactgtggctgttccctggggacagagggctccctgtcctgctgagggagggggaagagcgccccacgcttgaggggagcagagggaacccccttcccagggaggcagagggctggggtgtggctctcacttgggcatgcagacacctgctgagcgcaggaggggcgtggcctggtgggcctggctctgccctgcctggctctgccctgcccggctctgccctgccggctctgccctgcctggctctgccctgcccggccaggggtctggggcttgcctggagagagcctgggccacccttctctgagaccacctgggcagaggctgggtttttgctgcccaggcaaaaggaacccactggcctttcaaatgacacggctaaacattttctcacatttcagacagcactcgctcccaggatcggactactaggttataatcagagggcttcagtcttacctttaatttaaggcctacaagacttgaactaatttaagtcagactgaaggagaaagtcacatttccaggaaacatttgtttgggaagcccaaatcctaggactaagcaatgcatcccgttcggggctggatgaatggtgtgttccaagaggagtgttttgagcatttctgagtgattttttcatattttgaaagtgagtgtcccccagtcttaggggcccggcatcccctctgcggtcttccctagggtccaaggccagggaccttcaatcttttttcccactctgtggcttgtctttctgctctgtggtgtttctaggtttttgttttttgttttttgttttggttttggttttggtggcccatgttcttaatgaggtagataatatttataaatatttttcttcttgtagtttgtgattttttcctttctttctttcttttttttgaaacagggtcttgctgtggggcccatgctggagtatattgctgtgaacacggcttactgcagcctcgacctcctgggttcaagcagtcctcccatctcagccgcctgagtgcctgggactactagcatgtgccaacacatgtattttttgtagagatggggtttcaccatgttgtccaggctagtcttgaactcctgagctgaggcgatcctcccgccttggtttcccattacaggcatcagccaccatgcccagcctagtttgtgctttttatttctcgttcataaacccctttgctgcccccaagcagcacacgattctcctgtgtcgagctggaaagctctctagatctgccttttacattgaggtcttttatcaacctggaattgatttttgtatgagggtgaaatccaagatccaatttaatgttttccacgtgattggccaatttttcccagccccatctgtgaagtctgtccttccctccgcttcctcagcagtgggtcaagcatccctctgctcttggatctgctccaggctgtgttttgttccactggttggaaagctgtctctgtgcccggaccacagagcataaaaaactaccgctgtgtggtgagtcctggtgtctgggtggcagatcctccaccttggccttcttcaaaaacatcatggctattcttgggggcagtagagagaagtggatacaagcatagaccctgaagtttctacctcttctcaaaaataggaatatgccaggcatggtggctcaagcctgtaatcccagctctttgggaggctgaggcaggaggatcacttgaggccaggaggtcgagaccagcctgggcaacatagtgagaccctcatctctacaaaaaatttaaaactaacaattagctgggcatggtggcactatggctgtagtcccagctaattgagaggctgaggtgggaggatcacttgagccccggaggctgaggctacagtgggctgtgatcccatcactgcactccagcctgggcaatagagtgagaccctgtcttaagacaaaaaaaaaaaaacaaaaacaaacaaactcacaaactataaaaagaaaaaatatttataaattctactccattaagaacatgggtccatccaaataaataaataaaacaaaaacaccataaagggagtaaaaagacaagccacagagtgggagaaaagatttcgaatccatacatccatcaaaggactcattttcaaaatatgaaaagatcattcagaaatgctcaaaatagtaaccaccattttactttctcttcctatgagtttaactgctccaggtactgttaagtaaaatttttaggggataattgatttggaccaggattctgtaccaggcccaacagaagaaacgaatatggagtcattcatgccaagtgaacctagttagcttaggcgtatacccatgtaacaaatagctgagttctggttagctacaacagctaagctttaatcaatcatagatggccacctgattcaaacaaggcaaaccaattaagctccacacctcactttggttttcagcccatcaacactgcctgaccacgttgcaggccagagttctttgaacctattctggttttgtggcctgcctgactctcagttcatcaataaaagccaattaacatctttaaatttgttgcaattttatctttgaccgtaccttatgtaagtggaatcatacagtatttgtctttttgtgactggcttatttctttctttttttttttttttgagatggagtcttgctctatcacccaggctggagtgcagtggcgcgatctcggctcactgcaatttctgcttcccaggttcaagtgattctcctgcctcagcctccggagtagctgggattataggcgtgcaccaccatgcccggctaattttttgtattttagtagagacagggtttcaccatgttggccaggccagtctcaaactcctaacctcgtgatccacccacctcggcctcccaaagtgctgggattacaggggtgagccaccgtgcccggccatgactggcttatttcacttggcatccatgttgtagcgtgtgtcagaatttccttcctttttaaggctgaaaaactccattgtctgttggatacacgttttgcttctccattcatccattgatggatattttagttgtaaattgactgctgtcaatgtcggatgtgcaaatacctgtttgaggcctactctctcttactggtgccttctctagagagaattctgatgggttcagtttgatcatattttgtttaagatttttggccaggcgcagtggctcacgcttgtaatcccagcactttgggaggccgaggtgggcggatcatgaggtcaggagatcaagaccacagtgaaaccccatctctactaaaaatacaaaaaattagccgggcgtggtggcgggcgcctgtagtcccagctactcagagaggctgaggcaggagaatggcgtgaacccgggaggcagatcttgcagtgagccgagattgcgccactgtactacagcctgggcaacagagtgagactccgtctcaaaaaaaagatttttgtgtccacgctcgtgggcgaacttgacccgttttttcctattttgggttttgaggaaatatttcctctttttatttttcttggaagagttagtataatagtttattttgaatttatggtagaacttgatagtaaattcttctaggcctggagtttgcttggtgggaggatttttgatgatggaattaatttctatagtggttgtgagactgaccactcggggtttctaaatacctttttgagttagttttggttaagtgaggtttttctaggaatgtgtccatttcatctaaatctttaagcttattggcttagagttgttcaaaatattctgtttttttttttttttttttttttttgagacggagtttcactcttatcgcccaggctggagtgcaatgacgtgatctcggctcactgcaacctctgcctcctgggttcaagcaattctcttgcttcagcctcccaagtagctgggattacaggcatgcgcaaccacacctaatttttgtattattagtagagacggggtttccccatgttggccaggctggtctcgaactcctgacctcaggtgatccacctgcctcggcctcccaaagtgctgggattacagacatgagccaccatgcccagccgattctcctttttctaacgtctgcagtgtgtgttggtgcggcccccttttctttcctgattttgataacagataacagccatgttttatcagtcttgcaacaggtttttccattggattagcctttcaaaaaaaccaacttttgctgaattgtgcccccaaggttggaccaatctgacactcctccagcactgccggagagagcctgttttgcggggatggtgcggggagaagcccacctatcccgaacagaggttggagtgggcactctgctacccaaggccctggggtgtgaattgtggggaaagggaaaggtggatgggcgggtggctcagccgtcctcctgcctcatttctctccagggtgatgctgacagggacactgtctgaccggcagccggctgaactccacctcttccggaactacgatgctccagaaactgtccgggagcctcgtttcaaccagaacgttaacctcaggcctccagctcagccctcaggtttaaaccatgtttgatgcatccatgggaagcgactggcccgagaggctgtggggtggtgggtgggagtcgtgcacttgccatcaggcaccctcaccgtgccaccagcccacccgctgcactggtctttattggctgaggacagggattgcgggggagctgtcaggcccctggcaggttagaaaagtccctggaaagtcctcagctgtacctgccttccaccaggacgaactagccagagagtgtggcttcgtgggtcctgcttctgaagagttcccagcctcccctcttcccgcacccccagcccccaacacgcacaccctgagatctggagtgcatgggttttatgccagtcccttgtgccactgggccgccctccttccccgcccctagaccagctggtgtggcgggcggcccgaagcagcggggcagctcctacttacttccgacccaatgggcgcttcctggacggtgggctgctggccaacaaccccacgctggatgccatgaccgagatccatgagtacaatcaggacctgatccgcaaggtgagtgccgtaggccagagggcctggacccactgctccctggagccaatcctgtgtcagcaaaccatgctagggaccgacccccaggacagcaggtggcttttacacacgcactcattcatatgtgcacacagggcaaattgatctcactggaacctgttccatgggtgggatctgcctgaagcactgtgctaagggggatctgaggaccactgtgctctaagtgtgcatgagtggggagggcggcatgcataccatgaacgtgccactcgagccagcctggggacaggacacatgcttgcccttgagctcacctctgtggatagacagtcccacaggaatgcctgtccccacgggttgccggtgctgtggtggaggaccgtgaggcctctgctaaaaggcctgggggctcggaaagggctccatggaacaggggacccatcctgaggcccttggggacagagcagtgcagaatcagtgatctggaggaagagcagcagccctctctctgcagaggtacagcagaggctggcaggacccagcatgctaggggaggccctgtggcgtggcgggcggtgggtgaccggggtgggcgagcgcggtggctgagctcagaccctggagccagggcgcctctgggggtccccgttctgcctgcactcactgcagctacctaatggggccatcatagcgcctgcctggggaggctgcgaggccttggcatgctgttgtctgtgaaatgttcacagcactgccgggagcctgagctgcatccttgctgctgtggtttcccgaagccccagggcgtcctgggcagcgcagcagaggctctgggcagacagagaagcgccctctaggggccagatcgggcagggcgggcttcctgcaggcggcagagaccgtcagactgtcagacactagccagtctaactctcctattgcgtgcggatggggagcctgggacccagagtgggaggcatcacccaagatcatccagcaaatcggcagcagagcttgttcggaagcaaataagagaggcagcggccgggcgcagcggctcacgcctgtaatcccagcactttgggaggccgaggcaagtggatcatgaggtcaggagatcgagaccatcctggctaacacggtgaaaccctgtctctactaaaaatacaaaaaaattagccaggcgggcatagtggcaggagcctgtagtcccagctactcgggatgctgaggcaggagaatggtgtgaacccaggaggcggagcttgcagtgagccgagatcgcgccactgcactccagactgggagacagagcgagactccgtctcaaaaaaaaaaaaaaaaaggcagcacccagggctcaggttcaagccttagcccctacttccctaccacgtggcccctgcagctgcttcccggcctgagcttcgctgagagccctcatttgcaaactgggtgatcagtgccctctccacagactggctggagattaaatgaagtaatgatgcaaatacctggcaaatcaccaacaccaaggaacaccgtctgcctttcctcccctggccacgacttgacttgggccagcatcagatggggtgggcgggatccttcttgcagctggtgtatgtgtggtcctgttggtacacagatgctgtcctgagcagatggcatgtgatgcccgcaccagccgttctggggtcacgtgcaagaggctggctggaaatcatgccaggcatgctcttgccaccagagacctcttgccctgttctcatgtgccccagagcccagtcttgggcctccccttgacgctccccttcgtgccccctacctgtggaaggtctcttctgactgcccctgtcctgttcccaacagggtcaggccaacaaggtgaagaaactctccatcgttgtctccctggggacagggaggtccccacaagtgcctgtgacctgtgtggatgtcttccgtcccagcaacccctgggagctggccaagactgtttttggggccaaggaactgggcaagatggtggtggactgtgtgagtgtgggcccctcccccaggccacttccctcagggtctgtagcccaggtcgatggcttcccctcatcctgtggggcctttggtgttggaggagacagcagggctctgtccatcgcctttagccagctggagggagagagagtccacagttcagagtctcagtgcggggcagggaccctcagtgaccaccagcaggggggttttcaaacgctttttagctgcggatccctttctgcaaacatagcgcagtgtagaagcccagaatggacaaaggctccagagcgggctgggcgctcaccctgtaatcccagcactttgggaggccaaggcaggcggaccacttgagcacagcagtttgagaccagcctgagcaatataatgagactttgtctctaccaaaaaattaaaaactagctggacatggtggtgtgtgcctgtggtcccagctactcaggaggctgaggtgggaggattgcttaagcccaagaggcagaggctgcagtgagctgtgatcatgccactgcactccagcctgagcaacagaaggagaccttgtctcaaaaagaaagaaagaaagagagagagagagagagaggagggagggagggaaacttcagggagaggggacatggaggcctgtcgactcagccgctaccctttcccccactcatcatccctgaaagggcactgctgagacctctgcccctctgattgcacagctgggacagtccctgcagtcccaggaaggggttttgcccgagccgctctgctgctgtgtggctcagcctgactcgaaagagcctggggctccccaggctggggctccgagagtgcagggcagggccgggcggggtgcgggccgggcggggtgtgggcccggcactcaccaaggctgcttctcaccagtgcacggatccagacgggcgggctgtggaccgggcacgggcctggtgcgagatggtcggcatccagtacttcaggtgagggctcagccgccccagcccttggccccgtgccctggcgtggtcggactcaccgaccttcccctcccagccctagtgtggactttcccttccccaagggtctgctctgttccccaagcccaccctggtcctagctggcgtcccctgcccagcctgagcatcctagggtgaccccctcctccctggcccgaacagattgaacccccagctggggacggacatcatgctggatgaggtcagtgacacagtgctggtcaacgccctctgggagaccgaggtctacatctatgagcaccgcgaggagttccagaagctcatccagctgctgctctcaccctgagggtccccagcctctcaccggccccagctgacctcgtccattcagcccctgccaggccaagcccagccactgccctcccgggcagatctgggcccaggcacctctgagtccatagaccaggcctgggagaatgccaagctgcctgcccgaggctggtcctgaaggcctgtctcccactaaccccgccttccagcactttctgtcattccaggctgggaaagtctagagccccctttggcccctttccctgactgtcaaggacaactgactcccccatcagctcaaacattaagggtacccgggcacaaccgtacccctgcccccagccccagcctccctgagggcctgccgggctgcctctgccccagcccccagcaagggcactcccaggcttcctggtgggtgcagcccactccctctgccctctgctccgttccctgggggctgggactaaagaaatgggtgtcccccaccccatcagctgggaaagcccaggccgcaggagtgggatgcccgttggactttgcccctcacactggcccagcccctcacactgccccaccccgagaaccctcagctctcaaaggtcactcctgggagtttcttcttcccaatggaagtggcttaagagccaaaactgaaataaatcatttggattcaagttca

SEQ ID NO: 1234 - DNA, 16283 bp, Homo sapiens
gtgggctccggctgcagctccggtctgctctcttggctccggaacccccgcgggcgctggctccgtctgccagggtgagggggccgggaaggggcgcgcgggggtcccgggtctcggaaatcgggcggggacggaacgggctcgggctgcggggcctccagactcagtcgcacgctcagatttcgggatttctacccccggctgggatcgcgtaacttcctcattcccgcctggacccctgcccccggcccgcctggcctggcgtgagccccgtagccgcgcgctctccggaccacccagggccgcttccccgcgcagctgctgcgccgccccaggtcggagccttccgggcctggctgggtgttccccggggctctggttacgggacggggcggggggcggggggcgggactgggattgtggatgaaggactaaggtaggggatgggggctcgaaggggtcggtggggcgttgcaaactggtcaggcgtcatccgcgggcggtcaggaggccgtgggggaagaggaggatctggaagagatggaggacctgcgggagttaggatggggggcgggttctgcaggacagctcgcctccctgaggcttcccaatgttcctaggatgacggcgacccctgagagcctcttccccactggggacgaactggactccagccagctccagatggagtccgatgaggtggacaccctgaaggagggagaggacccaggtacacagggaagatggatggccctcagggaggagaggcgttcgggagccagggggctggggcctgttgtggtctacactcctcgactttctttcctcccagccgaccggatgcacccgtttctggccatctatgagcttcagtctctgaaagtgcaccccttggtgttcgcacctggggtccctgtcacagcccaggtggtgggcaccgaaagatataccagcggatccaaggtggccagactggccccagggagggggaaagggagggcggcccggaatggatccaaggtggctgggctggccccagggaaggggcaaaaggagggctggccagagtggggaggcggggacccacgcaggggacatccattcagttcctcatacccctaggtgggaacctgcactctgtattctgtccgcttgactcacggcgacttttcctggacaaccaagaagaaataccgtcattttcaggagctgcatcgggacctcctgagacacaaagtcttgatgagtctgctccctctggctcggtgagggcgaccggactgcttcctgtagagggcaggtgctccccaccctcctttctgtctgtctcaccccggggccacaacctttcctccctgcaactctggccactgtgctgcctcccctgaccccagttaccaggaaactttccctgctcagctttccctgtccatggttctgtgccagcatctcagctgggcgggatgcccaaaatgctcttggcagcctcacccttttctagtctccattcccagggtagggggcctccgttttgccagcctctaggccttttgtttgttttttgtttttgttttgtacaaggtctccctctgtcacccaggctagagtgcagtggtatgatcttggctcatggcaacctcctgggctcaagcagtcctcccgtctcagcctccagagtagctaggaccacagccaccacacccaactaatttttgtatattttgtagagatggggtgctgctgtgttgcccaggctggtcttaaattcctgagctcaagtgatccacctgctgcggcctccccaagtgctgggattccaggcgtgagccaccacgcctggccacctccaggcctcttcttttcctccgagccccatctccagtgttttcaggaaccagagcacccagcctcccagctcttacctgaccttcatccatcctttccacagatttgccgttgcctattctccagcccgagatgcaggcaacagagagatgccctctctaccccgggcaggtcctgagggctccaccagacatgcagccagcaaacaggtgggaccagatgccaggtcctccgggaaggcattggaggtgcaaatggctcggtcccatctgtctctctctctctctcatctccacttcagaaatacctggagaattacctcaaccgtctcttgaccatgtctttctatcgcaactaccatgccatggtaaggtccaggggccgattttagatgtggagcaggattatcagaccctcggggaggagggccaggggccccagggtctgaggggctgaaagccaggtgtctcctccgggcttttgttttcctctgcagacagagttcctggaagtcagtcagctgtcctttatcccggacttgggccgcaaaggactgtgagtgtctggcccccttcacccaggcatccgtagacatcactcttaatttctccctgcctgagattggggcaagcagtgcagggtgggctgggggtctggagtcctcatcccgcctctcttcctgattgtcccacagggaggggatgatccggaagcgctcaggtggccaccgtgttcctggcctcacctgctgtggccgagaccaagtttgttatcgctggtccaagaggtacgggctatggccaagcagctgggcagtgggtgggggtgaggaagaaaattttgagggcagagaggaacacacggagcccttctgctctaggtggctggtggtgaaggactccttcctgctgtacatgtgcctcgagacaggtgccatctcatttgttcagctctttgaccctggctttgaggtgcaagtggggaaaaggagcacggaggcacggcacggcgtgcggatcgatacctcccacaggtgaggcctccctggggtgagagacaccagctgagtggtgagcccacccacggccttgctgggagttgagaaagagagaccacaggagagaggaaggcttttccacctccctggatcgggacatagttttgaaccaggaactggtctagccagatgcttgggactgctcttagactgggcccagagaaaggggattagtagaagcctgggaagggaactgctgacataaacgaaattccatttgttcatttgttcattcaacaaacccgagtgcctggtacaatactggttgctgatgcaatactaggatccaactatgagtaaggtggatatggccgggcgcggtggctcacacctacaatcccagcactttgggaggccgaggcgggtggatcacctgaggtcaggagttcgagaccagcccagccaacatgctaaaaccttgtctctactaaaaatacaaaaattagccgggcgtggtggtgcgtgcctgtaatcccagctatttgggaggctgaggcaggagaatcgcttgaagctggggtgcagaggttgcagtgagcagagatcgcaccactgcactccagcctgggggacaagagctaaactctgtctcaaaaataaataaataaataaggcagatacatacacgccctatccctgtgcagttgtgattagggactaagggaggaagtgggaaaggggaggtctctaggcaagatcacaggtatggagggcgaggatttatggacatctcatcgttcccatccaggtccttgattctcaagtgcagcagctaccggcaggcacggtggtgggcccaagagatcactgagctggcacagggcccaggcagagacttcctacagctgcaccggcatgacagctacgccccaccccggcctgggaccttggcccggtggtgagacactgacatcccttctgagcttgtctgtggctttcttgaccccctgtgtaatctctgagtccttcatcctctcttttctcatctgaaccctcctgacctcaatgacccgccccgtgacttctttaatcttcctgacctttgacatctttaaccacattgatctctctgatttcgcgccgacctttctgacccccaaacttggtcatctcttctgacccttgacctctctaacctcctataaccttttaaacccctctctacaatactgaccctctctgttctccatgatcttctcaaatctctctgatttagtccttcatttaataaacattttcttttctttttttttttttttttttttgagagagagttttgttctgttgatctcggctcactgcaacctccgcctcccaggttcaagcgattcttctgcctcagcctcccgagtagccgggattacaggcgcccaccaccacacctggctaatttttgtatttttagtagagacgggggtttcaccatgttggccaggctcttctcgaactcctgacctcgggtgatccgcccgcctcggcctcccgaagtgctgggattacaggcgtgagccaccgtgcccagccttaataaacatttttctaagcacctagcagtgctggcagtaacacacagtcctctctgggttagggaagtaggtgatcaaatcgtgaaacaatgtgaacttgccgtactggtgataggtagaaggtgacacgcacagacaggaagtacctggcccagcagggatatcaggacaggtttccaggaggtggtgaccctcaggtagttttgctttaaatcagagactgacacaatattaattttgttggtttttgttggagacagtgtcttgctctgtcaccaggcgtgtagtgcagtagtgtgatcatggctcacggcaacttcaacctcccaggctcaaatcatcctcctgcctcagcctcccaagtagctgagactacagacacatgccaccacacccggctaattaaaaacatttttttttacaaaaaattttaaaaattagacgggtgtggtctcgaactcctgggctcaagggatcatcctgcctcggcctccccaaagtgctggattgcaggcatgagcgacagtgcctggcctatatacttttttttttttaaggcagagtttcgctcttgttgcccaggctagcgtgcagtggcacaatctcagctcactgcaacctcagcctcccaggttcaagggattctcctgcctcagcctcccaagtagctgggatcacaggtgcatgccaccacacccagctaatttttgttttggttttttttttttttttttgagatggagtctgtctctgtcaccaggctggagtgcagtggcaggatcccacctcactgcaacctctgactccccggttcaagtgattcttctgcctcagcctcctgagtagctaggattacaggcatatgccaccatgtccagctaatttttgtatttttagtagagccagggtttcaccatgttggccaggatggtctcgatctcctgacttcgtgatctgcccacctcggcctcccaaagtgctgggattacaggcttgagccactgcacctggctataaacttctaaaacagccaaaaccaatccacagtgatggaaatcagatcagcagttgcctgtggcagggtatggggaaatgattgcctatagtggggcacacgagggaacattccaggacgataaaaatgtcctatattttgataggactggtgattgcgtgggaacatacacttgctgatcctcatggaactatacaagataaagaaaatgcagaacagtccaggcacagaagacagaaatagctcagggtgtttgggaaccaccaggacatattgttgttactgagtgaggaggagcagtcagaggagaagctgggagtcagtggcacctgatctcacagggtcccatgtgctaatatcacaggcacacagggcagtcatggaaggaagttttgtttgttcgtttgttttgttttggtttggtttggtttttgagatggagtctggctctgtcgcccaagctggagtgcagtggcgcgataccagctcactgcagtctctgccccctgggttcaagcgattctcctgcctcggcctcctgagtagctgggattacaggcgtgcaccactatgctcagctgatttttgtatttttagtagagataggatttcaccatgttggccaggctggtcacgaactcctgaccttaagtgatccacccgcttcggcttcccaaagggctgggattacaggcatgagccaccttgcccagccttcctgcatattttcacatgtgcatgcacgtgttacttttgtttcaacataaatgagatcatgcaacctcttctgtgacttattttttcacttaatacctgtgtgagagattagacacttatattatttcccatttttcactcttacaaacaatgtgatgaacacaacatttgcctaggcattgtattagatgtattcctagacatgtaattaccatgtatatttaatgatattaaagggtatatgcatttaatattttgatactgctgaccagtcgctttggctcatgcctgtaatcccagcactttgggaggccgaggcgggtagatcattggggtcaggagttcaagaccaacctggccaacatggcaaaaacccgtctctactaaaaatacaaaaattagccaggcgtggtggcgggcgcctgtaatttcagttacttgggaggctgagacaggaaaattgcttgaacccaagaggcggaggttgcagtgagccaagatcatgccattgcactccagcctgggtgacagagcgggacaccatctccaaaaagctatatatatattttttgatactgccaaattgtctcctaaaagttatattcccatagtctatgagaatacccacttccccagcatattgaatattgatattgaatgttaccagtgatttgaattattaccaatctaatggattttttaaatgtaatttcattttaatttcgttgtttactagtgaaactgaacatttgccacgattggccattttaatttctctgtgaactgtcagttcttactctttgctcatttttcagttggctcatgtgactttttcttgtcgatttattggtgttctttatgtatgatgtattaatcctcctgttctttagttgattaggttattgtgtctttttgtaatttttatttgtatttagcgcatatgggcaaacactattttgatgtgtctgataccacttgtgttctctgatcatttctgatctttgaccttgctgtcacctctgacccacgactgtcctccggtcttcactctccagagctttctggcttctgactcccctgacctccttggcttggcctccccccaggtttgtgaatggggcaggttactttgctgctgtggcagatgccatccttcgagctcaagaggagattttcatcacagactggtggtgagtgggaaaaggccccaacaacatggggcaggatagagcctggggcagatcagcattaggaggagaaggggggtgcagctggtggtctggggcttcgtttgcccctaatccactgccctgaatcccaggttgagtcctgaggtttacctgaagcgtccggcccattcagatgactggagactggacattatgctcaagaggaaggcggtgaggagagtggtcaggccgcagggggagggggttgcctgtgggtggaggttgattagcagggctgcagtgtgggagaattaggcagtctgaggcttcaggggagggaaaagtgtccatcctggcccagcacctgtcagacatcacctccgccctctccctctgccctaaggagaactgacaacttcctcttcatgctccctccacctggcagagacttccctcccagtatacataatactttattgtgttatctgggggtatacatgtctatctctctcactggactagttaatatcactgttccactacaaggcacagtacctgccatggagggggcatgtgtggtgttgatggacaggaagaaggatgcatggatgatgcagggtggctgggcaggtggatggatagaggacagaaagggtgatggatggaaggatatgagttggaaaggtggagggctaggagggtaggcaggtagatggatgaatgatagacggtacataaagggatgagtaaatgcttgggaagatggatggatggatgatgaagggtgggtggatagatgtgtggatgggtgagtgggtgagcacacagatgacatttagtctaagtctgtggcaagcagcaaagcagggcatatgtggcagagcctctaggatctccagacaagctggagggacacacgtggaaaaggtttgggagtgtggaaaggggctactctgggagaggcactaggatctgattccccaactcaccaccaggaggagggtgtccgtgtgtctattctgctgtttaaagaagtggaattggccttgggcatcaacagtggctatagcaagagggcgctgatgctgctgcaccccaacataaaggtgactctcggcctcagagaccctcccacatgacagcccttctccccacactgtcccagcccccagcgctcccgctccctgatggtctcatctttccatctttcctctctccctcccagtacctcctgttttccttcacctaaacccaccctcatgaaccctccatgcctgctccaggtgatgcgtcacccagaccaagtgacgttgtgggcccatcatgagaagctcctggtggtggaccaagtggtagcattcctggggggactggaccttgcctatggccgctgggatgacctgcactaccgactgactgaccttggagactcctctgaatcagctgcctcccaggtaatccccctgaggccttcctgagcacccccaaactcagataagctcaatcaacaccatttcccagctccagccttaccccctcagtcattccaggccctgccaacctcagggttcctcagactttctgggactccaagaacccactttgaaagtgctgtaactggccgggagccatggcttatgcctgtaatcccagcactttgggaggccaaggcgggtggatcacctgaggtctggagttcgagaccagcctgaccgacatggtgaaaccctgtctctactaaaaatgcaaaaaattagctgggcatggtggcagttgcctgtcattgaagctactcgggaggctgaggcaggagaatcacttgaacccaggaggcggaggttgcagtgagccgagattgtgccattgtactccaccctgggcaacagagcgagactctgtctcaaaaaaaaaaaaaaaagtgctgtcacccacccagtcctttccccattttcactgaccatcaccccattcctctaaaagtgtcaaaggcaactggaggggagggctggggaatcagaccctctgtttcattcttcctctcggtctctctcactctttcagtgctcctctctttggccctggctctgtacagccccatgacttccccttgcccctggcttgggtgtgttccccctacagcctcccaccccgcgcccagactcaccagccaccccagacctctctcacaaccaattcttctggctgggcaaggactacagcaatcttatcaccaaggactgggtgcagctggaccggcctttcgaaggtgaagcctcccacccgccaaagccccagagagctgagagcagggtcagaagctggggctggtactgagagtgggatgagaggggtcaacggtggtacagccctccctctggcaggctctttctccctgccccaagtgtcccaaggagtccagccctgacatctcccctgactctcctgggaccccccagatttcattgacagggagacgacccctcggatgccatggcgggacgttggggtggtcgtccatggcctaccggcccgggaccttgcccggcacttcatccagcgctggaacttcaccaaggtgttcattccctccgataggggctggaggtagggagggagccagggcagattggcacctcctgctgactctgccatccctccacgtcagaccaccaaggccaagtacaagactcccacatacccctacctgcttcccaagtctaccagcacggccaatcagctccccttcacacttccaggagggcagtgcaccaccgtacaggtgaggccccccacttcagccagccctcccctttgtctccttcagcctaacaccccaacccactctccctggtgtgagagctgcccacactctcctttcctggggttaagaagcacatcacggccaggcacggtggctcacgcctataatcccagcactttggaaggccaaggcaggcggatcacaaggtccggagatcgagaccatcctggctaacatggtgaaaccccatctctactaaaaatacaaaaaattagccgggcgtggtggtgcgtacctgtagtcccagctactagggaggctaaggcaggagaatcgcttgaacccaggaggaggatgttgtagtgagctgagatcacgccactgcactccagcctgggcaacagagtgagactccatctcaaaaataaaataaaaggccaggcgcagtggcttacgcctgtaatcccagcactttgggaggccgaggcaggcggatcacgaggtccggagagcaagaccatcctggctaacaccatgaaaccctgtctctactaaaaatacaaaaaattagccgggagtggtggtgcgtacctgtagtcccagctacttaggaggctgaggcaggagaatggcgtgaacccaggaggaggagcttgcagtgagcggagatcatgccactgcactccagcctaggcaacagagcgagactctgtcttaaaaaagaaaagaaatgaagcacatcgcattcaccattccctaggtcttgcgatcagtggaccgctggtcagcagggactctggagaactccatcctcaatgcctacctgcacaccatcagggagagccagcacttcctctacattgaggtctgactgggaggaggtgggggagagcatggaaggggtgtcccaggagagagacctggggaatgagtggagtcagtcattgagggctggtggagcagaagcagacgcctggagcctgggaccaaggctggaggccgaggacagggccaggggccaggctgctgatgtctgtctctgattcttgccccagaatcagttcttcattagctgctcagatgggcggacggttctgaacaaggtgggcgatgagattgtggacagaatcctgaaggcccacaagtaaggtggactgtcaggaaggtggggactgtgggtgtggtttgagcccggttgaagggggtggggtttgagggaccagtcgcacctctgactccaccccctccccagacaggggtggtgttaccgagtctacgtgcttttgcccttactccctggcttcgagggtgacatctccacgggcggtggcaactccatccaggccattctgcactttacttacaggtgaccccccaggcggactccagctctcagtggccccatcccacccgtgtccccctcctgattctgtcctgatcccttcctgctgggccttaaagaagggccacctctcctgacctcccctcccctctgccagcctccacttctctccctctttcttttctctcaggaccctgtgtcgtggggagtattcaatcctgcatcgccttaaagcagccagtgagtgctgggggctgggggctcaagccctgggcccctgggagagggagattggggcgctgcaggcctgggggtgggggaaggaggctgtcactcctgtgagcctctgacgctacgcagaccatagctggcctttcactgcagggagaaggagagagaccagactctatgtaggaagagtttctggagtgagaggaggtgggacagggccctgtgcacacagagccacctctcacctcacttcccctcctgtcacgcagtggggacagcatggcgggactatatttccatctgcgggcttcgtacacacggagagctgggcgggcaccccgtctcggagctcatctacatccacagcaaggtgctcatcgcagatgaccggacagtcatcattggtcagtgccggatctagtcctctggcagggagagggtgtggggacaggcgaagagatgagaggcaggatgacagagactgcagctgaggctcgtgtaggggtggagggtccaagaaggaatgttgcaggccagtgctttggtagaggggatggggtactggggagagtgccctgggcccaagcacacagtgtgccccgcatccaccccaggttctgcaaacatcaatgaccggagcttgctggggaagcgggacagtgagctggccgtgctgatcgaggacacagagacggaaccatccctcatgaatggggcagagtatcaggcgggcaggtttgccttgagtctgcggaagcactgcttcgggtagagctggggcgggatgccacagggtgggagggagatgggggcgtctgccttttgagcaggacaagaggtagcaccgcataggtactcccggagccagaggtagaggcagtactagattctcaataggcaaggctgggcgcggcagctcacgcctctaatcccagcactttgggaggccaaggcgggtggattgcctgaggtcaggattttgagaccagcctggctaacatagtgaaacccgtctctactaaaaatacaaaaaatcagctgggtgtggtggcgggcgcctgtgatcccagctactaggactaatcagtttagagtatcagtaaagcaggaacaccaaaaaacaaaaagagaaaaaaatcttttttttttgagacggagttttgctcttgttgcccaggctggagtgcaatggcgagatctcagctcactgcaacctctgccctgggttcaagcgattctcctgcctcagcctcccgagtagctgggattacaggcatgcgccaccacgcccagctaattttgtatttttagtagagatggggtttcgccgtgttggtcaggctggtctcgaactcccgacctcaggtgatccacccacttcagcattccaaagtgctgggattacaggcgtgagccactgcacctggccacgaaaaagaaatcttttttgttgttgttgttgttgttgttgagacacggtttcactcttgtcgcccaggctggagtgcaatggcacgatcctggctcactgcaacctccgcctcctgggttcaagcaattcttctgcctcagcctccggagtagctgggattacaggcgcccaccaccacgcccagctaatttttgtatttttagtagagacagggtttcgctgtgttggccaggctgatcttgaactcctgacctcaggcttcggcctcccaaagtgctgggattacaggcatgaaccaccgcccctggccaaaaaaaaaaaaaaatcttttttttttttctttttttttgagagggagtctcactgtcgcccaggctggagtgcagtggcgcgatctcggctcactgcaggctccgccgcccagggttcatgccattctcctgcctcagcctcccgagtagctgggactacaggcacccgccacctcgcccggctaattttttgtatttttagtagagacggggtttcaccgtgttagccaggatggtctagatctcttgacctcgtgatctgcccgcctccgcctcccaaagtgctgggattacaggcatgagccaccacgcccggccaaaaaaaaaaaacttttgtgttttgtttgtttgtttgttttctttttgagacggagtcgctctgtcacccacgctggagtgcagtggcgcgatctcggctcactgcaagctccgcctcccgggttcataccattctcctgcctcagcctcccgagtagctgggattacaggcgcccgccaccatgcccagctaattttttgtatttttagtatagatggggtttcaccgtgttagccaggatggtctcgatctcctgacctcgtgatccgcccatctcagcctcccaaagtgctgggattacaggcatgagccaccgtgcccggccaaaaaaaaaatcttttaaaagtaatttttttcacaggttctgaggattggggaaagaacagaaaaagaagaaaatttaaaataaaaataattttttaaagcatcaaggtagtcatcaaagtcaagacaaatcagaactctgttggcttcttttacacttattttactattttatattgcatttattttgtttttgtttgtttgtttgttttgagatagggtcttgctctgtcacccagctagagttcagtggcgttaccacggctcactgcaacctcgacttcgccagctgaagtgatcctcccacttcagcctcccaagtagctgggactataggcacatgccaccgtgcctggctaatttttgtatttttttgtagagatggggttttgccatattgcccaggctggtcttgaattcctgagctcaagcaatccacctgcctcatcctcccaaagtgctgggaatacaggcgtgagccaccgcacccagccaattttgaattacctgagtagggacaatgtaacttttctggtactcaggttctctaaggatcttaatctggccctgctgggacccctttctcctatagtgtgattcttggagcaaatacccggccagacttggatctccgagaccccatctgtgatgacttcttccagttgtggcaagacatggctgagagcaacgccaatatctatgagcaggtgggaacttgggaggggtgggggagagtggcctggggaaatttgtggattatcctgctcagggtaggatggagagaagcgccaccatacagtcattattggaagggggatgagggcctggggacatttgctatcaagagatttagtggcccaggccgggtgcagtggctcatgcctgtaatcccagcactttgggaggccaaggcccggtggatcacctgaggtcaggagtttgagatcagcctcccaacatggcaaaaccccatctctactaaaaatacaaaaaaattagctaggtgtggctgggaggctgaggcaggagaatctcttgaactcaggagacagagatttcagtgagccgagatcacgccattgcactccagccacctgggcaacaagagcaaaactctgtctcaaaaaaaaaaagtacaaaagttagccgggcatggtggtgggcacctgtaatcccagctactcaggaggcagaggcaggagaatcacttgaacccgagaggtggagattgtagtgagccgagatcgcaccattgcactccagcctgggcaaaaagagtgaaactccgtctcaaaaaaaaaaagagagagagagttagtggcccagggtcaacggggggtatggagagatggtatgggggaaggggtctagcctagttggacttagattgttgggagagtctccccaagccttactggcgtccatgcccccgcccacagatcttccgctgcctgccatccaatgccacgcgttccctgcggactctccgggagtacgtggccgtggagcccttggccacggtcagtccccccttggctcggtctgagctcacccaggtccagggccacctggtccacttccccctcaagttcctagaggatgagtctttgctgcccccgctgggtagcaaggagggcatgatccccctagaagtgtggacatagttgaggcccccgtcagggagaggtcaccagctgctgtgccccaccacgtctggctccctgccccttaaccccaaggactgagggcagtgccctttgagatctggggaggcaggcattcctgaagggaactagaggtgttacagaggacccttacgtgagaaatagctgaaaagggcactcccaaccctgggctggggaggaggagagagtcccagagctcatcccccctgctgcccagtgcaaaccacttctccatgctgcaaaggagaagcacagctcctgccagggtgagcagggtcaagcctcttattccaggagaagggggctctgccccaggccctactacccattgttcccttcctcttcctgcccttgaaccccctccctgtcccagggccctcccagcccattgctgccaaggtggagggaaggataaagccacttctggcttcagcccccaccaggggaaggaaggagggcacattaactccctccaccagcctgctgacagacactaactttgtatccgttcaataagcatttcataaataaaggtgtagaaaaggttca

SEQ ID NO: 1235 - DNA, 53970 bp, Homo sapiens
cttgatctcccgctgtgaccagcccctctctgcctggcaggggaaagccaccaaactaaggccttcctggtagccaaggagcccagcagaggggctgctgctggctgctgggattgcagaggccggggtctctgtggtgttgctttcctggaaaggagggacggcacctccagggcagccagcagtgtgggagcccattccagggcgcaaatgggcactcaggaatggaaaatccaagaaggaaccaaccaccaacaaggaaatgcagtgtgagcggcggctgcgaagtctgtgccttcaaatatacagcgcccaggggacctgtgttggacggggagcaaattggcagggctgagagcgccttggttttctgtgcagacaggtccagctgcagaaattaagactggggctgagtcggggagaagccttccatgttgagatggcaactgggcaaagcaggacggagacctgtgtgtctgattagagaggcctgtggcattggcatgtggctggaggtccaggcagggtgccaccaccgcagaggtcaagcatgaattcagtcctgacaaaacatgggtctccacctcgaagctggctcagcctttgttcaggaaccggtgagtatgttttctatctcttttgtctagaaaggaggtttgaggacacagagtgaaaggaggggctttgcaggtcttggagggctccaaggactcacactcactgaattagtccggacggtttaagagccacttgcaggctggatccatttggtctcattcttccattaatcagtgagttaagccctccaagccctgcagtttgagccatcagctctgatttgagggcagaggagggggacttgctgctcagccatctaactcctgacagaagaaagacctagactccatatgccgaagggttgctgggcgcagtggctcacgcctgtaatcccagcactttgggaggccgaggcaggcggatcacaaggttaggagatcgagaccatcctggttaacacggtgaaaccccgtctctactaaaaatacaaaaaattagctgggcgtggtggcacgcacctgtagtcccagctctcgggaggctaaggcaggagaatggcgtgaacccgggaagcggagcttgcagtgagcagaaatcgtgccactgcagtccagcctgggcaacagagcaagactccgtctcaaacaaaaacaaaaacatatgccaaagggttgctctggtggcaggttggctttgctgctgtggctctcgtgttagaggagggttacctgtttcctcctctgtgacatagaaagtggggcaagaaagatgccccaaggcccttcagactgtcccattttgtgccttcaagttgcacgcccctggcaaggatggtctggaaccgttcccaaccttgtctttgtagctctcgggaagggccaggaaattcctcctgcacatccatattttcttttcttttttctttttcttttttttttttttttgggatggagtttcacttttgttgcccaggctggagtgcaatggtgcgatatggctcaccacaagctccgcctcctgggttcaagtgattctcctgcctcagcctcccgagtagctgggattacaggcatgcgccatcaagcccggctcattttgtggttttagtagagacggggtttctccatgttggttgggctggtcttgaactcccaacctcaggtgatctgcctgcctcggcctcccaaagtgctgggattacaggcgtgagccaccgcgtctggccctgcacatccatattttcaagtttacttttaatatccgccatgacacggccgggcgcagtggctcacacctgtaatcccagcactttgggaggctgaggcgggcggatcacaaggtcaggagatcaagaccatcctggctaacatggtgaaaccccgtctctactaaaaatacaaaaaatcagctgggcgtggtggcaggcgcctgtagtcccagctactcgggaggctgaggcaggagaatggtgtgaacctgggaggcggagcttgcagtgagccaagatggagccactgcactccagcctgggcgacagagcgagactctgtctcaaaaaaatatatgtatatatatatccgccatgacgcattttgggagtcgggggtcaggaatagcgttcatgaaatccagtaacattctcctacccgagttggagcctggtctgggaaacatcccggccccagcgggatagcctggcctggcctggcctcggggcatttgggccatggacccttctgtttgtcgtcagatctgagcctgttccaacctttatctctgtctccctgatggctggcccgacagatttatgaagctgacagcgagtcatggagaattcctcccagggccatcccctccccagcaaggaatctgagctgctgactttttcttcctttgctcacccccacaagctcatcccctgctagtattcagggaatatagagttatgtgagccacagtgacagcgacagcatgttgacatgtgagcccctagcactcacatagtaaaatggccacttaattaaataagcctggccctgcttatttactgaagggagattgcgtccaggtgtgggtgacactgggggttacagaccttttggagtgtcccctgtatcatacctaccccatgaacagcagagaatggtcacctattctcagcatatgcttggttgtatctttttttttttttttttttgagatggagtctcactctgtcacccaggctggagtgcagtggcgcgatctcggctcactgtaacctccgcctctcaggttcatgccattcttctgcctcagcctcccaagtagctgggaccacaggtgcccaccaccacacctggctaattttttgtatttttagtagagatggggtctcaggcgtgagctaccgcgcctggcctttttttttgtatttttagtggagatggggtttcaccatgttggccaggctggtctcaaactcctgacctcaagtgatccacccgtcttggcttcccagagtgctgagattataggtgtgagccaccttgcccagccacagaggtattacttttataagcagaacaaaagtgtacatgtgtgtgtgtgtgtgtgtgtatatatatatatatatgtgtatatatatatatatatatacacatatatacacacacatatatatatacacacacatatatacacatatatatacacacatatatatacacatatatataacacacacacatatatatacacatatatatatacacacacacatatatatacacacatatatatatatgccagtacaaaaaacttgccaatacataaaaacattcctcatcttttattttatatttttttgagacagagtctcactgtgttgcccaggctggagtgcagtggtgtgatctcggctcactgcaacccccacctcccgggttcaagcagttctcctgcctcagcctccccagtagctgggattacagatgcccgccaccacgtccagctaatttttgtatttttagtagagatggggtttcaccatgttggccaggctagtctggaactcctgacctcaggtgatccaccctcctcggcctccaaagtgttgggattgcaggcatgagtcactgcgcctggcctcctcatcctttttaatggcttcacgatatacatggatatgcctgaaattttaaaccaggcctctaatagcaaacttttggattgtttccaatatttcacctatttgttttttcttttgagacaaggtcttgctatatcgcttaggctggtctctgaaagtcctgggctcaagcaatcctcctgcctcagcctcctgaatagctgggtgtgtgccacgaagcccagcccagtttttcattcttgcaaatggtgccatagtggacattcttgtgtctgtgtctgtgtgcacttgtgaaagagcatctgtagagggaattcctaggacagtggaatttctgtgtggaaggctgtgagcaatttcattctgacatttccagattgtcatccagacagccacttattctcccaccagcagagtaagtggtcaccgtcttccatgtccatgtccctgagatatgaggggcatgactagtcaggtgactccttatgtggtcaccaggcatttccctcttgtccactcacattgctgaaatgccatggctcttggcagaggagcaggggcagcggtaggggactctggggtcatgcctccagaacttccgagggtggtgtccagaggatacactatattaaatttgcttatctttctggttagatttcccacttctaaagaccctcttacatagtctttttttttttaatttaattttttgctgagacagagtcttgctctgttgtccaggctggtttcaactcctggcctcaaatgattctcccacctcagccttcccaagtgctgggattataggtgtgaacaaccatgcccaacctcatacatttttttttttgagacagtgtctcactctgttacccaggctggagtgcagtggcaaaatcttggctcactacaacccccacctcctgggttcaagtgattctcctgtctcagcctccccaatagctgggactacaggcgcccgccaccacacccggctaatttttggtatttgtagtagagacggggtttcaccgtgttagccaggatggtctcaatctctcgacctcgtgatctgcctgcctcagcctcccaaagtgctgggattacaggcgtgagccaccacacccggcctcatccagcttttttagttgtcccaaatgggaaggtgggtctgatttattgactccgtcactgttggaagcagagttcctactgaaggctctaaatgttcaaagcatttagcacattgtctatttgtagctgttgttatatccaaaattcggtatgattttctttctttctttttattttatttttttattttttgatggagtcttgctctctcgccaggctggagtacagtggtaccatcttggttcactgcaacctctgcctcccaggttcaagcagttcccctgtctcagcctcctgaataactgggattaatgcctggctaattttttgtatttttaatagagttggggtttcactatgttggccaggctggtcttaaactcctgacctaaggtgatctacctgcctcagcctctccaagtgctgggattacaggcttgagccaccgcggctggccaattttctttttttttttttccttcaagatggagtcttgctctgtcacccaggctggagtgcagtggcatgatctcggctcgctgcaacctccgcctcccgggttcaagcaattctcatgcctcagcctcccgagtacctgggattacaggcacctgccaccatgcccagctaatttttgtatttttagtagagacaaggtttcaccatgttggccaggctgatctggaactcctgacctcgtgatctgcctgcctcagcctccgaaagtgctgggattataggcgtgagccaccacacccggccattttctttctttttctttttttttttgaggcagggtcttgctctgtcaccaaggctggagtgcagtggcacaatcacaactcactgcagccttgaccttctgggctcaagtcatcctcttccgtagcctcctgagtagctgggaccacaggcgcataccaccatgcccagctaatttttaaactttttgtagagacacggtctcactatgttgcccagcctggtctcaacctcccaggttccagagacccaccccagcctcctgagcagctgggaccacagctgagtgccaccatgcctggctaatttttaattttttttgtagagacaaggtctcagccatgttgtccagtctggtcttgaactctagggtcaaggagtcctcctgcctcagcttcccaaagtgctgagactgtagacgtgaacctccatacctgtccctgctttatgcttctcgagatgtaaatgaacaggatccaggcagaacccctccaggcccatatgggaggctctcaggaaacagcctcctctgtaatgccaagatgggttgagaccccatagctgccctgcacagaaactgcctctggaggctgggcctgtgtcctgggcttagcggggaagggcccttgacttctgtgggccaacagtcagacaaggcccatccgaggcagcctgggtctctgctgggcatgtccacagtgacagtagtgacagtttccaaccaacaggaccagtgtttcgacaatggggtagatggtttgaaatcctagctgttctggaagtccagcctgtcttttccgtggttgggagcccggcccaggagcctttgttccttggacagacttggccctcgagagggccccagtctctcagtttgtctggccaggtttaaaagtctgcagtggccagcagctggcagtcaggctggaatgtagctgtgctggcttggccgcagacagccccgaggaacagccttcatttccgcctcttcccctcacctcaggctgaaaaatccccggcaggtggcagctgctgggtcttagtctgagtctcagcttctccaaggggaccaggtttgaccccaggcgggcatccaggcatgtgggctgccctctgggcatggtcctacttggatgccagggagccctgccaccttgacacacagggtgaggtggagcccagctggaccaagccttggggtatttggaagtcagccctggtgagagatggttgattgcaaattgattctagttcaaatcaataagcatttccctggcacctgccctgggccaggctgggcctgggccctgcatccccgatagagtctagattctaagggctcccaggctagatggagcgaggggagctccacagcgggatccaggcgtcagtgagaggagctaccgattccaccaggaacagtgggtgggcggggccccagggtctaagtggccatgccgggggcaggcttttaatcaagacagtgacatttgcagacttgcgttctgttcttctgctgtgactgttggccactgtctctgagtttggaggggactctcctggattaatttattcacccccccatggccaccctgtgaggcctgtgaggcctacgctgtataaatgaggaaactgaggcccaacttgttcgagatggcacagccggcaggagctggagctgggatttgaacccggggagcccggctggttctggaggctgtgttggagggggtaaatgtgagacggggagggactgaggcagggcggtggtggcctgaggctgtgccagcgcagggcagggctgatggcactgaaagacatcctggagacagagcttagaacagtgtgggagctggtttgtggtcggcccgccccaggctgcagttgtcccgaggctgcagctggtggttgggtgggtgatgatggtccggccagatgctgggcagtgactgggcctcccaccctgctggtgagccgagtgggcctgagggccccactgtctggcttccctgccccccacacactcggtagcccggggaggggcccatgccagtgggctcgaaggtcagggaggtttgtccaggcctgaatggctcccagagtccaagtcagggggcacatctggggctgggagaagcccacttgagctcacgtggcctcagggcttgaacagtgctgagcaggaaggacaactcgctcggcctgggatgaccccacagcatgtggagctcaaatatctcggctgtgaaggaggagccaatggtatggagggtggtggacagaccctgcggcagcacccaaccccttccgagcgacatgggcaggtctccaggcgtcccgagcctccgcttcctcctctgtaaaacggggtgatggtgatccaatcacagggccactgggtagattaaaggagatgccaccttgaaggcccttggtccagagtcctggtataatacataggacaccggcagatgttagtgtccctgctgtaaggacagccagggaaagggggctgagagggtccctggcccagcaggagtctgttcctgagcacagggaagagagtagcacgggctccccggcttccaagggcctctcccctgcccggccctgggcttcctgccagcagaaccctctcccccttcctctattcaggccatagtggcagtcacacactcactctctgcagtgctgggggcagcctctctgggggggctgcagtcaggcagcctgcagtgcccactccaggcctggaggtgaagccactgcatggctctgccggcccagtcctcgctctgtgagccctgtcgtggccctgctgcctcagtcccccatctcacatgcctcagtcccagcgcctgggggccctgaggattggagaaaggcctgtctgggcagcacaggagtgtgtgggacccctctcggatccctcctgtcttgggggcggtgggcatcggcagctgctgggtgaccgccagcccccttcagacgtttctctcgggcttgccaggctccaagcggggtcctttcatacaggcagcctcatttaatcaccctagtcggggcttaggattgtctccattttacagaggaggaaacccaggctggaggagtcagtgaccgtccttgttggtggtgcctgtcctctttggtccatcccccaccccagcagcacccagggctggcacagggcccatcagagactgtggggaggggagggtgttgggggctaaggctgaggcctggttgaagctcaaggacgggctggccaggggccaggtggttgtggcccaggtttccaccagcatcttccaaacaaatggactggcagatgggctggggcactggacccacgcatctggccttcagaattgtttaacttttttttttttttgacacagtttcactcggtcgctgaggctggagtgtagtggcgcgatctcggctcactacaacttctgcctcccaggttcaagcgactctcctgcctcagcctcctgagtagctgagattacgggcacctgccaccacacttggctaatttttgtatttttagtagagacgggatgtcatcatgttggccaggctagtctcgaactcctgacctaaagtgatccccacccgccttggcctcccaaagtgctgggattgtaggcatgagccactgtgcccagcccagaattgtttaatttggaggaagggtctgtgctgcccgcaccacgccctgttcacccctcccacaggtgctgacactgggcccactgcttgctggctggtgggttggcctccgccccacctggcccccgcccccagggtcactatcaggtattggccctgtagggttctcagcctgtgcctccagagggcagaggcagattcttttcttttttggagacagagtctcattctgtcacccaggctagattgcagtggcatgatctcagctcactgcaacctctgcatcccaggttaaagcaattctctgcctcagcctcccaagtagttgggattacaggtgcctgccacccctcctggctaatttttgtatttttagtagagacggggtttcatcatcttggccaggctggtcttgaactcctgacctcgtgatccacctgccttggcctcccaaagtgctgggattacaggcgtgagccactgtgcccggccgggcagaggcagattcttctttttacttggcctggtggagcgtttggggagggcctggccagaagaacagagacaggagagccagagggcagggggagtggctagcgcccactctctccagattacataatggggctctgcagcctggcctgtgcagaaacactcacccacagcatggctgcctgggtgcttctcatgagagccgggtagctagaactgggcatggcggccccgcatgcacgcagctggctctccccggctgccctgggggtccagacaggcctcctcagacaccgggagaggaagggaggaatgtggttacctgcacctggggccctggggtccacaagaggccacagtgggccttgcctggggacggggaggaacggggctcttgttgggtacagggactccccaccaagtctatccctttggggtgagcactcaccctgcgccaggctccctgctaagccctgtgcgtgcagggtcttgtggagatgacaccctggggggctctctccttaacccattttacagatgtggaatcgggaagtgtcacggccgaggctgcccagcttgggaggcagaagcctaaccctgaaccaagccctcccctgccgggggctgccctcagaaaacccctgcagtgggaaggggtcatccagggtggttgaggggagaaaggatgttcaggggcccgtggagcccccagcctgtgagcttaggcaggaaaagtgccccagagcctacgtctcccgagtggccgtggcttcctggcgtgggggtcgatggccgggtcctgccacctgtttctcttcctcttttggccccttactcagcgagaccttgcgggggtggaccctgcttgggtcctccctcacttggcacttccgctctcaaggaaacagctgtagtttgcagaggactcgccccctccccatgtccaaggccattgccaggaacgggatgaagcgggcccttgtctttagcccctgtccctctgcctgtcctggttccagccccaggccaggggatgctcactggagcacagaaggaaccagaggtgggacgagaggcaaatcttagggtctccgggcccagggccacagctcccagccccaggggcagcccgcgtgagggcacaaaccaattgtctctgctcccctgggatcttcctgtccagaggccgtgaggcttccaggggactgagtcccccgagataggtctggggctgtgggagagcagccctccagctgagggcccgcctgcctctctcgggcctctagctccctgtctgtacccagcagtgacttcgagaggcgctacaggtgggtgaggagggccaggcctagagcggggtgggcagtgcggccagcagtgtgtgtaccgctctggggctcagccctggctctccctcttcctagctctgtgtggccctgggcaagttgcctgtcatggcctcagcttctccatctctgtggtggggacagtagcacctgctattggggatgaagtgtggattggagatgatgtgtgaatagtgcttgctcagtatggcattgggccatggtaagtggagagcctgcctgaggctgggcacacaacagaatgcaagacagacagctgtccctgaaggcaccaagagcaacccccgtgtttgtcagcggcatcgctcgtcagtcttgtttcctggttttccccagacccgaggaaaaggcccaggtgtgtctacctgccttggacagctgctgcctcagagagaggggctggcgctgcaccctcgagcactgtgggggtccgcttcactggcctgggggggcctcccctgacccactggggctgcctctgccttcctgcatcgggaggctgggtgggggaccctctagccttgtatggaaggagcgtgggagacagaggaggacagccgggcagcaggaacagcacaagcgaaggtgggaggtgggaggcaggaggcacatttggaggcagagggaacacagaagatgatgctccgtgtggtcaggatggagggtggagcccggcctcctcctcttggcatccagggctgcagcccctcaggagggttcagcctccgagcccgaaatggatgcctgggagtggggccccaggtgaccgctgcagcaggggcgtccccttgtgctcagcccacagttgagggtaggaaggagtctctgctgcacccaggcggggatgttctggggttggctgtcctaaaataataaccaggtgtggctcccaccaagcccagacaaagaggggccgaggctgggtaaaggctctaggacccaccccactggccctggcctctgctatggtgggtctgagacagagatggctggccaggccatggatggtcctattccctaagcctcagtctgacacccccaggcaggccacttgccacatgaacacgagccagggacacccccagctcctgtgggctcaggcccaggtcgtgtgggtgccagtgatgaaggccaagggcctgcgtttgtcctccctggccccgtgccggcgcgggaggggccggccaggcaggcatatggttcgaattattcaagccacctcttggcaccttagccctcagctgggggcgtgcaggctgcctggatggccactccagcaccccctgccacagccctggggtgacccctccatccccccgccccccggaaacagagccttctgctgccagctccctctgcctgggccttgggtctctgttgccaggcatctggtctgttaggagagccagctctgccctggctctgctccttcagacctggcaggctgggggggcacaggtggggtaagacagaggaggctcagcaaagcctggctggggagcccagtgcaagctgcccttggccccgttcaagtctggatttctgaagggctgccccatggccctctgatcacccccaccttctcccccagctgcttgttcaggtccccaagttggctttgaagctagacagtcttggggtcaaatacaagttctattccttgtaagctgagcctcagcttcctcatctgtgccatgaaggaagtgcccacacacgcagggaaagccacaatgaccctgctggggcacaggtcacgtggataccgtggcagaggtctctccacaggagggctgccataggctttgagttgctattttctagcttgaacattttgcagtttggacaacactctggaatcaactgaccagtggcttttcatttccccgcctgtccgctcgctttttcttcttctcatggttctttctgtgaagggtctgcacccccagccctctgacttcctccagctccacccgccgctcgggagcaatgaggctcccctgaggatgccagaggttcggctgcctagggctctatgcctgcgctgccattggtgtaggcgacatgatctgaaggaggaggcagcctggtgaagtgtggccagccccgaaagggagcccagagagcagagcccagacctcacaggcaggctgagggtgaggcctggcccacagctcctgccctgctggggggcctctgggggcctcggctcagtggaggtgagggacatgccttgagcttcctggggagggtccaggcaggagctggaatcatctctaggggcagcccacggcgtccccacaggtgcttctgttcctcactgagaaatcctgcagggttccactggggctgggagcggggtcacaggtcaggggtggggagccggaattgctcctcgggcagcacatttttcttctctggaaacctatcttagcaaagagaccacgaaacaatcgcactcttttccgggcctctgtcgtccccagacggccagcccgtctcctcggtgggggctccgagggggccgggaaggcgaaatttgtaaaatgtctgtaggaggggaagaaaggcgctttgtgtggggccggggccctggccattggtcagctctgaggcccccagccgctcccagaatgctccccttccagaggagggagcgcctgccagccgaggccagccccagtggtccctgaaaccccctgcgcccctgcactccctgcgtcccgtccccaggccacccagcctccgagggcgcgggccaggcggggcggcctcccctggcctcagcatgtttctctactggaggaagcggggcacctacgagctggaggccctgcccggcgacctggccgagctggagctggggacggtggagcgtttctcgtggagctccaccctggacatcatcgaggacctcgggggtaggtgcgaacccacctcccgggaggactttcagcaggctctggcaccgggcctgcccagccagggcctgtagcccattcacacacacatgctgctgacagtcacttgctccacggtggtgtgggggccagagccactcctgagagctgccgctggtgcaggagaggacccggaaatgaggaccctgggggccagagggcaggcaagcagctgaggaggctgtccttcctccagggctggcctggctgggcagcgtgggccctgcactgggcttcaggcctggcctctgcctctgctctcaccccgcccgcaagatcaggccatggtgttttctcagggctgggtggtgtaatgagatgttctggaacattcacgttccaggtcccaggacgtgggtcatttctccttttgtccccattttacagatgaggaaacagaggtacagggagtttaagcccctgaagaggcaggatgagctctcggggacgctgagccccgtggcttgtgtttagaggggtgggacgttggactgctcctgggggtgagaggttggggagctgtgaatgggaataatgatgccttgggggtcactgggaggctgagagcactaatggggatgacacacagggagcttcaaacagcggtggcagaggcagggcgcacctgtgctggctgtcggatgcccattctgtccgctcagctcagctggtcggcaccgtaggctggtcggcatcgtgggctggtcggtactgtaggctggtcggcacagtgggctgaccggcactgtgggctggggacctagctctgtcagggagctttggtgcagtgacagaaacttgagtccggtccgcagaagctaccggagcgctgatctccagctcccagcactgtggaactgtctggggccggggcctgggcctgggttctcttctccattagcctcatcctcgggcccaggagctggcctcccccaggccacaagcccagggagcaggagcctgtcctggatgagtctccccaggctggcgtggtccttccctgagcccatccgtgaggccagaggcagggagagtgacggttcagcctgcggtccacattgggaggcaagagggagcccgcagaccatacagcgaagggttttgaaaagggaggtgtaggctgggcacggtggctcatgcctgtaatcccagcactttgggaggccgaggcaggcggatcacgaggtcagggaatcgagaccagcctgactaacacggtgaaaccccgtctctactaaaaacacaaaaaattagctgggcgtggtggcgggcgcctgtagtcccagttactccggaggctgaggcaggagaatggcgtgaacccgggaggtgtagtttgcagtgagccaagattgtgccactgcactccagcatgggtgacagagcgagactccatctcaaaaaaaaaaaaaaagaaaaaaaaagagagaagggaagtgctgctcccaggagagaggacgatgccgggtgggcatgaaggccaggcgtccctgcctgtgaccagccccccactgtggaggagggggaatgtggctgcttgtcaggagaggcaggtacagtgtcccacaggccccagcaactccaggccccatcgggacgtgcgcagaaggcagggagggcaggacatgagaggggcggcccagctgcccagctggtggaggcagtggggatgcgggaggcagcacgggatgtgggggtggggtgaggaggagtgtggcagctgatgttgggggggcaaatctcccctccaccctcagccgggcactgtcctggagtcggagggtgggatcgggggcaggctgctctatttcttcacccggcagcttcctgcctacctgaggcaggtacggtgctacaggacccaacagagccagagacttgacccaggtcgtttagccacccagccccaagccagcagggccagccaatgggagcctgtgtcccacctctcgcccccactcagactgtgctccccttggcagggtggggcaaagtggggctgctcgccgtctgcagaggcaggccctccctgggctctcttagttgttctgtacatctcagtcatcctgctggtccctccccttgggatgccctcacggctcagatgcaggaatcacatctatgaagctgcctgtctctcctgcctctggggcaggcggctcctgcttctggggtttcacagctctggggccccttgatcacactggccacagagctaacgtagagagggcatacccagtgccaagtgctctttatttttctctttaagacagggtaggccgggcacggtggcttatgcctgtaatcccagcactttgctaggccgaggcgggtggatcacctaaggtcaggacttcaagaccaacctggccagcatggtgaaaccatgtgtctactaaaaaatacaaaaaattagccaggcatggtggcaggcacctgtaatcccagctacttgggaggctgaggcaggagaatcacttgaacccgggaggcagaggttcagtgagccgagatcataccattgcactccatcctgggtgacaagagcaaaactccatctgaaaaaaaaaaaaaaaaaagacagggttgtcttgctctgttacccaggctggagtgcagtggcgagatcacagctcactgcatctgacctgaagcagcactcctgcctcagcctcccaagcagctgggactgcaggtgcacaccaccaggccctgctggttttttaatgtttttgtagagatggagtctctctatgttgcccaggctggtcttgagcatctggactaaaatgatccttctgcctccttggcttcccaaagtgttgggattatgggtataagccaccatgtccagcctcaaagctctttaaaactaggctcctggaatatccatgcccactctctgagtcaaggccattcttggaatcccctttatcctggtgaggtgtggcgaggcctttgagatcccaagtggtggcacccagatgcaccatgcacaccctcagcctgagcaccagaactgagacctgttcacccgtgtgtgcctgccccagctctccccggggccggcagagaggcgccggggggctgcacacagcggctgggtcacagcacgtgaacaggtctcatgcatgagctgaggcggtcgggtgggtgagcctgggcacacggctgtctgtgtgggctctgtcctctgtgccagccagaccctggccggggcccatgcagggtgggccgatgccagccctgcctgtgatgggggtgggactggcgcttggagtgtgactgtcgggaattgggatctcatagctatttctgcagccccgctcctgttccgcccttggtcactctcggttcctctgaggaacctctggaggaagcccacggggggcagatgggcaggcgcccgcagtagcctcagccggaggaagtggccggctggccccaggcctgtgtgcagagctgtgtggacagtttcttgggccccaggaaggaatcctgaatgtgtcctcccacctcttcttactgagctcgagcagtgtgggtgggtagggctgtgttcagctctccggtccccggggactacgccagcggtggttctgggctgtaggcagaagcagtgtcctggccaaggtccatgcccctccctgcagctgggtccctacttcactgacctgccccaaggtgccccatggcgctttgggaaggggatcagaaacacatttccttcccaggcctccagtgacgctccaaccagtgtcctgcatagggagtggcggatgtcctgggaccagcagccatttacccaggacatgcccctctggcgtttggccaggtttgggacaaatcttgcccttccccaggctgctgcggctaagaggtccagccccagcatggcctgcagcagctgcccaggcatggaccggcgcccaggagggtggggctcacgcgggaggggacattcaaggccacagctgcttcctgagaggggcagcctttgcatggccaggcctgtggttgggaggtcgtgggcagggagggcctgttttcttgagacagaagggttcatcggagtggagggttcacaggtgaggggctaccctggagaaaatgagaacgaggtggttttccatgcacttgtgtcagcctgggaccagtggggaaaggggacactcatgtcatgatggggggaccaattcacgttttccagacagctaattgtgtcaggccccatgggagcactgtagcctggcggttaggagcacaggcttggaggcttacacactcacagcctcgttactctcattacttgtgtgaccttgggcaaatctctctaccctccacgcctcagtttcctcatctgtaaaatggggacaatgatcattcctctacacagagttagatggtgaaacgacaccatctatggacagcagagttcccagcaggtggttggcaagtgagagctgtggtcattgtgtgtcgttcctgaagccgtctgatggggaagacaggtcggtgttggttcaaaggttcaagacagtgggagtccagcaaggacacgttcacctggaactgggatatgtgacaatagggaggccttcctgaaggcagcagccttcaatctgggccttgaagagtgggcaggatggcagcagacagcgatgggaggatgctgggggagggcaaaggaatagcaccaagaagggctgggctggggtcagaagctcagttgtgtccggcaagtagcggagtgaggggcctgcggtggggcgacggagtggcgtggactgtgggggctggaagcatttgtgctgatccgaggcagacacagctcgggagctggagccgtccagaacatgggtccagagctgccgggctcctctggtttgtcaagagaagccagaaatatggacttttatgtgaaatctcctgacttttcaaagttggcaaccaatttaaattcttccgaaaccctgttctcagccaaacaaaacatgtctgccggccgttctgcccgcgccccgaggcccagttctggtagagatcatgttcaggacaaagcccaagtggcctcctgcgactgagacagggtcgggggagaactggcgagtaggctcctctgcctggccaagggccctggtctccctgcgacgggaggtgggggagccaggagggcagctgggctgttgcgcacgtggggaggcagtgtctggcatgcagtggcgggagctcagggttccaggtccgcctagggacgagtggagtgcagggttccaggtctgcctcaaggggggtagttcatggttccaggtctggctaggggtggggggagttcagggttccaggtttgcttagcggagggggtagttcagggttctaggtctgcttaggggaggggggagttcaagattccaggtctgcctggaggggaggttcagggttccaggtttgcttagcggaggggggagttcagggttccaggtctgcttagggtcgggctgaggtcggggagcagacaccgcttaggctggtccacataagaggggttgctacgaagaggcagggctcccaagggaagcccggggcaggcagaggaggccgcccccctgccaccccgagagctgcccactctcacaaagctgccttctcctgccctgtctgctctggggtgatttccactgaggggctgctcccctttttcctgctccccaacaatcttggggcatcgtacctatttggactgactctcagtggactcaagtctccagggcccagtagtagtcctgcctgtgggctcctatcaggaaggggatcggaatcatgtttccttcccaggcctgtctcaattcatagtctcaggagagcaaatctgactggctgagccaggctatgtagatggctcaacaactataatctcagcactttaggaggccaaggcaggaggatcccttgaagccaggagttcgagaccagcctgggaaacatagtgagacctccgttgctataaaaaaattaaaaagttagccaggtatggtggtgtgcaccggtggtcccagctactcggtaggctgacgtgggaagatcacttgtgcccaggaggtcgaggctgcagtgagccctgatcacaacactgcactccagcctgggtaacagagcaagaccctgtctcaaaaaataaattttaaattaaattaaattaagaaaaacccagctatgtccagggtacgctatcacctgatacagtatgtcccccttaccaggcccaccctttcctcgaaggctgtagatggggataggtcacctgcaggagagctcatgacaggcctatggtggggactgcttgtcctgacctcacccccaagccccacaggccccactctgggccctgagagctaccagggtcctgatggatttttcttcgtgtctgcagtctccaggagagaggagctcgcctacgcaatgcaggaagttgcagctttagagcagagcccagagggagctacctcccaggggagccaggaccaggggatcaggagtgtagggtctagaaggcagggtgagcacctggagcctgctgagaccaggggtcagaggccggagagttcaggcaggtagaccccagtgccaggaagtaccaggcaaaggacaaggaattccagaacccaagtggcatagaggccacaggatagtcaggcccgatggtggctgtgacctgagcagtcatggggggatctagggagctggtgaggcagacccagtggcagaagacatggcccggagccttcagaatacggggctacaatccagaggccctggggcaaagggtgtgagaatccaaccccaggctcagagttttgagaacgcaggggcctggaaactttctgggcggacagcagatgttgtcctgctcagctggagaagtcccaggctggacgcatgggaaactcccacaaagctggctgagggctccaggtccccgtggaaacacagatggcagaggagggcctgctggagtcatggcagacaaaagccccgaaccccactccaccctcaagtcagcttcctcccagcaggcagggacctcgccacagtcctcacagggccgtctcttgcctcggctgcctccacctccagcctagaggcaggacaggcatcgctggccccttggatggctgagagcagagactcggagagggaaatgagcacagtgtgggggtgaggctgggctgggcctgaggatcctgagagttcccgtaggctgtgcactgaggaggcccagggccccgggcagctgcttccctctcagcctggaggcccccggggtgcctgtggcagcccctcctcgagagccccctccccagggtcatgcagatgtgctgccccccaaagggctaccctgcccaccaggccccctgtgagctccccaagtcttgtcagggtcaccagtgagtccccagcacccagcttagagcttggctcatggggatcctcagaggatctttagtgtgtttgctgaatgaatccagagagctcaggagacccgggatccgtgctactttgctgtgccaggagtccttggggcaggcaccagtttctggtcacctgtgagtcccagggccggacccagcccatgtaaggagtccatgcagggaggctccagctgagaggccttccagtgaaggggtcagggaagtccacccttagcctttgggagagggacccggccctgctggaagctgcatcttctatacctaggtcttgtcggcgcaatgcctcctggtgccagtgtgcagggtgggctgggggtccagaggcaggctcaggagcactgagcccccgcagactcttggccacctctgcgaggctgtttctgtagggcaaagggtttgctatctcctgatgccatttacataaactacaggaccgggcagacgaatcgatgtgttggaagtcagggcggcggtgcccttggggggaccggttggcacgagggaggtggcgggggctggggactgggtggggacgctctgcagctcggtctgggcacaggttattttgtgaaagtttcctgaaaatgtgttgagctgtgctcacaggacaggtgcacttctctgtccgcgtttgcacttcaataaagtttaaaactgaaccagcagaggacatgcagcaagagccgtggcaggcgagtctctcccggtgacagccctcaccctgcgcggggcagcctccgtgttgccatggaaactgacctcggagacagcgattccgggctggggtgggggctctgcgtggctcccggcctgcattcctgcggacaggcaccctccgcgtggatggcaccctccaggacagagccgtgcgcgcttcctgagccgccccggtgcccgccctccgggaggtggaggcagcctccggaccgcagcgcgcaggggccggggagccggggagggaggggtgacaccgtcggcgccgaggcccggccgcgctcctgtccccccgccccccgcccccgaggcggggccgccgcggctcctccccgcccacctgccccgcccgcctcccgtgcgagggtccggcggcggcggctctgcggcctcccagtccccggcgtccccggcgcccccgcccgccgcccgccccccgcgcggcacggggcctgctccatgggtgagtgcaggcggggacccggcggacgcggggcggggtcctggggggccgggccggctcctaacctcctccggggagggcccgctccaggcaagggggtgggcgccgaccgggcttcgggccgctcgtacccaaactcggcccccaagtcggggcctgcctcggcagcaccccgcttctcctccctccccccgcctctcgctggttgcgccgctctgcccccaccgcggtgcactccagcccccaggaagagaggcagcttggagggggccaaattcagggtcaaagatgagtcttggggaacgggggtcgccccagaccttcgggggctcctctgtctctaaagggagcgatgcagggcgtaaggttctcagggatctgggatcttggagccccttccccccagcagccctgccgggaccccctgggaagtctggggccccaaaaggtcactgagcgctcccccacttgtcccccagactagagggacagagggagagagcagcgtatttccaaagatgttttctccccgtggaatctggataatttccctgaggactgcaggagaaaagggctctgcaaacggattcccgtgcagataagttggcatttaaaagagaaagggacgctgacctcttttgaagggaggactgaggagatcaccccacccctcctccggttgggaggccagtggggcccaggggagcctgggtgccccgctgactgatgccctctgctcctcccctgcagacgaccagagccccgctgaaaagaagggactgcgctgtcagaaccccgcctgcatggacaaggggcgggcggccaaggtagggaggctggagagcctggggaccctcgggggcagaggggccagggctctaactgccctttctatcccagcaccagctatccacagagccctggcacgggcgcggctggctgggctgggttcaagtgtaggtggggccacagtgtgtctggtttaggaggcagagggcctgcccccagctcaggaacagtggagtcgggggacttctacaagaacaggggggtggagtaccccaaagccctttgctgcactgtggtcctagcagccattctgaggtgacaggagctgtagccttatgtcacggatgaggaaactgaggcttagccaggggaagtggtctcccacggtgctggtccagtgcccagatggcacccttcctgttgaactcagccactcttcaggcctgggcatgggtctgagatgctttgggacttggcgagtgtgaccatggccctggggatgacaaaaggaggaaggggccagttgatcctggagtgccagggcttgggagctgggagtggggcgaagtataaatcagggataaagggggcaggaaggaggataatagtactggctgggcgcttctgcctgtgatgtgctgggcttagtgccacccgctttctgtgccatatgcactgattgcggcagctctgcagggaaggcatcgtcaccccgttttccagatgaagacaccaaggttcagagaggtccagtgacttggccaaggcccacagctcatgagagatggagccggggtttggagccaggttttgcccctcccagcatgcatttacatgacaatagtgacaactgcgcaacttagcatctggcgcaggcaccaggactcactgactcctcctccggccttctgagatggtcctgtccttattctcatttacagatggggaaactgaggctcactcagggacagactgctaggaagtgggagagctgggatttgaacccagtacccaggtctgtgtcataccagggcccgtgttgtcttccatcatgtgtctcagcactgccagctgcaggaaatgtaaaatgccaccccccaccccccgctcccctcccgcacctccacccagacacacacacactcgttctgcacaggagggccgtggtgagggaacagggagaactgctatggggcggggcggggagggggcggcctccagttgccgtggtcaccaggcaggggggcggtgtgatgtcagatacaatctgctggcacggatggtgcctggcattgggctctggtgttggctggttgcctctttcccagatgggggctcctggcaacaaattggcctcagctccccccaatatacatcctgccagaggcctgcggagccccgaggcttttgcctgacctgaaggggcggctggggcaataaggcacactgtcccagcccctcctctgggcagctgctctcagggggggtcctcaagctgctcaggcaggggcaggggtgggatggcccagccttcatagaggtgaggcctgggagaagagagctggtctcagagtgggtatggtccctctgcagcctccagacctcacctccagccctggcctgcctggaacttggcacagctgacattggcatcagctgatgagggtcacccagcgtgcacggggagagtctgggccctgtcactactgggacgccctttgggacaaatggcacagactcactgtaggggcagaaatgcctgaattatcagaggcatagagagccagtcagggagggcatcctggaggagggggcctttaatggatgtgaaaacatggatagacagaacagaggcaagggcagtccaggaagggagaggcagtggtggagaggaggtgcggggcactcagatttggtaagagaaacaaagaataacattgtcgatgatgataataataaccactactggctgggtgtggttgctcatacctgcgatcccagcactgtgagaggctgaggcaggaggactgctttagcccaggagtttgaggccaacctgggcaatatagggagacctctctctactaaaattaaaaaaaaggcctggcgtggtggctcacacctgtaaccccagcactttgggaggccaaggcgggcagattgcctgagctcaggagttcgagaccagcctggccaacatggcgaaaccccatctctactataaatataaaaattagctgggcatggtggtgggtgcctgtaattccagctactcgggaggctgaggcaggagaattgcctgaacctgggaggcagaggttgcagtgaactgagatcatgccattgcactccagcctgggcaacaagagcaagactccgtctaaaaaaaaaaaaaaaaaaaaaaaaaaaaaattagccaggtgtggtggtgggtacctgtaattccagctactggggagggtgaggtgggaggatcatttgagcctgggacattgaggctgcagtgagccgtgattgtgccactgcactgcagcctgggcaacagagcaagaccctgtctcaaaaataacaggccaggcgcaggggctcatgcctgtaatcccagcactttgggaggccaaggtgggcagatcacttgaggtcaggagttcgagactagtctgggcaacatggtgaaaccccatctctaccaaaaatataaaaaataattagccggacatggtggcacacacctgtaatcccagctacttaggaggctgaggcagaagaatcgcttggaccctggagaaggaggttgcagtgagctgagatcacgcaattgcactccagcctgggcaacagagcgagactctgtctcaaaaaacacccaataataataataataacaattattgctgaccgaacatgtttacatgccaggcggggcgttaggccctcctgcttgtctcagtgaagcttcttgagaccctcaggagaacagcgttattcttatgaccacatgacttgtaaggaaacggaggcccagagaggtagaggaacttgcccacatcacacagcatgatcgtcagagcctggcctgcgtgaggcttgtctgatcaagagccctattcttactctccaggatgtgactagcgttttgaaggagatgacttcatttattcatttaccagaccagctctgagcatctgtcggtgccaggcccagttctaggcccaggagatctccagagaacaaaggggatgccctcctggaggtgacattctagctgtgctgggaggaaggaagggaagtgaccctggctggccaaacttccccccaggctgccctggcaaaggaccaatttcaggcagggctggacccttcggcttctgggcccacccttgatgttttatttgaggctctcctgggtgctggagcttctgagatgaatttgccatctgtcccctacctcctgcccctggagttcccactgggaggagggctaaccaggatgggcttcctggaggcaactggagtcctgaggattaaagaggtactgagatggaggacagctgagtgagcagggggggacattgggggctataaggggcaagcgaggccagggggcacagggagaaggggacgggaggagggggaggcaggctgcactaggagcacctgcatgtccagatgaggggtctggactgtgtgtcatggagaccccaggagagaaatggcccctccccaggatgaagatatgtagagcagtccacacctctgagctccaggatcaaacctacttttttccagctgtgcgaccctggggaagtcactacacttctctgaaccccaggttcctcatctggaaaataacccggcagcgaggattaaaagaggcccatatataacatgcttagcatagagcctagcacagcgtaggtgtgcaaggtgtcctgggagtgggggtaacaaagtcacctctagactttgggtgtgccctccgtacctgccctgggatctgagacctccccaggctccatcccagcttcttgcacacaggtggagctgtgagtttggggagatggagaaaggccgggagatcaaggcagactaatgatattgtgggttccccctgccctcctgtgaggtggccacgggacagtgtgtggactccccagctccttgctgggctccactgggcactgttcgaggtctagtcagggcgtcccaggtcacaagggggcatggaggaggacacttgtggccctgggccacaggggacattgggcaccacatgtgagggtgtttatcatggaggaggtagtgattccagcagccgccattgatccagcacgtactgtatgccaggccctgccttagcgcctggcacagaaacctcatctggccgcctcccccgctgcggtggggcctaccccatctccgtttcctagagagggccctgcagagtggcgaggtaaaatgacttgccaagcaaggcaagatcaggactcaaaccaggcctctctgtcagagcctcccatttcctcagaactctcaggaggaaagggaggtgaatttttctgcacagctcccaaaggccttgacagggaggtggggttcagcacactacaggaaagagtttccagcagctggagctatccccgaagtggaggtagtgagcaccccatcactagacatatgcaagaagagacagaaagggaagcgtagaggggattgcagtgtggagtggaggttggatgggaggacttcagagttcccttgcagcttaacaatggcctgtgaggtggcagggatgagtcagggtatgcgtgtgtggagggaggggtggtgagatgaagaccagggagaggaaagggtggacctgaggcccccatggagaagggacgggcaggatgtgagtaatgggagaggcaatcacctattctcctgggcaatgctttgggggtgagcagcggcagaccaggatgccccagggaatggccaggtttgggccatctctggaagtgactggtccccggagagaggtggtggggctatctgcagctgaagaaacgggcagggccagagaaacaatgcaaggggactcctgggttttggctaagtagttttgggggagcaggtgaagacgtggggatccctggcccagccaggagctgccctagtataggcccagccccaagggttgtgtggggcagtctggaggttttggcctgggaaggggtcgggggaaggctgtataaaaagcttgaaagtgcggaacaggttggtggacctgaactccacctcctcgagtgggccccctgtatccacacccttcccagtcctgagcccagagttattctaaactcccgctgctgggagaggggaactgggaaccactaaatggcagaacagcacccttttccggccatatcacctgggccagaaaaaaaaaaaagagggggcccagagaaaagcgggctgtttctggggcaccgcggaggccgcagatcagaatccagctttttacaatagagcggaagcgaacctggctcagggcgattccggggcgggctaggcctgcgggtctctctgcctggtcccccggggcttttctgtcgcgcggaggcttcctgtcgcgggccctggtcccccctagcccccttccgggatgggcgagctcccgtcttcaagcccaagttaatgaccagggactttgaactttttggagatctgcaaagggctggcccctcggggacagtgacgccccccaccccctcccctgagcccggatcctggattaccccaagccaccgcccggcctccagccacctccctggctccggcgcggggcccttcctgggacccctcctctccccggtcccagccgggcggcgccgttggtacatcccggccggtccaggtggtagcgcccgcgcggctaccgtaattcccctacgtcccgcgccccagtttgcgctgagtcgactgagcccgtcccgcggctcccgtccccctctccccgcgcgccccatgaggctttggcagtctcggcccgagccttagagccttagacaccggggaggagaccctggtcctgttcctaggtgagtcgcggggaagtgggagctgcgctccggacggggggtgggactaggcgccaggacccccctaaaccgatggacagaacccggattcgagattcccacgtagtgccaggcctgtgggtgggtacagggtcctcaccagctgtatctccatttacgtgagggtggaatgggttcaagctcccgcccccatcacagtgtctctagggtgggtcggctcggagatagggccgtgaggagtctatgggaccctggccccggtatggggggtattggcggggcagggggatcctggaggggcccgggcgcgcggcgtggctgggaggctcagccgatcctccccatctggccagtcccggagtcggtcccaggcggaaaagccctctcgaggccggcagggggcgccagaggctgcgcctcgggcagtctgagcagacccaggcacccacttaggggtgggggatgcgggagacccgtgaatccggggaggccctggcctgccttggtggaagtctgggaaatggaggccaagaggtcccctgcagattccttagtaactcctcaagttgagggagctcgggggtattttaccattctcctgccctttagccggggtccgggcacacactaggacctggcagccatccccagatactgaattctatgccctcttggcacaggtgggcaaattgaggcccagtaggggaagggtgggggaacgtaggctccagaccaggtcttctgaagcccaggcaggtgccctctttcccccgctccctaccaaggaggcttctaagttgcaccggggaagggcttgctagtccaggtgctccgaagacacacgctggggtctggggctgggaactgcagaggctgggcaggaggggatgttcacagactgcagcccctccctctttctctagcactgggtcccagccttgggcatactagccaggaccgctccctggggaggaaggggccttcctggcttccagggcccgtgcggtgggcttagcctggggagaggttttctgtgtccctgccatctgcccggcacagggcagggccttaggtcaggctctgactccaggtgagcctcagaacccaaggggtgatgggtgaggcctgggcctaggggaaaggagggtgggtaggccgggtggagcgtagagagccgcctggcaaagccaccccgccctggctggcctgcccatgcatgcagtctccacccctggatttctaaggtgttgggtggggccttgggactagcaggctcccaggggagcttagccttggtgggaattcctggcaaggacatccctccagccagagagctcggactcctggttccaggcccgtctgctgtcggcagagcctggagctggccccagacctgcgtcctttcctggacagggaagtccctctcccacccagaccaggctggggccccagctcgttgtggggcagggatgcctgggggatccctggtttcccatctgcttttctggggctgggggaggtgatactgagggagaacagccgggtgcgggggtcctgccttggagactccattattcatcagcctccgcatctggtttctgggtatcagtttcaacaagccggccctgactcacaagcctggagctggggctgggctggggaggggctccctccccagggagttgggggccaggacttcttgggcctgcccctgagctgtttcagctccctgctgtggagaggaggtgggaatgcaggagcctgcccaggcccaccccactgccctggtacaggggctgggggctcctttctgctctgcactcttgcccctaaggaacagtcccccacccttgctgagtacccaggcagcagcctcactcagggatggccagggcccaggcactcaggtgacctctggtgatccgccctgacccagccctggtggtctccacttgatgcaacctggttaccccacaccggtgggctccccacaagctggctttgggatctgccgtgtcttcaggaaggcaatctccagggccctgttgcccaaaccaacattcagctgtcttcaggccccacgcctgccctgtgcctgaggcacccatttccctacgtagcagcagctggtgactttggggcaagtcagttgacacaggccttagtttctctatctgttaaatggggattgtaacagtatctcctcctaagagtctttgagaagagcgaatgggattcactgcctggaactcccacgatggggtggcacatggaatgctcagtgaaatgcagttatctgcctacaggacagtatgggggtggaggtctggggcaagaccacccgatttgaagtaggaactcacctgcccagggccagcaggcccaaggtcatggatactaggaggaggaagagaccttcggtctggcagtggggaaggctctgttgactgtcggccacaggaagggatatcctggccgagccctttcctgtccccatgtccttctgtggcatgaaggcccttctgccttcatctgttcactgatctcatccccaccaagcgcacctactgtgcaccaggactgttctaagtgccgaggacacagtgagatgcagacggccaaggcgctggcttctggagaggacagtctggtagggaagaatgatgataaaaaagtgaacaaagaaatgaattacaggtagtaataaacactaagaaggaaataatttaacttaaaggaattgagagtgggagggtaagggtggtttattttaagatgagggaaaaggacgtcttagaggtaacatttaagttggggcccggtgtcagctgtttcaagatagggtgcgtggaattccagacagaaaatacagaggagaaggccctgagcttggcgagctgtagggagagaaggaagaccggcaggtggaccctgtgcggaccagctgggagggaggcgggagcccggccatggtgggatttcactataagcaagatgggaagttttagttttcaaaactctgcctgttggccgggtgtggtggctcatgcctgtaatctcagcactttgggaggccaaggtgggggtggatcacttgagatcaggagttagtgaccagcctggtcaacatggcgaaaccccatctctactaaaatacaaaaagtagctgggtgtagtggcgggcgcctgtaatcccagctactggggaggctgaggcagaagaatcacttgaacctgggaggtggaggtcgtagtgagctgggatcatgccactgcactccaacgtgagtgacagagcaagattccgtctcaaaaacaaacaaacaaaaaacaaaaacacaactctgcctgtggtgtagacagtgggtgacctgggctttgggagtggagacagccctggaagtctcccagcctctaataaaacgctgctgccctcccaaagccatctcacggaccctggcccccttcccaccctctttccccatggaaccaggtggaggaggagcaattaggggtgggtgggctgatgacagacagcatggccacctcacccccatgggttctgaggagtgtcccaaggaggccatcccagaatcccagagccacagtctgagtttcagtcttgcctgtagacttttgtctctttatgtcactttatcccccacgccgtgaatggggctaatggtgcctgccctgccttcctgggaatcagtgtaaaagcgctttgacagccgtgtagtggtgactccagcaccagagtctgggcgtttgcgtcctctcaggctttgctgagtgccccctggcggtggggacctggcctagaactgcagggacctgggctgctgtgccatgtgggtcgccagggtttcctgatgcctccacctcacccagctcctgggggctgccaaggatagcctctcagagcagcccgccttctgcccacggccctttccagaggccaccggcctttggctctcggcctctgccgtacctgggcagtgagcagtcggtgtgagggggtgtccctggggctcaggctctcgggcaggggtctccaggttgatgggaggggctgagatgagagctggttgtgaggttggggtgggtgtgtgactggggctcaaagctggtgttggagcagagaggggtgtccctggggctagatggagagccggaccaaggaccctgaggggagtgtgccccatcctggcctcccccttctggtgcctgtattctaagagctcccttgctgggagtaagaaggggtcccctgggctgaggctccgaggcgggggtgggggtctccaggaggaagggaggagggaaggtacccttctggctgggagggaccgtgcgtgttggcgctgagggtgaggtggggaccacagcagagtgggcacccccagggctgggcggggatcgagtcacccaggggaggggctccacagtctccaaggtgggggggggtgtcaccagcgccccctgcctccagcattcaaggagctccccaggagaaagagcaagttctgaggagccctctgagcccggcattggtgttgaggagggagtcagagaagagaggggcccggggccgcgcagaggcgcagaggtgggggtaccccgggccaggcagaggtgggaaggtgggggtcccggggactgggcggaggcggggctgtgggggtcccccggccgggcagaggtaggggtgtggagtccccgggtctgggcagaggcggggaggcggggggtcgcccgggcaggcggaggcgggggtgtaggggttcccgggcggggaggcggggatccccggggctgggtggcgagggcccgggcgggagggaggtgtccgccttcctggggggctgggggctgttccgggcccggccctccccggggtccccgcgctcggcgggggcgggcgcggccgcacaatggcaggaagcggggctccgcgctttgtccggcgggcggcgcagaccgcggcttcctccggccgccatggggacaggacccggtgtctccggacgcctagcagcctccaggccgggcccggggctgcccctccgggactcggagccctcctgggccgggggtcgtgcccgcgacggtgatagccaggtacggggccgggacggggcgggaacggggctgggtgcccagttctcgcctgcagccgcccagtcctgtgcgggaggccagggagggggtgcccgtgactatgggccccgcggcccccaggggaaggatgcggcccatggcggccgagccccctacctgggcagctgcaccctggtgacggggacctcggactccggggtgtgtccccgccggctgagatgtccccgccaattcttggcgctttgtgtctggggccagctccggacacacctgtgggtcccgggccctatgctgggccgcccctctcctttccttcctctgccctggccctgcccacagcctcctcctaccccagaggcctctgtttctccttgtgcctctggccccagcccttgtgtgagggtggacgcctggttctctgtccccatcctcacatgcgtgtattccccaaagggcccccctctgttattttggctgcctggcgttagagggggtgggagctggctgttcccatgggtgggctctctcctcccttgggttgagacctgggaacattcccccccggaccctggtgtccctcctgcaggacagaggcaggacatggtgggcaggcaggcaggtgagggaggggcagttgggtctgagagaaggggctggagtctggcttcaagaaggggccattccgccctagtgctgggggagtcctgcctctggagggagctggggagactctggggtttgggggtgggacgtgaggcagaacggggagcagaaactgcaccagggagctctgcccaccccagcttctcagttgggctcatggttctcccggggggcttccagaacttcatcgtcaaccagatctgctcgacgaagtcggaaaccacctggttcagatcctggggctgagcctcactgtgcccccagtgcccctgagcctggggactgctgagaggagggaagcagatgaggtcagccgggcctgggcaccagcccctggcagcagctggaggagtcgagcagcctcagtgatggtagtggccacccagaccatcacagcagggaaactgatctcgaggctttcaagggatccagggtggggtgcgtcatagggctcagtccgtatttgttgaatactgactcttccgtaaggagcgaatcagggtatcaaatctgctgtctgtatattggattgatttaaaaacaagatggtggcacagagtcagacttggactggaagggtcccagagaccctcccagaactcctccgacctagcacggctccttccttgtcaccccctacctgcggtgagaccagggcttgggtcatgggcaggtctgccgccccagctggcactaggaaatctcaggaggcctggaagggattggagctgggagcctctgccatgctggctgggttcacagagggccagagggctgcggagcccgcagacggggggctcccaggaagaggggacaaggtggggcagggcccttccccagatcattctcatgaggagacacctgaagcttgggctcccagaagctgcaaagcctgatgtttctctcagcagtgcgctgtggattcagggtgagggtgtgggtagagccctggctgaggacagcttagtggtctctgtagtttttaaatttttttctgagacggggtctcactgtgtcgcccaggctggagtgcagcaatgtgatcatggctcactgcagcctcaacctcctgggctccagcaatcttcccacctcagcctcccaagtagctgggactacaagagagcgccaccacacccggctaattttgtttgttttttgtagaggcaggatctcactgtgtggcccgggctggagtttttgcactttgttttacgatagattaagacagaaaccagaaagagctgcaggggttgagggatcaatcccatcaccctcacttcaagccccacaagcacagttgaagatcactcctgaagggtgtagaagtgggggcacctggtgctcaaggctgccttcaggaatctgggtcatcctgtccccagccacctgcctggggcccagctccatgcagatcagcccctccctgagcacgtgggcctgcttggagtgccacctgccgactgccagtcctgtgccctgttccctttcctgtcagatggagacacggagggacacaagaaccaacagggcttgcatcaaactgagatagatttcctcctgtccccgtaatcccggctgacctgaggccagcctctcgctcctaagacacccatgagagggcgtgaatgtgggttaaaatctgggatccagtctgggtgccgtggctcacgcctgtaatcccagcacttggtgaggccgatgtgggtggatcacctgagggcaggtgttcaagaccagcctgaccaacaaggtgaaaccccgtctctactcaaaatccaaaaattacctgggtgtggtggcgtgtgcttgtagtcccagttacttgggaggctgaaacaggagaattgtctgaacccaggaggcggaggttgcagtgagccaagatcatgccactgctctccagcctgggcaacagagcgagactctatcgcaaaaaacataaataaatacataaataaataaataataatctgggatccagagccccacacacagtggcttcaagtcctagatccactggctgtgtgaccttagacaagtcatttcacctctctgagttttactttcctcttgtgtgaaacagggacaataacagcccttatcttatgggatgagatacacatgtaatgcccccagtgtggctccagacacatgacgaccacattaaaaacacactcagattcttcccggcctcctcctccctcctgtcactttctctgctatcctcaccacgcctatctcggaaatctctcatcgggctttcaccagccagaaactcttcagcgcctctctcctgccttaattcataaatgaaacaaggatttatggagcagctgggaccggaggtcaggcgctgaatcagacagagtaacatttctgtccttgcgaatgtgaccaggtgtggaggcagcagggtggaatatgtgacctgtcaggtgctggaaagtgctgaggacaggaaaggagcgtggagggcgaatgaggaggatgagaaggtgacttggggggaagctagcaggaggggagggaaggcagggagccatgcatttcaatatctggggaaaagcatctcagtccagggactggcagatgtcacagctcagaggtgggagctgccctgagggagtgtgtcccggaacgaccaggaggccagtgggtgaggggagtgagccaggatggaagagcaggacaggaggtccctgaatggggtggccttaaccctaaaaaaaaaaaaagtcaatgtcataaaagactgaaaaccctaaccttaacccttttggcttttttttttttttaagataatgtcttccctgtagcccaggctggagtgcagtggcgcaatctcagctcactgcaacctctgcctcctgagttcaaacaattctcctgcctcagcctcctgagtagctgggactacaggcgtgtgccaccatgcccggctaagtttttgtgtttttagtagagacggggtttcaccatgttagccaggatggtcttgatctcctgaccttgtgatccgcctgcctcagcctcccaaagtgctggggattacaggcatgagccaccgcgcctggcctttttatttacttatatatttatttatttatttatttatttatttatttatttattttgagacggagttttgccccaggctggagtgcgatggcacaatctcggctcactgcaacctctgcctcccgtattcaagcgattctcctgcttcagcctcccgcgtagctgggattacaggcatgcgccaccatgcccagctaattttgtatttttagtagagacagggtttcttccatgttggtcaggctggtctcgaactcccaacctcaggtgacccgcccgcctcggcctcccaaagtgctgggattacaggcatagccactgctcctggccccttttggcttttattcagagtgagatgggaacccttggagggttttgagtagatacagtgggactcctctttgaacagggcccactctagctgcacatggacaacatattgtgggggatgggggtagcagtgaggccagttttgaggccattgttgtcatctagctaaaaggtggctgggcagtggcacgcttatgagctgtggctgggttgaggccacagatactaaaggtggagccagcgggattttcgggctgaccagatgggggcataacagagaatgtcaagagtgaccccaagctgatatggtggctcacacctgtaatcccagcactaattccagcactttgggaggctgaggcgggcggatcagttgagcccaggagttcgagaccaggctgtgcaacatggcgaaatcctatctctactaaaaattagctgggtatggtggtacatgcctgtagtcccagctacttgggacggtgaggcaggagaatcacttgaacccaggaggtagaggttgcagtgagccgagattgcggcactgcactccagattgggtgacagagtgagaccctgtctcaaaaaaaaaaaggaaatcccccaccttgcagccatcagaagaatcaaataattgatttaggttaaaatcatctatgtatgctaaagctcttaggaccgcaagctcacatcaccatgcctggctaatttttttttttttggagacaaagtctcgctctgtcactcaggctggagtgcagtggtgtgatctcggctcactgcaacctctgcccccggttcaagcaattctcctgcctcagcctcctgagtagctgggactacaggcgtacgctgccacgactggctaatttttttgtattttagtagagacggggtttcaccgtgttgcccaggctgctatcgaactcctgagctcaggcaatccacccgcctcggcctcccaaagtgctaggattacaggcatgagccaccgtgcctggcaattttttatatttttagtagagatggggttttgtcatgttggccaggctggtcttgaactcctgacctcaactgattgagtgagattactggggaacaagacatctcaaagtgccatgccacagattacttattaattataggggaaaaagggactctacaaggtacagaggtccccagaggatccagcattacaggcaaatagcaagaacacacagctctgtggtgtccccgcctgaacgctcagtttgaaactttctgaggaccaccagggagatccacattgaggagctctgtgcgaggctgctggctcgaagacttccaaaatgtcaaggtcagccaggcacagtggctcatgcctataatcccagctctttgggaggtcaaggcgggcagattgcttgagcccaggagttcaagactagcctgggcaacatagtgagatctgtcactactaaaaataaaaaagttagttgggcgtagtggcatgcacctagtattcccagctactaaggaggctaaggcaggaggattacttgagtccgggaggttgaggttgcagtgagctgatcatgccatactactccagcctgggctacagagcgagaccctgtcttgaagaaaaaaaaaaagtcaatgtaataaaagaccacaaaaaacaaggctgggcacggtggctcacgcgtgtaatcccagcactttgggaggccgaggtgggcggatcacgaggtcaggagatcgagaccatcctggctaacacggtgaaaccccatctctaccaaaaatacaaaaaattagccgggcgtggtggcgggcgcctgtagtcccagctactcaggaggctgaggcaggagaatggtgtgaaccgaggaggcggagcttgcagtgagtcgagatcgcgccactgcactccagcctgggcgacagagcgagactccgtctcaaaaaaaaaaaaaaaaaaaaaaggataaacagacataaccaaatgccacgtgtgaaacttgattagttcctatatgaggaagtatatctgtaagaacgttatttagacacttgggaaaatgtcaatatagactatatatcaaggttcagtttcccaagtgcgacaattctatggggttttgtaggaaaactgtctttgttcttaggcagcagcatgatttctgccccaggggaggggggtgccgagaagagaatgggagagaagcagatgtggtagatatcaacttggggagtccagagggcatgtggatgtcatgtgctattcttataatttttggtaggtttgaaatattttaaaacaagtctgggcgcggtggctcacgcctgtaatcccagcactttgggaggccgaggcaggcggatcacctgagaccaggagttcaataccaacctggccaacatggtgaaactccgtctctactaaaaatacaaaaattagtcgggcgtggtggattgtgcctgtaatctcagctacttgggaggctgaggcaggagaatcacttgaacccgggaggcggaggatgcagtgagctgagatcgtgccattgcactccagcctgggcaacagagcgagaccccttctcagaaaaatttaaaaaaataaaaagaaaagaaatattttaaaacaaaacttgggaaaaataaagagagtgggaggagagaactaggaagtcgtgaatactgatacctgtttacagagtttagctgtgaagggaaagaaagaaagtcagccgtagctggagggtgaggtgaggcctctgtaaaatggagaaataaggctgggcgtggcagctcatgcctgtaatgccagcattttgggagaccaaggtgggcggatcacttgaggccaggagtttgagaccagcctgggcaacatggtgaaaccccgtctctacaaaaaatacaaacactcgcctatggtggtgtgtgcttctagtccaagctactcgggaggctgaggctcgaggatcacgtgagtctgggaggtcaaggctgcagtgagccatgattgtgccactgcactccctgtctcaaagaaagaaagaaaaaaaaagatggagaagccgggcgcggtggctcacgcctgtaatcccagcactttgggaggcccaggcgggctgttcacgaggtcaggaattcgagaccagtctggccaacacagtgaaaccctgtctctactaaaaatacaaaaaaaaaattagctgggcatggtggtgtgcgcctgtaatcccagctactggggaggctgaggcaggagaattgcgtgaaaccaggaggcggaggttgcagtgagccgagatcaagccattgcactccagtctgggtgacagaatgagactctgtctcagaaaaagaaaaaaaagaaaaagatggagaaataaccacgtgttggtgtggcagtgggggaaatgatccagcagaggggaaacttgatgatgtgggagaggggggactgctggggggcgtctcctcaccctggatcgagagatggagggcagttcattctaagtccctgcagcgctgggccggggtcgagggatgtggtggatctcgtggacctcctgaaggcttctgtccccaccccaggtatgtcaccacgccgactgccagcagctgcaccgccgggggcccctcaacctctgcgaggcctgtgacagcaagttccacagcaccatgcattatgatgggcatgtccgcttcgaccttcccccacaaggtgagcacaggcgggagccgcagctcggcccccagagctcctgtgtcagtgtttcagtaactgtcggaaacgtgctagggcgtcataaggacaagtcgactgtaaataatgaaacccgagtatgttacggttccttttgttccaaatgttttttagcaagagagaaagtccatgagcgtgccccttccagaggcaggcctttctctatctggtgctgtgctctcactggttctcacctcccccagctgcttttgcccctggcctgtggcccacacagagaaggcccctttctttctagttctgcctatcctcagggcaggggacttctggacaagtcctgcaagccaggctgtgggcctagcagaggcagtgtggagtgggggtggccaggtcaggaggcacttggagcaggaaataagaaattcctcttgctgagcagggacccagctcaggcccaccatcaactgcctatggaggagtggctcgcaggcacccaggcctggtgagaaatgccaacccccgagtcctttcccagctgatcagaggaacaaaaggattcttctggttgggcacggtggctcatgtctggaatacaaaaaatacaaaaattagccaggtgtggtggcacacacttgtggtcccagctgctcggaggctgaggtggaaggatcgcttgaaccccgacaatggaggctccagtgagccctgatcgtgccactgcactccagcctgagcgacagagcaagaccctgtcttaaaaaacaataaacaaacaaaagactctctcccactgccagggccccttgggaattcaggtgtggtcacagcatgggggaggggaggcctggaagaaagagccatggactttggtcccttcctgtaataacctcagaggcaaggcttccttatccttattttatagaagggtaaactgaggccacaggtgagtttgtttttggggtggagcttcaccatgggtgtcatcccagggcctttgtgtccttttgggtctgtggggatagacagcaatgactaaggccaggcaaggtggctcacacctgtaatcccagccctttgggaggctgaggtgggtggatcacttcaggtcaggagtttgagaacagcctggccaacatgttgaaaccctgtcattactaaaaatacaaaaaaatgagccgggtgtggtggcacacgcctgcaatcccagctactcaagaggctgaagcatgagaattgcttgaacccaggaggtggaggttgcagtgagccgagatcatgccactgcactccagcctgggtgacagagtgagaccctatctcaaaacaaaaacaaaaaacaatgactgagcccctctcctcacagaactgaagggcccttgctacctttaatctgggggttccagggtaacaggctgtggtccctctggaggcagccatgctgcaggctaaggaggggcgggggaggcacaaccctctcctgctttctcccaaggctctgtgctggcccggaacgtgtccacccggtcatgcccgccgcgcaccagccccgcagtggacttggaggaggaggaggaggagagctctgtggatggcaaagggtaggtgagggatgagtgggcagagagatacctggagggccccacggctgggtctcagatcagacattcaggaccagatgctctggcgccttcctcaagtaaggctgatgggcagacctcttcccacgcctgtggctgtcctgactccgggaagaggccacccagcctgggccagcctccagggtgcttgggatcctagcccacaccagaccaggtaccgttcgatgtgactcccgtgttggccaccagagggcgcacagccctatgcgggcctggccgggttgaatccacgcgggttacctgtcacctggggtgagccaagggcggggaggccacaggcccactcgccgcccacgctggcgagggccacccacacctccagcctctgccctcctcgcttccctgcagggaccggaagagcacaggcctgaaactctccaagaagaaagcaaggaggagacacacggatgtgaggagccccccagagccggcagatgcgggttccctacagcctgcgcccttccccgagcctgggccttcctccgggatgggggtggggaggtctgcatcccagggtgcagaggtctgggagatcgctggggttccctttcttgctggggttcccatccgagaccggagggtggggagggtggggaggagggttgggaaggagggtgggaaggagggtggggaggagggttgggaaggagggtgggaaggagggtggggaggagggcgggaatgagggcggtgaggagaagctcacagcccccacccccaccatcctcccaggacccaagcaaggaatgcttcactctgaaatttgacctgaatgtggacattgagacagagatcgtcccagccatgaagaagaagtcactggggtagggcttgatggggctcagggtggaagtgggactgggagtaggggtggccccatgttgcaggctccgggtctctgcaggtgtgacgtgtgtgtctgtgtggtggcccgtgagcgagcgcatccctgcgtgggcagacccgtgctggtgtgcacgccagtgtgagggagtgcggtggggtctgtgtacttgtgcattttaatcatgtatgcaggagccaggcctgcgtgtgggcaggcgtgtgacaggtctgccgtggtatgcagatgcgcctgtgtgagcacctctgcgggcaggtgtctgtggacctgcgtgtgatcccatgcgggcttcccttttccgttgggaaggtgggggcagctggggctgtgggtggggcgggggctcgtgggggcggggcccaagctgaagcgactggccgcctggttctaacacacatgcctcctgtcctgggggcagggaggtgctgctgcctgtatttgaaaggaagggcattgcgctgggcaaagtggacatctacctggaccagtccaacacacccctgtccctcaccttcgaggcctacaggttcgggggacactaccttcgtgtcaaaggtgagaagcagcctgggccaaatggggccgctgggactggcggagcctcctggagatgggcgcccttcccaggctcaggttcccattggtcgtgggcctgagcagcctcattaccatacaggtgtctctgctggatgctgctgggggaggggagggtgctggcagggcggggctgtcgggggagggcaggcaggccttggtgtggatcctccggggagagaggaccggggaccccctcctccaccagaccagggtactgaggatctctcgtggcccccacatgcagccccagccaagcctggagatgagggcaaggtggagcagggcatgaaggactccaagtccctgagtttgccgattctgcggccagctgggaccgggccccccgccctggagcgtgtggacgcccagagccgccgggagagcctggacatcttggtgaggaggagggggtgtgtcaggggagggggtgggaaggggcccaggctgggcccacagcccctcctcagaggcagtcaccctgggtctctcactgccccatcttggggttttaattgtcccttctggaaaatggggttggctgggagagtaggggaccctctctctctggatctagccatagcccaaggtgagggcttgtatctgagactcttctagtgccaggggtcagggaacctgtgtgtgcatgtgtgtgtgagagcacttgtacctggggctacagaccacccagagctgtgttccagagtgcatctgagtgtgtaactctgtgcttcatgcttgaagctgggggactgggggatgatagtctgggcgtatctgtgtctggaccttccagtctccagatatgtctgggtcccaggagaggggacaccccagggtagagatgcagagaccctcctccatcccaggctggcctgaggccctggaaacccgccctggggtggggccatgggggctggcagggggtcccggccctgaccacccttccctgaccaggcccctggccgccgccgcaagaacatgtcggagttcctgggggaggcgagcatccccgggcaggagccccccacgccctccagctgctctctgcccagcggcagcagtggcagcaccaacactggcgacagctggaagaaccgggcggccagtcgcttcagcggctttttcagctccggccccagcaccagcgcctttggccgggtatgtggccccatctgcccagggtcaggcagctggctggccatgacccctgaccctgaccagggtatctttccaggaggtagacaagatggagcagctggagggcaagctgcacacctacagcctcttcgggctgcccaggctgccccgggggctgcgcttcgaccatgactcctgggaggaggagtacgatgaagacgaggatgaggacaatgcctgcctgaggctggaggacagctggcgggagctcattgatgggcatgaggtgagtgcgggccacagtgctgctccctccttgtcccgaaaggaggacagccctcgggaggacccagtgatcagatgttccatgggacgccccaaagaggccactgttaccattagcccactttggagacactgaggctagatgaaaatggtgtgctgcttggctgttttaatggcagaggagggcccagatcttgggtgtcttaactgtgattactcatgtggtgtcaagggtgaccctgctcctcttgggacctccatgtccccattgggaaaatgagagttgcatgcaggttgcttatcctccccggccaccctaaggtgctccaggcctcgtgaatgacccatcctgccctccctctagaagctgacccggcggcagtgccaccagcaggaggcggtgtgggagctgctgcacacggaggcctcctacatcaggaaactgcgggtgatcatcaacgtgagtaggggctgcgctggtccccgtggccaccctgcccccctctttctgacagccctcagctgagtctgagcctttgcagaaggagcaggtgcctggcaatgaggtgggggcaggaaagtcagacaagggctgcgcccagggaggaggtgcctcctagaggaacctgggagggggcttcgggcaggtttgtcaggttcagctgaattagcacaggtgaggcctcattctttcactttcgttcagtggctgtttcccaacacttgctgtgtgctgggtgcccagcaggccacgccctggacgggacagagtgagctggcagtgtagggatttcggctcagggaggggagcacctaccctgggcttggagcttcctggagggaggaagcaccctcagaggtgaaatctggaggctaagccagggcagaggtggagaagggaattccaggcatggcttcaaagccagtctcccccgagcttccctccaggagggaccagggcagtgtgacctcgggagggctatgaggactgggtctttcctcagggtctggactacccaggtgcgaaggccaaagggtacagccttcttatccgtggctgctgtggggcctcctggaacggggaaggggaaggagtggcaggggagcctgaggctgggtggggccctagggctgagacagcctcccgaccccagtcacaccatcccctgatcccacagctgttcctgtgctgcctcctgaacctgcaagagtcagggctgctgtgtgaggtgcgctgggattcgggggcggcggcgggtgaggtaccaggaaggagggcgggacctggacctggggcggggctaacctggcggaggggcgtggccaaccgcacctcccgccgcgcccaggtggaggcggagcgcctgttcagcaacatcccggagatcgcgcagctgcaccgcaggctgtgggctagcgtgatggcgccggtgctggagaaggcgcggcgcacgcgagcgctgctacagcccggggacttcctcaaaggcttcaagatggtacgggcggggccgggcgcaggcgggggcactgaggcagggctggggcgccgaaaagcctccacggcccgatccggtctgcccagcatccccaacctcccccaggcccgtaaccgcacttgaccccttgtggccaagggtgaggaattacgaggcggtcgcccgggtttgagcctccacctgaccatctacccctgatccctggccacgggtggtcactttggctgaggctcagtttcctcatcaggaaacagggatcataagcttgctgcccccttggggtggtcgcccaagtgcagtaaggaagcgcttgcgcagcgcctggcgcgggccggcccgcagggagcgcgcggtaaccggcgccgtggttgttctgccccgggccagttcggctcgctcttcaagccctacatccgctactgcatggaggaggagggctgcatggagtacatgcgcggcctgctgcgcgacaacgacctcttccgggcctacatcacggtgagggcgcgcgtgccgtgggcgggggcgcaggaggacgggaccctggacggggccgggtggggcggggcctgccctgagcccgcccccactcccccaccgcagtgggcggagaagcacccacagtgccagaggctgaagctgagcgacatgctggccaaaccccaccagcggctcaccaagtacccgctgctgctcaagtcggtgctgaggaagaccgaggagccgcgcgccaaggaggccgtcgtcgccatggtaaccctgatggccagcgggagccgtcccccctgcgcggctctctgctccgtcatgaccctggacctgaagctccctcacctgcccctagatcggctccgtggagcgcttcatccaccacgtgaacgcgtgcatgcggcagcggcaggagcggcagcggctggcggccgtggtgagccgcatcgacgcctacgaggtggtggaaagcagcagcgacgaagtggacaaggtgggcgtgtgtgtctgcgggggttgccggctgggagagaggaaggcccagctggcaggcaggggctgtgctgggcatctcactgaggatgcctagctgagatgggagtcagtctctggcctcccctacgttcacgccatccgtccccagctcctgaaggaatttctgcacctggacttgacagcgcccatccctggcgcctccccggaggagacgcggcagctgctgctggaggggagcctgaggatgaaggaggggaaggacagcaaggtgattccagggccaccccacccctgtgccctgcccttcctagggacctcctgggccccagtcactggttctcagctctgcagtcccttcggtggttactcaagaaccagtgaccttgtcatagtgaatgacagttctctgcctgccattcacaaatccagcagtagggtcctagcccttgaaggcaccagttgtgcccatttgttggtgccacatgggttcctggtgggagggcagccatattccacaagtgggccaggaaccccagagccttgctactgtgccatggccccttcaggcatggggcaggctgagagcttgcacacggtgacttcaaagtcaccagtcttctttttaatgtaaacttgtattgagataagtcatcaacgtacatctcagtgaaagagaatcatcttcctcttcattttaattttacttgaaggttcatggtgggaggagtgtttgacaaaaaccgagtgctcccaggggaggctggtgccacagtccctggccctgaccctgctggcctctctggccaccccccctcctgccactgcagatggatgtgtactgcttcctcttcacggatctgctgttggtgaccaaagcagtgaagaaggcagagaggaccagggtcatcaggccacccctgctcgtggacaagattgtgtgccgggagctacgggaccctggtaaggagccctggtcccctgttcctggtcaggggctgtgatgggtgggggccatcgtctctgctgacactgacttgggccttccctaaccagggtccttcctccttatctacctgaatgagtttcacagtgctgtaggggcctacacgttccaggccagtggccaggccttgtgccgtggctgggtggacaccatttacaatgcccaggtgagtgcagagtagtgagtgggtgggcaaggcagattagggagatgctggtcacaacccattctgtcccatgtaccccaaccttgcctgcagaaccagctgcaacagctgcgtgcacaggagcccccaggcagtcagcagcccctgcagagcctggaagaggaggaggatgagcaggaggaggaagaggaggaggaggaggaggaggaggaaggcgaggacagtggcacttcagctgccagctcccctaccatcatgcggaaaagcagcggcagccccgactctcagcactggtacgtctgctcatgaccacccagcaggtcaaaccaggacaagtactctagcccaggactcctgaaggcccagccacgctcccttcctcccaatggcctcttgtcatgaacactgtgggagcggggctctgtctcccccagagtccgggtggggagggcagacacctttccatgtgctgccagccctgatccattcgtggtagctgcctggggtgctgtgctgaggatccttagggcagatccagccttggcagggaagagtgctgggctcgctactgaggtctgttgtgggcactggagctggaagatctgccacacctgccacatgctgccatctctgagcctccagccccaggagggcagagggtataaaccaccgtgcattgcccagcctggggctgcctcaggccatctaggtttcatggcctgggctgactctgctcctggccccacagtgcctcagatggctccacggagaccctggccatggttgtggtagagcctggggacacgctgtcctcccccgagttcgacagcggtcctttcagctcccagtctgatgagacctctctcagcaccactgcctcatctgccacgcccaccagtgagctgctgcccctgggtccggtggacggccgctcctgctccatggactctgcctacggcaccctctccccaacctccttacaagactttgtggccccaggcccaatggcagagctagtgcctcgggccccagagtccccacgagttccttcccctccaccctcgccccgtctccgccgccgcacccctgtccagctgttgagctgcccgccccacctgctcaagtctaagtccgaggccagcctcctccagctgctggcaggggctggcacccatgggacaccctctgcccccagccgcagcctgtcagagctctgcctggctgttccagccccaggtattaggactcagggctcccctcaggaagctgggcccagctgggattgccgaggggcccctagccctggcagcggtcctgggctagtcggctgcctggccggggaacctgcaggctcccacaggaagaggtgtggagacctgccctcgggggcctctcccagggtccagcctgagcccccaccaggggtctctgcccagcacaggaagctgaccctggcccagctctaccgaatcaggaccaccctgctgcttaactccacgctcactgcctcgtgagtggcctggactggggtagggcaggtggctcagggcactggcatgggggcccactcatgcctgggagcatcgcatttggggagggtcatggcggagggagcctgaaccctgcccagtgtctgggcgcagggggctgtggtgggcagcagtgaaggggcctgaggagtgccgtggggaagagagggtgaccagagccactctgaatggcgtcagccaaagaaggactctgtcccctccccaccctgtagggaggtctgagcagagggaggcccccaagagtgccattgaccaagagacagcagacagcctgcctcctggggcgtgccggcacctgcttcagctactgcctcctgtatgcatgagccggatgctgggcaggatccctgcctacgcccgggcccgatttgcgctttgccggactggatggagtggaggaggcccaggccacagtaccaccccacctgcccaggcagcccctcgtcacctactccccgaagttaccagctcagctcgagtcttcagggctgggctcctaggctgcccatcctacttctaccctcactggcctccagtgggattcactcctgccctgcccccaccttcccagtcccacaggccacccctggcttgggctgggttctgtgaagttacgtatttattgagcttttggttcttttataaagacttgtctagactccactgggaagagtcctttgctttggggcccagtgactcggggcacttgagttcagggcggcctccttgtgttcctgtgctcctccacttgccacggatgggccacggatggagcttgccatgggaagcactgggaagtaatggggtgtggggtgccaccagaccaacacccccagacttccccaccttcagccaccatcagagcctctccccaggtgccccccggggattcagggctgaatctgcccagttcccacactcaggccagccctcttgggaaggtgggtcctccatgggggtcccttcaggaactttttttttttttttaatacagagtctcactctgtcacctaggttggagtgcagtggtgtgatgtcggctcactgcaacctctgcctcccgggttcaaacgattctcctgccccagccactctagtagctggaactgcaggtgtgcaccaccacgccgggctagtttttgtattttaagtagagacggcatttcaccatattggtcaggctggtctcgaactcctgaccccaagtgttccgcccgcctctgcctcccatagtgctagaattacaggcctgagctactgcgcttggccccttgcggtacttttggcccaacctcctccatggctggggacgcggaggccgagagagaagtcacttgccctggctctaccttgaagtggttctcagggttggggcgagagtcggggtggggaccgagatgcagctctatcctgtgcccctggtcgcagcaggcagcccagcgcttcgcgtgttctacttggcctgtccgctgccgcctaatgagctcaggtctaggccgagcagagggggcacctggtcggactcggttgggctcgggcggccccgcctccccccgcccgccaggcgggcccttctcgacggcgcggggcgggccctgcgggcgcggggctgaaggcggaaccacgacgggcagagagcacggagccgggaagcccctgggcgcccgtcggagggctatggagcagcggccgc

SEQ ID NO: 1236 - DNA, 7803 bp, Homo sapiens
ctccgatcctggaaactcattggctccgaggacttaggacctgttagcttggttgggcgactggcaaatccttccttccccggggtagaagtccagggtgagaaattggttccgaactcaaaggaacccagtgccgggccacagccgggtcacgtggccggcggccccccatgacgtgctggctgcggggcgtcacggcgacgttcgggcgacctgccgagtggccaggctacctcagtcacctgtgtggtcgcagtgctgccatggacctgggacccatgcgcaagagttaccgcggggaccgagaggtgccgccgctagggccaggcctcctgcaggggcgggggaaaaggggtccccggagtcatctacagcggggaggggagtagtaggagcccctcggggcttctggggccacccggtggggcaaggaggtttgaggatcaccccccgtgggaaaagggggcttcaaagacatcccaccaggggaggagttccggggaaacgcaaatgaagatgggttcaaaaggcagcctttcgtaatgggtaagagctcgaactttggagcctgcctgggttggaatgtttaatgtatctgggcctcagtttcctcatctgggaagtgatagtatctgcctcacggggatgttatggtctaagatgtttgtaaagtgcttagaaccctgctactcgacaggtagcaaggtcaaataacttgctcagtcccacagctagtgatgaatgaatcggggtttcatgtgatggatgtcaggactgtgctgggcctccctcaagggcgggggaagaggggtcctcggagtcatctactggggggaggggagtaggaggaaacagcccctcagggcttctggggccaccccctggggcaaggagatttgggggtcacccaaacctccttgtgccaggtgggcatggtcatgggcccctctttaggtgggtacagtgacaaacagcttacaaactgtttgacaaaaaagtaagtggaatatgggggaaggggactagctcggggaggaggggaggagaaagctcttagcttactgccttcagtactttctgctgaccactgggaagttcttttccttttcgctcctcaggaggggaaccaagagaaccttttaggaattggggtccagggccctggttgccaaatctggttgcatgtgggcatttctagaaacgcttgtttaaaatgcagtttttccagcctgggcaacatagtgagaccctgtctctacaaaaaattaaaattagtcgagcatgttggagcgtgcctgtaattccagctacttgggaggatgaggttggaggattgcttgagctcaggaagttgagactgcagtaagccgagatcacaccaccgcactccagcctaggtgacagagtgagaccctgtctaaaataaataaataaataaataaaaatgcagtttttgatgaagcctcagacctgctgaatgagaaattttgggggtggagcccagaaagttttttttatgctccccaggtgattctgatgcacagacagttttgacacccatgacatgtaaccctgatttatccatcactagctgtgggacagcaagttgtctgagtttttatgcctgtttcctcacctgtaaaatggggcacagaatcttcttactgcatactatttcttattttaaggtcattgtcatgaggactaaatgagttgatttttgaaaagtgactagaacagtgccaggtccatagtaagcactatatatgtttattaaatgaaataaatctcctttcctaggcatttgaggagactcatctgacctcccttgacccagtgaaacagtttgctgcctggtttgaggaggctgttcagtgtcctgacataggggaagccaatgccatgtgtctggctacctgcaccaggtgggcatggctgtgggcccctctttgggtggatacatatgaactaggaagcttatgaagctctctactctggatgccaattttatggttccagctctgttattaacatgctctgtggctttaggcaagatacttgtcctctctgggcctgtgtccttacctataaaccaaagaccaggccacaaaattacatttcagtgataaaaatgcagtgccttgttcatttctgcccttgatacatccacacacaaccccttgcctccctcatctccccatctacccaagccccgtctgccattcaggagctacttctcctggtgaagctctgtctctctctcgaaatctagcacagtgcttgactatatcattcctttgacaatcatatgccctttgagacatcacttgtattagcctgttattcaattctcctcgataaagtgtaaggccttgtagccagtgctcttgtactgtgcgagtggatatctcccagagctctgagcagaggggctgatctcatagcaccactgtgatcccgaagcattggatgattgcattattgttagtccctgcccttagggtcttatgaatttgctagggctgtcttaacaaaatactgtagactggatagcttaaacaacaggagtttatttccttatagttctggtggctggaagtccaagatcaaggtgccatcaggggtggtttctgatgaggcctctgcttggggtttgcagacagctactttttaccatgtcctcacactgcctttcgtgtgtgtgtgtgtgtgtgtgtgtgtgtgtgtgtgttgtggagggcaagggaggtggttctgaagtgtctcttctcttacagtgacaccagtcctactggattagggccccacccctatgaccttacttaaccttaattacctccataaggtccccttctccaaatacagtcacattggggtttaaggctttaacataggggtttggggtgacacaattcagcccataacagggccccaggctgtggtgtcatacctctaggacaaatccccaggagcacatgggacggggtagcctgacagcccaataaagggggtgcagctggagggggtgctgagacatcctttggggagagggactatagccagaacattgaagcagactctgaccacagtgctctgctctttgctcctagagatggaaaaccctctgctcgcatgttgctgctgaagggcttcgggaaagatggcttccgcttcttcactaacttcgagagtcgaaaaggaaaagagctggtgggtgaaaagagctagtaatctttcccagggcctgcagggtttggctcttgcttcctcagtcaccttcttatgccaccccacccccccagtctacttgctctctgtgtgcaggtgccctcctgccatgaggccttggcacttgctgtgctctttgccataaatgaatgaatgcactttctaaccagcctcaccccatcagccatgacctgttccttcagatctcagcccacatgttacctcctcaggaaggccttccttgactctcactcagactcagcccctcatgctgtttgctgccattataacttgcaactttcttttttgtcttcttcttcagtttgtaactgagcatttgtttgggtgattatgtaactgatatttgtctcctctgctcaacagtaagctctgtaggagtggaggctgctctgttttatctctgctgtatcccccgcacgtctcctgttgtcagacccagagtgggcacttcgcgtgcattcaatgaatgaatccaaaatgagtaaacctccctgagtccatgccagccaagcatgcatttctcaagactcacaaatctgtgggtgagagaaatcacccagtctcactttggagtccgactggcttaaacttagctccaccacttcctgcaggaacttgggcacgtgacttagcctgtctctgtgtctgtgacaataggcctacttttgagggtttaaatgagctcttacggtgggtgcatctgctgtgggcctgcgcactacagctctcctgccttttccctgcatgccggaggcctcctctccctgtcctgatggctggctgtggattctcttttacttctaggactctaatccctttgcttcccttgtcttctactgggagccacttaaccgtcaggtgagtgaattttcccaggacagcctgggatgggctgggttggcagggcctgagtttatggctacgtctagcgaaggtccccagactgggcaaacatcccagctgggcactctgcctctaaaatagccctcagttagttggagccaagagtggtggggcagccgatcgaacagagaggaacggggcctgtgctggtagggagggcaggtggcatttaatgccattcacccagagccatccctgagcaggtgcgtgtggaaggccctgtgaagaaactgcctgaggaggaggctgagtgctacttccactcccgccccaagagcagccagattggggctgtggtcagccaccagagttctgtgatccctgatcgggaggtgagtggagctccgctgtagtcctccaggtggtggaggctttggcttatccccagaagctgtccccaggagatgccaggagatgtccccaggagatgtcctctctctccagcccagtgaaaacagtgaaaaggacagtgagaagggaaagtgggggtagggagaggggaaataggcctcctctgtccatctggccatcctgttgactgctcctggaggacagaggccagtctgctctgctcacccatgtccccagcacatatccccaggaagtccttgttaatgaatcattgactgggcctggcccttcttctaactcttccccctggacagtatctgagaaagaaaaatgaggaactggaacagctctaccaggatcaagaggtgcccaagccaaaatcctggtgagtgacatctggtagtcctctagaaagggacaccaggcccctgtgtttacttgaagccacctgcctggggaatcacagatctcctcctccctggccacccttgtcagatgcatcccagcaacttccttcaagaggccctgggatgaggggtgagggtgggagagtgacctggctagaaaactccacagagcactgaaacctctgcttctccttataggggtggctatgtcctgtaccctcaggtgatggagttctggcaaggtcaaaccaaccgcctgcatgaccggatagtctttcggcggggcctacccacaggagattcccctttggggcccatgacccaccgcggggaggaagactggctctatgagagacttgcaccttaactctgggacctgctggcccagagtggagctagggctaggtgtcaagagagggtgtgggattgggacccaggcccttctttctaaactcaacccatttccctccctaccccttatcttcaggactcttcagagctaatcctctaagttctctgtactcagttggttctcagttagctggtcaagtggagtgtaatggtggcgtagagaatcacaaatggaaaataattccataattatttttttgaccttgcctatgattgattaggatagctccctctaggggtagcagccggtgtgactccctttctggtgacagacagggccccagcagccctgtctgttaccatgtgagtcatactggccaaagcttagtcctagcatatgcacctgagccaacctggccaatcagattgttttgtcaataatttgaaatttgaactggagagatccagaaccttgggagtcattaaagccaagtcattcatagcagccaggaaacaataggaaccaaaagcctctgcctgctgctattgcaattcccaggatctctccttccctggatccctccctcccaggtctgggctgtgcagttcctccccctgccttaaaacaccccactatctctgtaaagtctctctctctcttttttttttttttacttaatctagctagaatctatttctgttgattacaacttaactaactcatttacggataggacttttttttttctttttttcttttttcttttcttttttttttttgagatggagtctcactctgtcacccaggctggagtgcagtggtgtgatcttggctcactgcaacctctgcctcccaggttcaagcaattctcctgcctcagcctcccaagtagctgggactacaggcacacgccaccacacccaactaatttttgtatttttagtagagatggggtttcaccatgttggccaggattgtctccatctcttgaccttgtgatccacccacctcagcctcccaaagtgctgggattacaggcatgagccaccacacccagcgagacggggtttcattatgttggccaggctggtctccaactcctgacctaaagtgatctgcccgccttggcctcccaaagtgctgggattacagacatgagccaccacgcttggccgggatagtatatttttatagcacttcccctactgattgctgccttctctgtggctacaagggacccacagaattacagggaagttacagggaagcaggtttcatctcaatattgggagagatttcaaacaatcacacctgcctgagaaggagtgggctgtcactaggaatttttattcccagtccgtcaggaattttgtagaagggcttcatgtgctggtaccaataggacaggaagattttaatcagctttactatctatgtttttttatggaaactgtgtgtatgtatacatacattttccaaaaagaaaaattaaatgattatagagattatgtttttcagactactcacgtatctgcttttcttactccccacctctgctgataattcctagttcattggtttttcccccacactggaattacctggggagcttaaaaaaccctgatgcctgggtcccaccctcagagatgattgaaccagcctggccagcatggcaaaaccctgtctctactatgatatgaatgcagcctgggcactgggaaatttaaaaactccccagataattctgtgcagccaaggttgagacctcctagtctagagctttgctatacacagggtggtccacaagccaggagcatcagcatcacttggcagcgccttagagattcagaccccagacccactgaatctgaccctgcattttcactagaccccaggtgatcagctgcactagactcaacctctaaaccaagacctcccaccctcacagtctatgatcctttagtgaccctcagctgagtcctgtgctgaactgtgtttgttctccttgagcacatgcccgctaaccagggacagactggatgagcaagcaacctgctggctatggagaagagccaggctgggtaaatgtttgctgtgactaagccaggatcaaagaactgcctgttgcttgcactggctggcactgagcttgccactctgtgaactgtgcttccttcccctgcatggacctgtgcctcagtcactattatccgcaggccttctccaagggcagccctctccttgtttatccctcttaagcctgcgtgcaggaaggcacattaaccctgtggccccctgcaggcaggagggtgttgggtgcccttacctaccttgccctttttcttgtaccgtaggctgtgccgtttatgagtaagtgatgtgtgtctgtgtgtgtgtctagaagtgctgcactcaccttgtgttattggaggttgtgtaaccccctagctttgagcctggtctcagatgttccttttccgttctctgtccagccgttaccgcccccagtctgtaataaaagcctatcagccgtgcacttta
